United States Patent Application Publication US 2011/0014706 A2 - sequence listing, part 11

SEQ ID NO: 21585 - DNA, 2275 bp, Arabidopsis thaliana landsberg
gcatacctagatttcaactttttttgtttactttacactacaaaagaccatgcaatcattataaattagattaatgtgattgtataatcattctagagtcacctttataaatattcgcttatggcggatgacgtgagaaaatctgaaatgtgatacgacgtaattagtccattaggtgcagataaacatcaataccgtgtgttgtgttgtgttgtgtgtaatgtactaatgtgtatcatcaaagaaagctagtaaaattcaaacgagacaatacctttttcttgtgatggttttgctatttaattgtttttgcttcattcagcccaaatagaaacaaaaaccacaacataattgtatatatggtcttactatttagttccttgtgagatttatgaccactacttcactagattgaatagtttatttacacatttttgattggttatccactcataagtctaaaaataaagcgaaagatcgactccaccatcaacgtcagcctgtcacatcttttggcttgttaggcatttcacacactttgatggggttggtacaactttttaatacacacacacacaaactctatttttttgttttgagataatatataacactgaaattcgcacgtgattttctcttttgtcaatggtacgtacaaatacatatatggatgtggcaagcatagagcatgtgtgtgcctgaaatctttgtagggtacggtctgtattgcctttttcttatggctttccatttatggaatattaaataattgtgactctttccatcttataggttagtatgattcatgcatctctagattcgctaccgtaccacacacaagatatgtgatatctatccttttgatatatacgttcaaaacgaattaaaaattgtaaaataagataaagaatttggaatttgattgattttaagatggcgtgatgaggcttttgtgatcgttatcagattttgtgctaatgatggatttcgatataaagttaagcgaaagatctataccaaaacaaaagtaatctaaagatgtcaatcttcattggacccttttctatccttgttttttctccattttatgtcacatcttcaagatttcacaaaacccttagtaaaacgaagcaatgaaggtcgatttatgcatttaatttaagaagaagaaaaaaagaaaaaaaaaaagaaagtaattttaacattttgttttgacttcaaagttcaaacttcagatgtatcttctcgtactagtttaagagcactctgagcataagaagtcacttatgttagattattgagtcaaacatcagaaaatgaaaggtaaatatatctggttttgcgagttagacctcttcaggcttaatgccacaatcttttcgtacggttttctccaaatacaagagattaacatcttcttctttattccattttttttattcaacattgattacgcaattacgtagttaatcaccttaatgttagccagcagtagatagccctccaacagagaattgaaagaaattacggtgaagagcacgcgcaatagaatgagcaatgctagtcttaccaaccccgggaggacccgcaagacaaattatcttccattagtaactcaattctgaggacatgatttttctatatagaatcaagaaacagtatatagagagaccaaccttgtggagtgcctctaagtttttcaacagcaatgtgttctattattctttctttcacattagataagccataatgatcctcgtcaagaatcttttctgcagtcatgacatcacaattctcaccactgcaatcaacattaaaatgattataaatgagacttctcaatcagtgcacaagaaaattaatctaaaatggtgttataactctcctcgagacatgagcatgaagcatgacaaacctgaaatttccccaaggcagcacggtcaaccaatcaaggtagttataggtcaaatcgaagtcgctatagttttcttctaacatctccagctttgtaaactcttcttccatgacttttattacatgttttggaattttgtctcttttagtatcaatccttacccttatctttgttgcagaaaacaagaaaagaacagactttataagcatcaagctgttttccagtcatcgacgtacaactctaggaactataacaagttactaagttaggcctcatgaattcacaaaggtgcactctgaaaacttgaacctctctggacaatctataattaaaaaacatagaatccaaaatcttcttata

SEQ ID NO: 21586 - DNA, 1049 bp, Arabidopsis thaliana landsberg
gaattacgttcgttgaagtttcgtttggcgttcccatctataatagccgaagcccgatccgttaattgtaggggtgtctaccaatcgtgtaggcatcccttgcaaattttagtttatcaaattcacttttgctagtcttaagttgggcattaagactagccacttcatcatttaactttgcaatagaaactaggtgttcactacaagtatcaaccttaaaatctttacacctattgcaaatcacaacatgttctacacaagagttagatctatttgctaattctagtttagcatttaaatcatcattaacactttttaaactagaaatagtctcatggcaagtagatagttcacaagaaagcatttcattccttttaacttctaaagcaagagatttttgtgcctctgcaaatttatcatgttcttcatacaaaagatcctcttgcttttctaacaatctattcttatcatccaaagcatcaattaattcattaatcttatcaatcttagttctatctaggcccttgaataaacatgaatagtctatttcatcatcgctagattcttcatcacttgaggaagcgtaagtactagtattatgagtgcttaccttcttttcccttgccatgaggaggtgtgatgttcgttggggaagagggccgacttgttgaaggcggtggcggcgagtccttcgttgtcggagtcggacgacgaacaatccgagtcccactcctttccaaggtgtgcctcgcccttagccttcttgtaagccttcttcttttccctcttgttcccttgttcctggtcactatcattattgggacaattagcgataaaatgaccaatcttaccacatttgaagcatgagcgcttccccttcgtcttggtcttgttgggatgctccttgcaaccccttagcgctgtcttgaaacgcttaatgatgagggccatctcttcctcattgagtcccgcgcctcaacttgtgcaccttgctaggtacacttcttgccctcgttgctttgaagaacggtttgaggctcgtggattgg

SEQ ID NO: 21587 - DNA, 1025 bp, Arabidopsis thaliana landsberg
ggaaaaatttgaacccgagccaaagtcatttgacatgatttgacatcccttttgtctcggggtgaacagtgggacaaccctgatttggcgtccgcatatctcctgatctagggcgtatcttctattggaactcacatataagagatagtcataggtgccaggaagaggtctgcgccggattcatggcaagattcgcacgcttgcaatctctgcagacgtttgaacaagggtggaaacaaacctccacgtgttcgacgcgccctggcatcgccagagcacgccccggcgctcagccccgcgtgcaccgcgccaagccaaacccgtgcccccgtcgcgcccacgcctataaagccagccaaggcttcgaccgtacgcccccgttcgctctcaacctcgccggagcgccagttcacaggcgattgctctgcgcaaggcgtgccagcggccacccgaaaaccgaccaccgtagactggccatcctagccattccccgccccgtccgaccctcgagagagtctccacgtgtctcagtgaagctcctagagccgggaatcgagctctgcctcgccggagacaccagatcagcgtcgccggacttcactagatcatcggcgcacgtagaccgagctccacggtgagtcttttctcgattccttgctcgggtcaacttattagcaccccgtgaagctccctatgcccttggattgaaccctaccaccgtgagcaggccggagcacacgccgccgacgagcccgaccgtctgcgcacgcggccaaccctattccggccatcaccgccgacgatccgcccctcgacgtgaccgctaggacctcccggacctcagccagccctccaccggaccgctgccggtaagccgcaccacccttttgcctctctgtggctactgtttcggccgagtagggtgctatggttgagagagagaaaagccagggggtattcgcaatgtcagtgacacgatggaacagttccacaggggcactgtttaaatgatttagttgaagaaa

SEQ ID NO: 21588 - DNA, 856 bp, Arabidopsis thaliana landsberg
gggaggaattcaaagtaggccatgtttggcatgattgtgtaagaaacctccgagggtttacacatcggctttaggttaatcccgaagtaactttcggacgaagcatacatcgtgcaagccatcggtaatccaccgctatagtactccaacgtcgggatatactgagccattgctccagtaacaatcacgtcgaggtacttcgtgttaggccatatctttgtgattatcccttcccaattctcttgtgaacaaaccccaaccaaaaactcagccagttcttgatcaggtttggtcaaaatcttggacatgcggtttttaatggcaggatcgaagattcgagaacttagggttccggttgaaatatcacgagcaagttccttccaattgttctggaggaagcttatggcacggaggagaccagaaggaaacaccgcaccgagtcggttaacttcatggcgcattaagagaccacatagcatttgcgtatacatgctttgagatgagtcagagcagaggatggcttccttaggactagtgtagacgctgtctgaatccgacgtcctgaagtagtcgcttttgtagtaactagtgagagccggacgagccggtaacccacctgacgtcttagactctgacttcacaaataagaagtataaacctttgcctttgtctaatcccggcacgtagctgtagttaagacattgtttggttagtttaataaatcgttacaaattttttaataatgttaaaagtatatactaacagattcatcacaggcatgagaagattgcctaaaagctaacgtcggtttatgtcttcttcaattgtcggcattaatttcctctcgccagcagat

SEQ ID NO: 21589 - DNA, 692 bp, Arabidopsis thaliana landsberg
cgaggtctaaaccggtgggctcgtgggtcgtacctgtctctgacggcagggacgcactcacggttgataaccgaaagccatgaacaggaccgcttccctcttcttgaactagacccatagctatgagacaaaagatggtagagaaatattgacaaagatgattctgagtgatatttcggtcttagctatgtaggatatatatagaaatatttttgtgttcttaagagtttttattctttcaaatttgttaattttcggctacgtgtctttctctctttcacccttgctttatagattgtgattgtattaattcattcacgttgttatgcataatattatcatagagacaataggtgtttgcgtcacctgtaggtgaacgtgaccccattgttaattgttttttatcctaaagaaggctacgaaaccaacggcattgttgtataaatgtgttggaaaaccatatatgttgttgtgtatgtctatctatagtacatatactcatcgtctcatatttgtaaatatgtagaagaattgtattgggaaagaaataatgaaatattgcttaattagctatataaatttgacatatacaaacggttttagttatgacttatgagatatgatcagtaccaaactactaataatttcagaaagataaaccattaataacttaatatatgagcaaccatttt

SEQ ID NO: 21590 - DNA, 548 bp, Arabidopsis thaliana landsberg
  unsure (1)..(548): unsure at all n locations
tagtaaatcatttgatgtataggtgtctaaattcatagaacttatatcattaatctttataattttgatgttattattggggaaaaatctttgacatgtgttgcaagtagatatacttgtgatttgtttgtgcatttatggagggatcttggactaggtctgtgttacaaatggacttttgggatgaatccaataacatatgtgcttcaattttggaagatttctgatcatgaaggtaaatattagcactcttatcattgtctatttaatttatcgagctaatacaatggtttacaaacataatgattttaggtcgtcaatgtctaatctcacataatggtgcttcaagaattgtattcaatcaaaattacccagagattaacatgactcacatctcgtaagaacgtttctatttttacaatttatttactgataagtgtattatatcaaattgtaaactaataatatttttattttcttgcccacctttacaggaccaattcctnnnnnnnnnnnnnnnnnnnnnnnnnggtgaagttgttgatgag

SEQ ID NO: 21591 - DNA, 614 bp, Arabidopsis thaliana landsberg
  unsure (1)..(614): unsure at all n locations
taaacaaaaacaaaagcccaacaaatatatgagactaagacttatcatttcaaaaatgaataataaatgttacaagttttggggttaaagcctttgtaagaatgacttttagaatgacaatttgaccaactaacagaaaattattgattagtgtggcacccaaaattattacataaaatgtggccttggcacaaatcgtgttttgtttttgcgataagagaacaaatccatagcaaacgtttgtaacgcagtgaaaggaagattattagagcatccttattgatggtctcttaacacaattcttatgttaagagacatgtcttataactaacaaatgtctcttattaacttgaaagtagcctgggtttagtgaagtcaaccaaataatttcgatgtctttttccttgtttcttaagagatttattttttgctttaccatgcctttttattaattaattatgacgaatcataaacttttaaaaaatattgattggaaataatttattgtataaaattactattggtttaaagtaaaaaataacaaattaataccaacaataatatttgatatntaaatattaattaatttttttaatatatgtgaaaactcataa

SEQ ID NO: 21592 - DNA, 604 bp, Arabidopsis thaliana landsberg
  unsure (1)..(604): unsure at all n locations
cacaccatgaagggtagactccttttggatgttgtaatctgcaagtttgcgttcatcttcgagctgcttaccggcaaagaggggcctctgctgatccggaggaattccctctttatcctggatcttagctttgannnnnnnnnnnnnnnnnnnnnnnnnnnnnnnnagggtgattgttttaccagtgagggtcttgacaaagatttgcataccaccacggagacgaagcacaagatgaagggtagactccttttggatgttgtaatctgcaagggtgcgtccatcttcgagctgcttaccggcaaagataagcctctgctgatccggaggaattccctctttatcttggatcttagctttgannnnnnnnnnnnnnnnnnnnnnnnnnnnnnnnagggtgattgttttaccagtaagggtcttgacaaagatttgcataccacctctgagacgaagcaccaaatgaagggtcgactccttttgaatgttgtagtcagcaagagttcttccgtcctcaagctgcttaccggcaaagataagtccctgctgatccggagggattccttcaaagtcaaggatctttgctttgacgttatcaatagtg

SEQ ID NO: 21593 - DNA, 3851 bp, Arabidopsis thaliana landsberg
caagtttgggattcatttggagataatgcagcattctcgaggaaaaagagaatttatgcagctgaagaaatcagaagactaaaaaccgcgtaggtgtcaaacgacaccacccctggttttcgagcgacaccacccctggtgtcaagtggcaccactacctgacggtaattcgaagacgcaacttattgaagttttgaagatttctaaattcggctcgtaacttttcctttcggctcgtaacttttccttatttttaaagaaggcccatcacttttttaggtcatatatatagtttttagctcattgtttagacctaagcttggagaggctattctcctttatattttttgttcttgggagcaaaaccatgtggagactccctttagataagatctttcttactctttctcttgatatattgactaatgatttcttgttcatactatgatttgtgtttcttttatcatgtctgagttatccacttgttaggttaagggtttctcattagggattcatatggtttagtaaatcgatccctggtaagttatctatagaattcttgtatttttctcgcttactccagatttgaatgccactggggatagtgacgtttaagtctgggagaggcacgtttttctttttgagtcttattcttactcttatttttcttatttttgagtcgttttatagaatcaaaattttgttaggaatcatgatctctattctttagattattgtctggttgattaatgctgcaggttccacttaatccgactattggaaaatctaaatggaaaactgacagacttgaagatatccttgttttcaacacaatccatttaggttgtagctaatctcactgctcttccttttacctcatcaaaacggttagtatttatagaaccactcgtgaaaaacactcgaggcaaagattcgtaaaaagcattcacgctcaaaggcttatttccagctaaacaggatcatttccgggatattcggagagatagaggagaatcttgaagataaaggaaattagaatattcaagtcgtaagtaagaggaagttgagcttatctctaaactgtcttaatctaggataaatagaggggtttgtcctctattttataagggagacaattttatacccaaagaaaactataaatggcttgatcccttacagggtacgtaggcaatccattacggatgcagctataccttctaaaaatcctaatccattagaaccccttgttataaatcagacttgatttaataccaatttgcgttctacgattattacgattacgagataaagaagaaactaagaacacgagatttacgagttccctctgttgcaattcgcaacgttgaggtacgtctcggtgaggatttgctcctcacaagccgaatccactatccaatgtttcaagaggttacaatggtgctcttcaatggagatctctcaccaactctcgtttacaaatctctctctaagaagatgaagaagaagaagataaaaacaagaagcaaaacccagagaattactctctctcacttctctctctctaacactcaccaagaacccagaattgagaataagaatctgtcgcacctctctctgctcttgtaaacaatgagctgaataacaaacattcacacgtgctaacactcacacgtgtgacctcttctttattcccttcaaagcctcttcttgaactagaagtttcacttgaacatgtcaagtccaaatactctagttgttgtagagtctttaccaaacttcaacttgatttttctccttcttatctttcattagcttgagcaaactgaagcttctttgtgctttctccaagctccactttaaagttgaatcatactttaacacccctttgtaatcgagtattggatggaatacctaatgaaaagaaattactagatttgtttttctccttcaaacaaatctattgtatgaatccttggttcaacacttccaacaatgaatcgtagaaaacaacatatcaaacagcagaaaataataaatatcggaagctccataatccggctctatagaagccgtcttagataaagacaacaaaagccaaagccaaatcaaatgccaatctatgtaagcttttggccgttgattggagacaaaatttggacatcttcgcaattaatgccgacacatgccaaagaaaagagccagccaaatggtgctccagagccaccgataaaggagagaaaaatggtcgactctgctgaaaaagccaacgatgccaatgaaaaaccaaccaaccaccataatattagccggacgatgttggactgaagccggaattcaaccggaattaagggacctttgtctctctaaaagaagtcaaccggaatcaagggacctttctctctctaaagaatttgagagagataagagagagagagataatctttattgttctatatagtatttttgaagtacatttgtcattgggtgggttaaattgtgatacgacaaatttggtacccgacttaatatcaaatgtacttcaaaatctcacatcggatgtccatatttttctttggatcgggtaagatatatacaaaattgtaaattgtgatgcggttataccatatataaaaatataaatatttagaagatttgctgaagatttaaaattacagttatgctatcattaaacttttttaaaaatgttttgaaaaatcacataatatctcaaattaaaaaataatcgaaatttcttttgttttgcatatattgtgatttaaaattttgaaaacggatatatataacccaattgatgaaaagatgtgtgttcaacatcccaataggccaaaatgaatccaaagccaaatgaataagaaatttaacttagcaagcatccaaatttagctttaacaaaatactaaattcttttaaacctctctacatgtaccgtcatatttccgaaaccgaggcgttacaatttagaaagaacggtccacgaggcagcgttacctctctacttcaggaacggatcaactcggtcatgtcgtctcgttattggagctctggttgatctccaagcgtctcatttgttctaatcgttacgatctcgctctagaggtttggaaattctcgcttaattaaactgagagttaagcctttttatagaagtttcagattttggttttgccaataatgtgtatatacagatgttggaatggatggagaatcaaaaagatattcaatttcgtgtttatgacattgctcttagattggatttgatcatcaaaactcatggcttgaaacaagcagagtattttgagaagctattacatagttcttcctcgtcgagagtagcaaaatatgcttatcttccgcttcttcgtgctaatgtgaagaagaaaatggttaaaaaaagcagaagctctaatggagaagttgaatggattgggggtttcttgtgactccacacccgtttaacgaaatgatgaagcgactacgttaaggctaaaaaatatggtcgctttttttgtcgcaaaataaactagtcacaaaatcatctcaaatttgtgacaattattgataactatttgtggtcggatattagcgacttaaatgagacatcatttggtagtcgatattagactatttacaatgagcctgtttaaaaaaatattcaactgcttaaaaagtgcagtgaaggtgttgaataatatgaaaaatatacgtggattaaattgtgttgaatgatgagacccatgctgccacgtggtgaaccgtcattggaggaagtgatgagtgaagatgtctatttttgggtaatgataggtgttctctactcatcggttaccttc

SEQ ID NO: 21594 - DNA, 1318 bp, Arabidopsis thaliana landsberg
caccatatggagttagagataaggaatgccaatatgaatatccattgatattgaagtggaaaagcactactacttcagagtttttcaaggttgtaaaccttgtcaatgatgtttctaaggtaagcttttgtctatttacagaatttttaaaaggtgttttagaatggttttgagatttgaagttctgctttctcaagatttgtaatgttattgtatcttcacagatttaggtgaatacaattattgaaaacccagaagacttcaagtctttagttcctgatttccacacacacgacatagaattccaacaagttttagaacttgttaagatgggctacagaatgaaggaaactgaatgcaatacaagatgtgttgatgtttgtgctgcccttgaagagtaggtcaaaacaaaatgaataacaaaatatctgataacgagaagcttgacaggattttgacaatccttgaagatcttaacaagatagtcgagctgattgagaggattttggacattagaatggaggaaaagaataatcacagatctgaggaagatgaagaaagaaaacaagaggtaagaaaaaagttttaaagattttatgtatttatatcaatttacagaagttaattcaaaaagtgtactctttttttttcgcagtatgaagaagatgaaggattagaaagaaaagcaaaggtaattgtaaatctttctttaaaagctatttgaaaggaaaggttttacaatgtattttaaaggttaaataagtagtaaacctttacaatgtactcttttttttcgcagtctgaagaagaaggaggactagaaagaaaagcagaggtaattgaaaatctttacaagctattttaaaggtttactaattatattagacttattatttttattttgttgcagaatgacaatgaaacatttgaagattcaatctgagagccaaacacacagtatgggagctatccgggtgatgatgaaaacacccaacgtgatgttggtgatgaagtagccgaagaatcatcaaaagtgccataatcttatttctctaaaagtcttacaaaaatgattagtatcatttttataactttacattctgttatcttttgaaggatcagtctcctactccacgatcctctataccaaatttcaatattttatctgaagaaagtctagatgttcaaaaggataagaagagagttagcagaggtagaaatgcggttaacattttaaaaaatttgtattatgtcaccaagtgtttatatattatgtttttttcaaatctttaaaaggtttatcgggtcttaccccttc

SEQ ID NO: 21595 - DNA, 603 bp, Arabidopsis thaliana landsberg
  unsure (1)..(603): unsure at all n locations
ttaaaaactattgtaaatcatggtttagtcttttaaaagcttttaaaaactctttttaaaaccaattttacaaggagttttagacataccgttgctgttattgctttccctggcgtctctagggttgtaaaccactttgtatctataatatttccggcgattgatagtggcctacaacaacaaaacagtcacaaataaatgttttatttaaaaaaaaaaactcactatcttacaacaaaactcacttgtttttccttgatttcttccattcagccaatttctcaagtcttgtggcatcaactttcgcaaatagatgcaaaattggatgcttcttcttctcagctgtgaaaggtgcttgtgtatgaatggaaggaactgtaccccgtttactctttctttgtgcagcagtatgatcatcatcattgnnnnnnnnnnnnnnnnnnnnnnnnnnnnnnnnnnnaataattttcctcttcttactttgtgcctatcaaaaagaanaaaacagatgtttaaaataccttataaacaaaattttcaaaatcataataaattagatactaacctcttaacttgttggaacatcacatcaacactttcaac

SEQ ID NO: 21596 - DNA, 401 bp, Arabidopsis thaliana landsberg
tataattcttcagacacgagttgaagaatgagggtgaatcgaagtcacaaagcggcaaaaacgtaccttcggcctgggcacgctgctctgaggctgcggcttgggcggactcagcccggcctacaacctcggcagcctggctccgagattggtcccgctcgccaatgatctagccaagctccaactgtcgctgctgcgcctccatccgtgctgacgctgcctttgcctgtgccgccgctacctccacctccagctcatcatagagcagccgaaggtccgccacctcggtgctccgttgggcgaggtgttcattagcctcggcaagcgcggccctcaggaaccgcagtgaaccccagacgtcggtctcacggcggatgaacagcgacttggtggtgctcaca

SEQ ID NO: 21597 - DNA, 576 bp, Arabidopsis thaliana landsberg
gacaaaataaccaataaacaccttcaacagttgtaccaagttttcatcttctaacacagttataccaaaaaaaaaaaccaaaacaccgattcatgtcatatgaaacaaacaattaaaagtgcttaaacattcatctttaggcacctctcactacaagaaatatccatattgttagcatgagagaagagctattaaatgtgatcagtagcgttttcataaacgctatgttatgcccctgttatggtagaccctccatatacaatagcgttttgtctgtatgctattatatgtcgttctattatagcactaatcaattgttttaatatactttcttgtagcacatatttagtgctgttttatattgtttcataacacatttattcgatgttttgttatattgtgtcgtaacacttttattttgctatttgatttatgtaatgtttctatttttatcctattttagagaatttattaaattaggtttatcaataaatttatattctataaatcatcaacatacataatataaatattgtattaaccaaaacaagtcttacataccatcataccaataca

SEQ ID NO: 21598 - DNA, 999 bp, Arabidopsis thaliana landsberg
  unsure (1)..(999): unsure at all n locations
gaaacaaagtgaaaatttaaaacaaacctgcattgagttgttctgatttgcaatgttattccttgaaaactcattgtaatcgatctttttaaccgccaccatttcaaaccgtgggacttgcacggaaaatgcaaatagtactatcagctggtagtctgcacaagtcaaactttagctcaatagcacattaaaaaggcgaatcaaaaatatcatgtgttgtcagaagaatcatttacgattgaccgaaagcttcaacatcaaggaattcaggattgacatgaacttgagatgcatcaaaagagttggataaacttttcacacctgcttattcgtaaaacataagttcctcttttggtgatagcgcttagaaggaaaaagatcaatcatattatatagaaactaaaccactcaccaaccaacatatgagggttaagctcaccactctagattttggaaaacttagccaaagacagaaagttggtatcagagatagactcacaacccatcacctcagttctagcctgaaaccccatcttgtaaagatgggttgtgggacgaaactggccatacgcataggtaagaccaaaagtctcaatgaatatccattcgccaacaataagcttgtgaacaaacttagaaaccaatttcgtcttcacagtagcatgcatttttttttcccttatgacaaagatagtaacaatatatgttagttgttatgcaatattgaaatgtaaatagctactaataataaatcttacatattcatcaaagatgaccatctcaatggtttcaccggtgttgcttgtgtactgcttccaggagtggaggatcttaacctggaccctccatgtgttcatgtaaggcctcacgtctttcaannnnnnnnnnnnnnnnnnnnnnnnnnnnaaaacagagatgtagaagtagtgaaatgtgtcgatagtttgctgtgtaggtgatgatgaaataaaatgatattacaaccttattcccataggc

SEQ ID NO: 21599 - DNA, 516 bp, Arabidopsis thaliana landsberg
gactacctccgagcaactattctgggaagcggacctctacatcaccaccgacgaacgagctcaggacctcatcggaggtgcaaaacctgcaccggcggcaccacgacgcgacacgaaccaacaacccgacaagcgttgggagaagaggcctcgcgaagaagtccacgctgccggaccacccgcttcttgcgcccgaggagcacctcgtggaggcgaacgtacattggacgacatccttgatgcccagtgcccgtaccataaggacatgcgccacaccctccggaactacagagacttcaagcactccgttgggaacgaccgacccttccaacctctgccacctcccccgccacgaggaggacccagagaacctcgacagcctcagcagcaggaggggggaggaggcggacgtttccacgcatcgacggagaagtcaacgtcatcttcggcggacacagggtacaagaaagtaagaggcaacagaagctcaacgacggtcagatactggtggcagcc

SEQ ID NO: 21600 - DNA, 552 bp, Arabidopsis thaliana landsberg
gtggacatcctgatctccaacgcgggggtgcagatcatcaacccgatcgaccagttcgccttcgccgactggaagaagatgctggcgatccacctggacggtggcttcctcacgaccaaggccgcgttgaagcacatgtacaaggatgaccgtggtggcatcgtgatctacatgggctcggtgcactcgcacgaggcgtcgaagctgaaggcgccgtacgtcactgccaagcacggcctgcttggcctggcccgcacgctggccaaggaaggcgcgccgcacaacgtgcgttcgcatgtgatctgcccgggcttcgtgcgcacgccattggtcgacaagcagattccggagcaggcgaaagagctgggcatcagcgaggacgaggtgatcgagaacgtgatgttgaaggacaccgtcgatggtgtgttcaccacggtcgaagacatcgcgcaaaccgcgctgtacctggccaccttcccgtccgcggcgctgaccggtcagtcgatcgtggtcagccacggctggttcatgcagtaatcgtcatgaccaccg

SEQ ID NO: 21601 - DNA, 986 bp, Arabidopsis thaliana landsberg
tgggtgcgaaaccctgtccttcctcgatgcctactcagggtatcaccaaatccggatgaaagagtccgaccagctcgcgacttctttcatcacgcccttcggcatgtactgctatgtcaccatgccgttcggtttgaggaatgcgggcgcgacgtaccagcggtgcatgaaccatgtgttcggcgaacacatcggtcgcacagtcgaggcctacgtcgatgacatcgtggtcaagacgaggaaggcttccgacctcctctccgaccttgaagtgacattccgatgtctcaaggcgaaaggagtcaagctcaatcctgagaagtgtgtctttggggtacccggggcatgctcctggggttcatcgtctccgaacgaggcatcgaagccaacccggagaagatcgcagccatcaccagcatggggcccatcaaggacttaaaaggcgtacagagggtcatgggatgcctcgcggccctgagcccgttcatctcacgcctcggcgaaagaggtctacctctgtaccgcctcttaaggaaggccgagtgtttcgcttggacccctgaggccgaggaagccctcgcaacctgaaggcgctccttacgaaggcgcctgtcttggtgcccccgacggatggagaagccctcttggtctacgtcgccgcgaccacgcaggtggttagcgccgcgattgtggtcgagaggcaagaggaagggcatgcattgcccgttcagaggccggtctacttcgtcagcgaagtgctggtccgaaacaaaaatcggctacccccagttccaaaagcttctgaatcctgtgatcctgccaagccggaatttgcgaaacaatttcgagtctaatccggaaacggtggggtaacctccccctgggaagttcatccattccgaaaccttcgggcaggttccaaggtggcggtgaaacatgggcgaaaaattcgttgccctcggaaggcacaagtccaggtgttgcag

SEQ ID NO: 21602 - DNA, 635 bp, Arabidopsis thaliana landsberg
tttttcggaccttcgacttaaggccttcgttcacgtcgtagtctcaattcattgttacaagaacaaattaatactgtgaggggctacagttgggggccttcgtcttccaaaggtcctcaaaaacgtgactaacatgctttccaagtatgatatattgccatagaaacctttggccttgagatgaaggtgtgcatggtatgaaaggcgcggtctgggagaaggatgaaccagttccgaagctacgaatgaggaagcttcggtttagcacaagggcagcgatggagaatggaacctacctaaaggggaatatattgcccagtcctcgacagattactccttagtcagtagtgtcaaggacatggatgtaattttaccagactgtgtcctgtgcctataaatagatgaacagtaacaccgtactattctcgctgactcgtactcacttgtacatcaaacctggatttttaccttatgccaagccgaaggtacaaatgtaattcaatatcatcaatatttgttcatggttatataatgagaatatgaatagtctaatgatttaatattattattcacgttctcttccatgtgtcatatgtcattgccattattgatacatgttgcgattatgaaggtat

SEQ ID NO: 21603 - DNA, 568 bp, Arabidopsis thaliana landsberg
atggagactgacccgatgcctttagtgttactcggtcacaagagcattcataccttgaagactgcatcttttatccattttttcttgtatcttacttgaagtgaccagaaatgccacagattttgtatatacaatgaatgtggaacggataagtatgaatctagtgattatctttgtatgtgtggtggaaataatacgtagccttacgagtgaagatgaaaaaaatctaagatagtggtcctaaccaaaattgacattttatagtcaaaatatttgagcaaaacttgctcattgtcatttccattaacttcactcacaaacgtcttacaagaatgttgagcttgccctcaaacaacgaggagacagtttgcagagtgtttctctctccggacgagaggatacatcacagattgtaccactcacttgaaatcctttcttttcccattcgcttaaactttgattgagcagtgtttcagatatgtcggatacatggactttggccccaaaaccagctagctcctctactatggcatgcctaaaacattccacaaacataaaactcttgaat

SEQ ID NO: 21604 - DNA, 545 bp, Arabidopsis thaliana landsberg
tgcaggtttatttaccttatgatgatatgcagaagtaagggttgatgaagattttgaagctatgggaaaggaaatggtcacgtggggtggaggactaccattggccgttaaagttttgggaggcttattagctacgaaacatacagttcccgagtggaaaagagtatatgacaatattggaccccatctcgcaggaagatctagcttagatgacaatctcaattcgatttatcgagtattgtctctgagctatgaagatttgccaatgtgtttaaagcattgcttcctttacctagcccattttcccgaatattacgaaatacatgtgaagagattgttcaattatttagcggcagaaggaataataacgtcatctgacgatggaacaaccatccaagataagggagaagactacctagaagagctagcgaggagacatatgattactatcgacaaaaactatatgtttttgagaaagaaacattgtcaaatgcatgacatgatgagagaaggtatgtttatcaaaagccaaagaggagagcttc

SEQ ID NO: 21605 - DNA, 660 bp, Arabidopsis thaliana landsberg
caaatgttgttgttgaaggcaccactgtcaatttggggctttgggacactgctggtatgaacactctttctgagtcttgaatcctatagtggtttataacattcttattggtctagttctttcatttggttgataaatgagatccattgaatagctttgtctcatatgaggttacatatgtatatcctttgtttgcagggcaagaagactataacagattaaggcctttaagttacaggggagcagatgttttcgtcttgtctttctcattagtcagccgagctagctacgagaatgtttttaaaaaggtctgattgaataaatgatccttttctctaattgttgaaaacgataagactcttatagtgtcagaatgagtcatttctaatgttatatgactgttcttattgagtcagtggatccctgaactccaacactttgctccaggagttccccttgtccttgttggtaccaaattaggtaagaataaccgatgagcatttaccaacagattcctcttaaccgtttagttacaattcatagctaatgattcttacaacactggtgtagatcttcgtgaagattagcattatttggctgatcatcctggactatcccctgtaactactgcacagggttagtcttaaagagcccttttac

SEQ ID NO: 21606 - DNA, 590 bp, Arabidopsis thaliana landsberg
atccgataaaagagcaatcattcaaaagaattttaaaacctttgtatttcattttaaaactcttgtaaatacttttaaacccttttatgagggctcacaagagttttaaaataattcaaaaagatttacaaatgttttaaatatttacaaatgtttttaagagttgaaaaataattgacaaaaataattgaaaaataattcaaaaagatttacaaatgctttcaaagactttataagtgttttaaatggatttacaaggattttaaaaccattttaaatccttttaaaattcttttaaaactcttgtaaatattttcaaaccttttacaattgttttatgatatttaaaggactttaaaatattgacaaaggtttttgcagacttaataaggatttgaagagtttttaaagtgatttaaaagtgtttttaacaactttacaaaaaaattaaatgagtttacaaagatgttcgtagattttttaatgaatttacaagaattgtttaaggcattgaaaaaaattaaaagggtaatttagtcattttgtatattaaaagggggtatatttaaaaattgatgatgcaaaggggt

SEQ ID NO: 21607 - DNA, 659 bp, Arabidopsis thaliana landsberg
acacgagtgggtatattatatatatgatcaagaagtggtgatgaataatttactcgggcaatgcactgaccaacctatggtctaatggtgatcaaagcgttggacacagttgttgcagatggagcaatgtgatgctcgaggtggacgatagagcaagcaagtatcgcagaacttgactttgatagtgtaaccattgacgaaaacgtctttggttctaggaatcttgagattaggagttttgttgttgacccattccataaattgtgtcaaggaactatctgaatcatcttcaagaatcattgatgttttgttccttgggatgattcctggatccctagctgatgtcaacattagaaacgtaaaatccaagagggtgaggataaatcctgaagctagaacggtatagttgaagaaaggatctcctcttttgatccacaccagcattcttatgcaaaatgtaagcgcaggagctccaatcaagaaggaggttaggtacagagatgatacatcaggaccaaagattagtctaccaccacagcaaaatttgtgatgaaacagaagataaacaaaatataatttcacattcttgtggaacaagaaagaaagcatcttatattggcaatcattgagaaatgtgtctaccgagaagaaagaaaatg

SEQ ID NO: 21608 - DNA, 408 bp, Arabidopsis thaliana landsberg
ggatccccgttcatctctaatgctttgtaaagatccatgttgtcacctgcaaaagcaacatgtgaatatcccaggtttctgacttggagcaccgccattctaactgcttctgcttcagtctcaagagaagagaccataggggagatagcagcagaagcctcgaagaaggaggggcagcgtccttgttatagagttcccaaccaatgccggcttgttgcgtaggtgaaagccaggagccatctacaaaacaacaataggcgtcagagctgtgaattgcctcttccatagtacatatttccttcgttggcagcttcacattatgcgattgactacatggcttattctgatttaatttgcatgcctcattccacacagataaatcaacaagcgcttgactaatgacatcag

SEQ ID NO: 21609 - DNA, 5209 bp, Arabidopsis thaliana landsberg
gatcacctctgatttgagatgtgaatgtatgtttgtgctcgcatagataacggtctggttgcggagtccgaagaactcacaggagaagaccctgagcagcagctggttggtggaggcaaatgtcccttgacctatctttgtcctatacattctataattcactttccgcatttacacggttatacctaaggattgactagcttttattatccatgtccttgcttacctatttgggttggattattctggtttagcttcatgctagtgcttaacactaatcaatgaacatgatgagatttatcaatgatacgttgtttccctcctttattatgatgttatacttgtggcatttaaggggactcatgctgtttctcgagtgcctctccgtaatgacctgttcattggagtgaccacccagaataacagtgcaaccatgagggtggaatgggacgcccttagctgaataattagaggaacctgggggtgtagttggatttgcctgagggccgttgtaggaaacaggtgacgcctaagaggggggtgaattaggacttctaaaacttttactaaactaggccacaattaaatccctagagcaaaacatatgcaaataatcaaaactagaatgtgcaaactcggttttgtctaagtgttgctatctctaccgcaaaggctaagtttcaatctacactaaataagcataaagacaagattgaaacttaaatgcttaatataaatgtggaatgtaaagagcaaggtagagatgcaaactctcgtggatgacgctggtatttttactgaggtatccggaaccacgcaaggtccctactaatcctcgttggtgcccctacacaaagggaagcccacgcgagggccaagcaccacggtcgagtaactccgtagagagccgcgggccttctccacgcgcaagtggtgctccgcttccggctcctctcggacgctcctcgccgtctccactatcgagcttccggctgaaaacgctgtgggcctcgttccctctggtacacggtggcggccgtgacacaaacgcggttgtcacggtctcgcaagactctcgccccactcggtacaattacaatggctcacgcaagagccgaggggttgtgaggtttatctaaactcactcaacaatctagggttcacctagagcaagcgctaaagcggtctaactaacctaagcacttcgcaaagcacctacgctaatcaccgagtgattctattaagcacttgggtgtttgagcacttggaaatatgcactatgtgtattggtatgttgcttgggctctcacgcttgagaatggccggttggggtggtatttatagcctccacacccccaactagtcgttggacagaaagcagcagctttctgtcgtcgggtgcaccggacagtccagtgcaccaccggacatctactgtgcagtgtccggtggtgcaccggactgtccggtcaccgacgacagaaagctgctgctttctgtccaacgactagtttggggtgtggaggctataaataccaccccaaccggccattctcaagtgtgagagcccaagcaacataccaagacacatagtcgcatatttccaagagctcaaacacccaagtgcttaatagaatcactcggtgattagcgtaggtgctttgcgaagtgcttaggttagttagaccgctttagcgcttgctctaggtgaaccctagttagttgagtgagtttagaaaaaccacacaaccccttggctcttgcgtgagccgttgtaattgtaccgagtggggcgagagtcttgcgagaccgtgacaaccgcgtttgtgtcacagccgcctccgtgtaccgaagggaacgaggcctgtggcattttcggctgaaatctcgaaagtggagacggtggggagtgtccgagaggagctggaagcggaccatcacttgcgcgtggagactcgcggctctctacagagttactcgaccgtggtgctttgccctcgtgtgggcttccctttgcataggggcaccaacaaggattagtcgggaccttgcttggtttgggatacctcggtaaaaataccggcgtcatccacgagagtttgtatctctaccttgctctttagcttctgcatttatattaagtatttaggtttcaatcttgtcgggaccataattagggtaccctcaaggctcctaattctcagctggtaacccccatcagcacaaagctgcaaaggcctgatgggtgcgactaagtcagggatcggtccattcgagggactcgatcacgcctcgtccgagctcagcctcggacaagggcagccgaccccggagatctccgtctcgcccgaggccccccctccagcgacgaacatacttccggctcgccgaggcccagtcttcgccaagaagcaaccctggccagatcgccacgccaaccgaccaaatcgcaggggcatttaatgcaaaggtggcctgacacctttatcctgacgcgcgcccttcagacgacagagacgaagtgaccgcagtcacttcgccgctccactgaccggtctgacaagaggacaacgccgcctgcgccgcaccgactgctgtgccactcgatagagtgaggctgacagcagccaggcccggcctcaggcgccataggaaactccgcttcgcccgaccctagggctcggactcgggctcagccccagaagacgacgaactccgcttcgcccgaccccagggctcggactctgccctggcctcagccaacggtctccgcctcgcccgacccaggggctcggactcgacctcggccacggaagacggactcgacctcggctttggaggagcttccacatcgcccaacctagggcgcagacctgccacgtcaacaggaggtgccatcatcaccctaccccaagctgactcgggccacggggaacaagaccggcgtcccatctggctcgctccgcccgatagacaatgatggcgccccgcatactctgtgacgacggcgactctcagccctcttacggaagcaagaggacgtcagcaaggactgaacagctccgacagctgtccctccgccaagcgctactccgacggccacgacaacacaccagctgggtgccaaaacttctccgactgccacgacggcatgtacttagggctctagctcctctctgctagacatgttagcacactgctacaccccccattgtacacctggaccctctccttacgcctataaaaggaaggtccagggctctcatacgagaaaggttggccgcgcgggacaacgggccgacgcataaggctctcccacgcggacgcttgtaaccccctactgcaagcgcacccgacctgggcgcaggacaacacgaaggccacgggtttccccttttcgcctgcctccttttccccccttcgtgctccgtctcgcgccgacccatctaggcagggacacgcggcgacaatttactcattggtccagggaccccccggggtcgaaacaccgacagttggcgcgccaggtaggggcctgctgcgtgttgatgaacaacttcccgtcaagctccagatgggtagtctcagcaacctttccagcctgggacggtgctccgttttgggagtcttgagttcatgtccctcgacggcagctacgacatgatactccttcccccgccgcgcgacacgacgatggcggccgacaacccgcccgccggcgtgggaatcaacgacgtcttccccacgtggtggaagaacaacattcgagctcaccccttccccttcccctcccctgccgacggaggaggaggcggggcaaccgaggccaagcaggaggcagcacctcgtcggctgtcgagcgagtcgacggcatcggcgccccatcgggggcacatcgggcatcgacctcgcgtctgagacgaagacgagcgccgtctccccgcaacacgccaactccaagcaaacggacgacgccagcacgctcgcaaaagacttgctggcatcaccctcgtacctgagacgacggtgcagtctgcccctgacgtgacttcgtcaccgcccgtcgaccaagaggtaccgaccgactcccatctcgtgccttttggattcagcctcgacccaccaagcgacttcgcttcggtggacgctctcatagaggtgagtccaaaccctctggggtattgtatgcggtcaccctgggaccggctgacgaccgtctcgacctacgggccctcgggttccgaggaagatgacgagcccgacttttgttgggatttctccggacttggtaaccccagtgccatgcgggacttcatgaccgcatgcgactactgcctttccgattgttccgacggtagccgcaacctcggcgatcgaggactgcggcccaagtcgtgaatgtttccacgtcaatctagggggtccctctgaaggcaaccatcttggcatgccggaaaacggcgacccccctagtcctgcgcctcgcgttgacatccttcgggagctagctgtggtcccaggtcctacggggggtcaggacgcacagctcgagcaaatccgcgagatgcaggccaggctcgacgagggagcaggaacacttgagcagttctggcagaacatcgggcaggaatgggcggaccaagctccggccggagaagcgcgtcatctaccccagggcatccagcaccgcattgccgacggcgtcaggcaaggccgccaccggtttccagtgggtcaggccagaacctggctgcagcggcaatacttctccgcacgacgccggaaccatcaaccaccgatggggcggcgtatccagggagagctcaagaatctcctggaggatgccgcggtccgacgggccgaaagctctacctcccgaaggcagggtacccctcggaacatcgcgccgcgacttcccgattcatgcgggaagcctcggtccacaccggcggcacgcgcaacacatgccctgcggcctcgggtcgcctcggcaacgagcaccatcaccgcaaccgtcgagcccacctcgacgagaaggtgcgccgaggctaccaccctaggcgtgggggacgctacgacagcggggaggatcggagcccctcgcccgaaccacccggtccgcagactttcagccgggctatacgacgggcgccgttcccgacccggttccgaaccccgactactatcacaaagtactcgggggagacga

SEQ ID NO: 21610 - DNA, 522 bp, Arabidopsis thaliana landsberg
tcaactttagaagaggatgaagcaatagtgtttgctactattctttggtctagttttttttgtttttgccttgggcttttgtaacaccctgaatttggggtataaaatttcttttctaatatccaccaaattcaagtgttatcctctcttttccttgatttttcttttcttttccctaaatagtggggaattattttgttttatatctgcatgtaagcctagtaaattggaaccatttaagtgctttgattgtcgcatcatgctggagcatactttcactttgtttgatgagtgattttgtggagcatgagtttaataaggaatttgatttgacatcgtgaagaaaataggaaagaactagaaataggaaaaagagataaacaaaaagagggacaaagaaaatgaataaataaaaaggaaatcggcctccccttcgcctccctgcggccagctcccctgcctcggcgccaggtgcccacctggccacccccacgcctcggcctgcttcccggcctagcgcgt

SEQ ID NO: 21611 - DNA, 863 bp, Arabidopsis thaliana landsberg
  unsure (1)..(863): unsure at all n locations
aacttctggcaccggagtttttcttccagccaccagttctcatccgcccacctataaaacaggttatttattaattactctatactattatatgaagaaaaatacaggtgcataatgttttcaatttacacaaaatcaattctaaccaactgaatatactannnnnnnnnnnnnnnnnnnnnnnaattgatttgacatcatttttaacttacattttgtcgttaagtcgttttttgttttaaacctatagaaacacaaaaaaccttatttttttcgatgactatgaaatatatcatgggttcatacatctattcctaccatttttgatttttctatctattggtagcttttgtaggacaattgcaggcccgatttttgggaggtgctgggtgtgctagtgcaccgggtcctacttctttattcagttttttctttatattttagggtccaaattttcaaataattgcaaaataggatctagtttttaaatatttagagttttaggtaaagaaatttggagcataacacaaggttcaataatttattgggccggccctggacaattgacataaagaaattgtgatttgttggtttttacgttagtcagcctttactatatagactcattgatataggatttaatgttataatttttgatcaatgaaaacaaaattctcttgtcatagcttgctcgccagtgcttctcccgactcgtgtagttcaacactcaatcttaacatcacaacaacggtatcatattcncctcgccaggtctttctttccaacgctttcaatacatcggtgtataatacattagttgatatgataatttggtgaatggacatgttcttgatgtgaatagg

SEQ ID NO: 21612 - DNA, 563 bp, Arabidopsis thaliana landsberg
agaaatcatatttatctttctcgcataaggcatcatagctgaactttaacacactctcaagttgtccgttaaggctattccttaaccacggtagttcatttttccactcctgcttgcacattccccggaaataggagcccataacccttagtcccaatgggagtttaccggcaagaactgtaacttcccaggcaagcttctcgaaaccatctttagggtatttttgcttgaaagcatacatacagaagatttcaagagcctctgaatttggtggaaaatccaccttataaatgtggttgatcccatgtgctttcagaagtttcagatcttgtgttgtaatgataatccgacttccatgaccaaaccaccgagtttcttttgccatggcttccagttgtactaactgatcaacaccatcaagaacaacaagaactttcttgtccttcaacctttcttgtgcaactcctaaatgagtaacctcgacatccttgtggttgattatttgagatatgaacttttgctgcaactgcaacttggcattgtatcatctgacaaactggatt

SEQ ID NO: 21613 - DNA, 968 bp, Arabidopsis thaliana landsberg
cagaggatcccctcacaataatcacaaagaaagagaacacaagagacatagtggtttatctcgtggttcagccaagtataacacttgcctacctccacgttatggcgtcccaatggacgagggttgcactcaacccctttcaagtgatccaatgatcaacttgaataccacggtattcttccttatagttttcttcccgtttgcgaggaatctccacaagttggagcctctcgcccttacaagattgatcacaaagaatgcacgaagtaaggttgggaagagcaacacacactagaattaaatccacatcacaaacatgcacacaagtgagaagatgagcacacaaaacacgtgcgaggagtttacaactcgaaaagtgctccaatctcaagaacgatgaactgattgcgtgaaagtgaggactagaagtcttggaatgcttagagtgtgcttgggtgactctccatgcgcctaggggtctcttttatagccccaaggcagctaggagccattggaggccaacaaggaaggctatccttgccttctgtcgggtggcgcactgaagcgtcccaatcctctgggactcaaatgtgatacaattactagtcccaggaggctagtaaacacatttatacaacatatgattatagatctgcttaaacgatacaaacctataaaggtggcgaacaactttaagagttggtccacaactcgggacatatcatcagagtggggctgaagtagcccgatatacacagcgaacaaatcagcggtccaacagccagaagcaaggttgggaacagtcgtaactcttacccgatctccgttttctgagaaataacaaataagcaagggtgagtacaaacgtacctcagcagccaccttcacccacggaatggggacatcagctatcatgcatggcatatgtggagctcaggatactttgtagcaacaacaatatcctatgc

SEQ ID NO: 21614 - DNA, 839 bp, Arabidopsis thaliana landsberg
tagcaaaatttggtttgaccaaatttggctggataaaactgaagttatgaattttacaagctctgtttgtatttaaaaggataatatttaaaaggttttctgaaaagccagtttacaccgaggaccctgggcttttcctaaaacaatcctttaacttaagcccctgtgcaactattcacatgagtctctgaccattcaaaaaccccctgacttcttttccttcttccccgaggtccctccccccttttaaacagtacccgtggaagtaaatagggcagcgcgacttaccggcggcgagggaggtccagcgaaggacggggttagctccaggaagtccttgcggtcacgtcgaggtacggctcgtcgtcggtgatggccggaatcggtcgggccacgtgcgtaggcggtcgggctcgtcggcagcgtgtgctttggcctgctcacggcggtagggttcaatccaagggcacagggagcttcacggggtgctaaagaatctacccgtgcaaggaatcgaagaaatactcaccgtggggctcggtctacgtacgcaggcggccgggtgaagtccggcgacgttgatccggtgtctccggcgaggtagagctcgattcctggctctggaagcttcaccgagacacatagaggctagctcgagggttggacggggcggggaatggctaggatggccggtctacggtggtcgggtctcgggcgccgctgcacgccgtgcgcagagcaatcgccggtgaacttgtgctccggcgaggttgagagcgagcgggggcgtacggtcgaggctcggtcggctgtatagacgctctagagtcctagagtcg

SEQ ID NO: 21615 - DNA, 597 bp, Arabidopsis thaliana landsberg
gtactgttcacgctgactagtattgtgactcgcacgttactctcaagctttttaccttctgtcaagccgaagtataaatgtaactcgatattgttcatattcactcatgataatataatagaaatgttttgataatattagatgattattcatgttactttccatgtttcatatgtcttcattgccattattatatactgagatgataaaggtatgtccttcacaaccttcgtctgaagatcattatatcctaagggagataatgcttcgaaggacgaaggactttaactattgatattttgtgttgccttgttcttaactcatagcatttgagaacaagtgaccaacattggcgcccacctccggtgtaactcattcgaccaccttcggcaagctgtgaccttcgtcatgccgccgaagaaagcttcagggctaggggctgcactgcagcatctggatgtcaaccaggacacattgcgtgaacccgaagccaaaaaaggaaggctacaagtccgacgcctcaggacgaagagttggaccaagagatcagggatctcgaagccattcgatcaacaggttcaaagaaagaaggagaag

SEQ ID NO: 21616 - DNA, 702 bp, Arabidopsis thaliana landsberg
atagctttgattttgtatctccatatcttctattttcttctcttccatcgcgtttattcactattaaatctcacttcatatatgttcagttgttcaatatgtgcaatatgtgcaaatcctttgtttcacattctaagacaaatgataaatacaatacccatggtgagacaacagatagaccatagctattgttttgatgagattttggtttatattaaaataaaatacaatttcaggacaatctagcataagcaatttgattttttgtttttgtaaaaccaagttcaactgacatctttcttaccttcaattacgccaaaagcaatcagataatggtgatgatctcgatccggagctgtagtaataattagcactccatcatatattgtcttaaggatgggtttcatccaaaattattactttccccatgactagaaagtcttcaatagaaacccctaatgtgaagaagtaccaaaactttcgtttatcatccactttcaacatataaaaccgtacaaggattcatcttctctaacatgaatatataagaaaatagaaatataagaaaatagaacatgttgcaccttattttatttatctctgcctgcagtcttatatgacacttgcacactaagtttccttttgaacaaatttagtaaaaatctttttggagaatggtgttgtccaaattttacccggggt

SEQ ID NO: 21617 - DNA, 1085 bp, Arabidopsis thaliana landsberg
ttggtgccgcgctgagcgacgcctcggggatgtcttctggctggcgcccctgaggctgcttgtccttccggaagatggcctcgaccgcctcctgaccagaggcgaacttggtggcgatgtccatcagctcgctcgccctggtgggagtcttgcgacccagcttgctcaccaggtcgcggcaagtggttccggcgaggaacgcgccgatgacatctgagtcggtgatgttgggcagctcggtgcgctgcttcgaaaatcgccggatgtagtcccgcaggagttctcccggctgctggcggcacgttcggagatcccatgagttcccagggcgcacgtatgtcgcctggaagttgtcggcgaaggctttgaccagatcgtcccagttggagatctgcgcaggaggcagatgctccagccaggctcgggcggcgtcggagaggaacagggggaggttgcggatgatgaggttgtcatcgtccgttccacccagctggtaggccagtcggtagtccgtgagccacagttccggcctcgtctccccgagtactttgtgatggtagtcggggttcggaaccgggtcgggaatggcgcccgtcgtatggcccggctgaaagctgcggaccgggtggttcgggcaaggggctccgatcctccccgctgtcgtagcgtcccccaaagcctggggtgttagcctcggcgcaccctttcatcgaggtgggctcaacggttgcggtggtggtgctcgttgtcgaggcaacccggggccgcacgccagtgttgcgcgtgccgccggtgtggaccgaggcttctcgcacgaatccggaagtcgcggcgcgatgctccgggggtaccctgccttcgggaggcagagctttcggcccgtcggaccgcgacatcttccaggaggttcttgagctccccctggatacgccgcccctcggtggtggaaggttcggcatcgtcggagtagtacgcagctgcaccaggttctaccgacccactggaaacgggggagcttggctggtatgtcgcgatcggtctaacgtctgggcagatacggctttcggcagactggctgccatctg

SEQ ID NO: 21618 - DNA, 4756 bp, Arabidopsis thaliana landsberg
  unsure (1)..(4756): unsure at all n locations
acaggctcattctcggtcctaatcaatggtagcccatatggtcagttcgagccaacttggggactgagacaaggagatcccctgtctccgtctctgtttatactatgtgtcgatgttctgagcacactgatgacccaggagacattagaggggaaaatacaagccatccgaataagtaatggaggaccagcagtgtcacaccttttgtttgctgatgactctctctttttcttaaaagcacatcacaagaatagtactaatcttctacagatttttgacgaatataaggaaacatcgggaccactcatcaactttgctaaatcatctattacttttgaaagtcgtgtgtttcaacacacgagggagggaatcatgaaaacgctcaagataccaaataattgtggaggagggaagtacttggggctaccagaacaatttggaggaagaaagaaagaaatgctccaatacattcatgatcaagttaggaaaaggataaaaggttggcaaagaagatgccggtttactcaatgaattggtttcaactaccaaaagaactatgttctgaaattgttagtttgatagcaagattttggtggggatcaactcagaaaaaaagaaaatatcttggatagcctggagaaagatggtgacatcaaagaagaatgggggacttggatttagagaccttcacctcttcaacaaagcattattggctaatcaggcttggaagatcatacaaagaccaaactgccatctctatcgaatgtcaaaagcaagatacttcagggacgacaattttttcacggctacaagaggaacaaaaccgtcatatggctggaattcattgagatttgggagggaactactagagactggcgtacagagaagtattggtgacggacaaaaaacagccttaaagagaaccttggttacctacaacaccaccgagagcacctaaactactatatttgatagacccgaatactaaggtggctgaactcctcacaggacctccacaacaatgggatgatcaataggtacatcaatacattgattcgtcggaccattgtcccattcacaaaattttcattccttatgatctcaaagatgactcatatatctggaattacatgaaagatggtaatttcaccgtcaaatcttgattggagggctcttaacctcagtcttgaagaagacacatcacaagctctgcttacagttaacacagatatcccccaaaaatatggcgtctccaaattgaaagattatgcggaattgtattaaagattaagagagttatgaagaacaagagagtttgtatgtgagagaatatgagaccaaatcatattgatagaattaaattgtatcctttgtgtgtttacaatgcttttaaagacacacaaagagaatatgaccgttttcaattaacgtaagactgaaagagacataagagaagaggttccttggtcttggtgatgagagtgactgatgagagtgactggtcattggttgaccttgttgctaaagacactcgtgagtcctcttcaatggctacaagagatatttgtgtgccttcacctcttctagaagctcttcataggcttctcatatgttcggcccactctcttgtagtacatatccaatactaggcctttcttatttgagtcttgatcaatactgcccctcaagcgcatgacttatgcaagagcctaagcttggaacacatgattcatcacctcattaagacaacttagtaaagaaaaccacatgggcgaaaactttactaagggaaaaagagtgtgatgtccatggattagagaacatgagatcaagnacgtgtaagatcaacaagtccaagtttgttgtagatgtgttcacaactttgagacttgccccctttgtaaagatgtccgccaagttgtctttggtgtccgtataacacggtagaatcattccttcttctatcttctcccgtaccttgtggcaatccacctcaatatgtttggttctttcatggaaaaccgagttggtagcaatgtgtattgccgcttgattatcacaatgcatagtgatcgggcttgatgattcaattccaaagtccttgagaagtgccttgagccacgtgagttcattcgttagtttcctcatcgcccggtactccgattccgcgcttgagcaagaaacgatcttttgcttctttgacttccaagtgactaagtttcctccaatgaatgtgcaatagcccattgttgacttcctatcggtggtgtctccaccataatccgcatcacaatacccgactatctcggtactatcattcttccccatccatatcccttgacccggactccctttaatgtatcgtagaatcctttccaacatgttccaatgatatttggtgggagaatgcatgtgttgaatcacttgatttactgcaaaacaaagatcgggtcgtgtaatggtcaaataaatgagcttaccaactagtattcggtattgagcaaaatcttcatatggttcatctaacgaatcaagtggtgcattcttcttcttcttccccccccccccccttcgcttgaccgtatagccatcaacaagaggtgtcttagccggtttagaaccaagttttcctgtctcattcaaaagatcaagagtgtattttctttgtgaaagaaataagccctcgggagagcgacatacttcaatccctaagaaatactttagttcaccaaggtcttttatatcaaatgtagatttaagaaagagtttggtgtcatggataccttctttgttgtctccggagatgataatatcatcaacatagatgagagcaacaataataccttgatcggattgaagtgtgaagagagtgtgatcggcttcggatttcttgaacccttttccctttagtgtggtacttaaattatggtaccaagctctaggagattgtttcaagccataaattgccttccgaagtcgcaaaactttacccggagcaatggaatcttctagtcccggtggtggagtcatatacacttcttcttctagctctccttgaagaaaggcgttcttgacgtccatttgccataagtcccacgagagattagtagcaagagagagaacaactctcaccgtgtgaagcttggtgacaggagcaaaggtttcagtatagtcacgaccataagtttgagtgaacccgcgtgctaccaagcgagctttatgtctctctatctcaccattactcaagtacttgatcgtgaagacccatttggagctcacggctctcttccccggaggcaagtcttcttcatcccaagtatgattatgaatcatagctccggtttcatccgccaccgcatttatccattcttcactctccttagcttcttcataggtttgcggaacaaagtttgcttctatatttcctataaaagcttggtgatcttgtggtaagagggcaagagaacacactgcttgtatagggtgagctaccgccttattgttgtaatacaagcgagaagatttttctcttaatccgagtacttcgtcttaaagttggagaagcttgtggagtaggatccggctgaatagtggtggtatggtgttcggttatctcttgaacacctccatcttcattttgagtatccatatcatcatgtatttggattccattaatctctccatcttgttgtaggttggaggcctcctcttgttcattttcttgatcgatagtaatcggttcttctatcaagtctcttgtcttggtttctctttcacttgatggagtaactccaagatggtcaagaagaaactataaacttgtagcacgatccgttgagggtgtagagagatctgccaagctattccaatctttcttctggtaataacctttttcttcaaagaacttcacatcccgagacacatacatacattgattaatgggatcgtagcacttgtaacccttttgagttgtagagtatccaatgaacatgcatctagtgctctttgcatccaacttgtttctttgatcaccggatactaaaacaaaacaaacacacccgaaaacccgtaagtgatcaagagaagggggcgttttgtttattacctcaaatggagaaacatcttgtagaactttggtgggtgttctattgataagataacaagccgtcatcatcgcatctccccaaaacttcttggtgacattcgtatgaaacatcattgacctttctacctccatgaggtgtcggttcttcctctccgccactccattttgttgaggtgtgtaaggacaactcgtttgatgaatgataccgtgttttgcaaggtactctttgaatttgtgacttgtatactctccaccattgtcggatctaagtaccttaattttagcattgaagtaattagtgacatagttttggaaatttataaaggcatccatcacacaatctttagatggtaacaatgtgatccatgtatatttcgatttctcatcaataaaagtcacaaagtacttcttattatccctagacatgcaaggagaagtccaaacatccgagtgaaccaagtcaaaacaattctcataaatagtcaaagactttggaaagatagatttgcaatgtttaccaagaatacaagactcacaagtagagttatcaaaagaaacatttggcaacattcattcaaatgcacgagcatgagggtggccgaatctagcatgccacacaccactaagaatactagctaaacatgagttgac

SEQ ID NO: 21619 - DNA, 3241 bp, Arabidopsis thaliana landsberg
gacataccagaacagacactcatctacccaatggtatataatatgatagctcagaagatgatctcagtcccatagatgtcctaactctaccctttttctcattctttctctttttggttcaagttctgagggcttcttctttgaaacgatttaagagtctagctggtttggttttagactttgattaacttaaggcttttcttctaatcttagcatagagggcgttttacccttttctttgaatcacaatgcctaacttctttgcattccaaaccctttactagactgacactttttgtatcccccttgagaactctaaactcttactctcttttttttctttttttttcactctcattctctttcccattcattccatgcacaatcccaatcccaaatacaagtctccacctagtcctagctaacccaaaaagcgtggggtaggtctacatgaaagactgcacttgtcggctcatacctatcatgttataccaagctcaatcgaaaaagacctcacaatcacacacaaatgacctttggcttgaaataaggttaggctcagggtatgggaaactgctttattagtgagagtcagctacttggactaaaaaagggtggtgaagtgaataagataatccaattatgtatatggtacccatgagttcacaaacaatgcatagacatgataattgcaaattcagttcatgttttaatagatagggaatggcatcagataagcgagttttgaatcaaagtagtatagtcaagttgtaaattcaaagcagggtgcactcttacgtcagagaaacaatcggttatgcaatagagaactaacaacctgggcattaaacttacttcattgaatcaaaacatgcttaacggtttaacatcatcattattcctatgcaaatgagcaatcctaaatgcaagcacacaatatacaatcctaaaatgaaatgcaatctacatgacactctggttttgataaaattattttctgaaaatatttcaaatttttatggtttttttctatgcttagatgatgcaaaatttgaaataagaaaagagaacacaatgtcaaacatgtcttgaaccctcccccaaacttaaattacacagtcccttgtgtaataaaaatctgagaaagaattcaagaccaaaacacaaaacacacaaagaaaaataaaaagctatggtatatacaatggtggtggtggtggtggtgttacatcagtaatcaggtgaaagtagcggagaggtaatcgtccatactctcttgagtataagcagagactgatgttgaagcgggtggggttttgctggtccggtctgttcaataattggtctagcgtgtggatgctctcctctgccttctccttggactctcaggtcggagatcacttctcgaggctcaaatgatgaagctcggggttggtcaatcctgtcagcccttcttgcagttgaactcgtggatccgcttcttcttacttcgggaatgggagacgggggccttggcttgctctggaagtctttgatttgagcagccatgtccttcagtgacttctatatggtcttcatcttcttcttaaaacccttcatcgttttgctgtgaagattgatataaccctatttttactgcttttagctatgatttaggataggttttagagtccttttgttatttctagagtcttttctagtcattttcaggtctttacatgtttgagatgcatttggagattatgaagtattctggagattaaaagacaacttaagctgctgaaaaaatccggagacgaaaatgcacgtaggtaacgaacgacaccacccctggtgtcgagcgacaccaatacctgacggcaattttgagacgcaacttattgatgttttgaagatttccaaattcggctcagaactttctcctatgtttaattaaggcccattggaactctatgggattctctttgatatcctatctctatcttcctcctttaatcaaattaggtttgtctttgtttctaggaaattgaatagcaatgcggatgcattagcaaagcttgcaattcacaactctgtaccaatcccggtttagttcggtttaatgaaatttctcctttgatcaaaaaaaaaaaaaaagtcattgtttagacctaagcttggagaggctattctcctgatctcttttgtactttgggagcaaaactctgtggagactccctttggagaaattcttctttactctttctcttgctattattgatttcttattcagactatgatttgtgtttctttgattatgtctgagtaatccgcttgttaggtttaggatttctcattagggattcatatggtttaatagatcgccccttgctaggttatctgtagaattcttcatctttgattattcttaatgttagacctagagtaattaactagatcttgaatccagacaatagatatgcccatcataagtatctgtagttggatatattatttgatgagtctggtttataggtgtgtaataagaatcagcctatctactaaggtgaacgattgaactcgtttagaatgcatgtttaggttaaagatctctcggcttctgcggttatttttagctataggcatagggagtttcgcggaacaccacctgttattccataattagagtttgagtttaagaatggttcaataacaacctagctttcattagatctactaaccaatagtttcttgagaataccctgttttatagctctttatttcatcgtttacaaccaatcaatttgctgtcttttacttagtttactttttattttcaattattctccactagcttaatcttgacatttgattcattgtgcgaacaaaaacactttgaggaaatttgacccttaaatactgcaaccgatctcttatttgagagagtaggtttaaggcaatttgaaccatatcaccatgagtctcctctggtatgtgaaagcgacctgaaaatcacatccatgagctttcccaaaatgtaacctcgtgaaccaaattatgcaaacagtgcaagctccatctgccaagttcaatcccgaagtcggctagcgcagagcaagataaaacattccaaattcgcaacgatcaccaatggtcttactagctcctctaggacacgaaccgaaactcgacaaaaagaaaataacacctgcgtgacttactcctactcaaagcaacatcgatagcaagacacggtcaaaac

SEQ ID NO: 21620 - DNA, 577 bp, Arabidopsis thaliana landsberg
agtaaaaagcatttttcttctagagaatatattttttgagtctaaattgggttttatagagtcgaaatcgaataagttcggttaaattttgggtaagtcaaaccggatgtataatttttggttaattggtcggttcaattggaggtgtagttttaagaacaaatctgaaagtacatgtagttttatcgagattaaaattgtttatgatggtttttcaagtggctaaaaatttaggatggaaagttgagattccaactagtatagggctgaaaattcaggcaaccctaaatgtataaattatcttacttttaaagcagataacaaatcgccgtgaacgtagtttattttttcgtagtagcggtatgtaattagtctaatgtggatttgttctatttttttctaaaagaactatttctggttaattgaacctcaaccgaaccaaacaagaaaaccaaaatgggacgtttcgaccttagaaccaaaatcaaacactgaaccaaaatcaaagatccaaaacaatttgaaaccttttagctcactttcttattagcatcaccaaagaatttgccttttaatt

SEQ ID NO: 21621 - DNA, 3010 bp, Arabidopsis thaliana landsberg
  unsure (1)..(3010): unsure at all n locations
attatcttaaacactaaacaaaacaaacaatattagcaaaataaatataattaaaatttaaattatttaattataatctaaattttaacttaatggactgtatattattgtttctatatttttaaatagtaaaaatcaaacaaagtaattatatagtaaataatatatagagataagaattgtacatttagaaaatacaaaatattaaatcatatatattttaatctactaaaaaaattaaatttttatttttttagataaatatagttccgtagtgtaccgcgggttaaaaactagtatgctcttatttatgctactaattacttcacttatcatctaatatttttttctatataaacactcagccaacaatcgtttctcatcaccgcaccattacttttctaaagcaaaagctaattcaatagagatggcagcaaccttcgcatacctcaaagacgtccgtccctacaccacaacatggatagttcaggttaaagctctttattcctggaaacaatacacacagaaaacgggtgaaactctcgaactgattttctctgatgaacaggtattaaaatcaaactttcatttacactttctaacgtctcattcatatcagacagcttatcctatttattttacatttcagaacaaaaaaatccatgccaccattcggacagacttggtgtcaaagcatgttaataagctaactgttgggcagtgggtttttgttgagatttttactctcaactatgctggcggtcaattcaggccaacgaatcatctttacaagatgacatttactaacggaactactgtgatgggatctgatcctgtatctgattctatgtatctatcactggcaaaatttcataaaatccaaaatggagagtttaatccatacatattagttggtaaacatttattaaaaaagctaatattaataaatattcactgtcgatattccatttgtattaaattaacacctttttcttttatagatgtcattggtcagattgtttctattggagagctgcagaacttagaagcagccaacaaaccaacaaccaaaattgagtttgaacttcgtgatgaaacgtaagtttctggacgtttgacttttctactaatctcacaaatcaattttaattatatatctcactaatcaatttttttgttttacagtgatgagaggattggctgtactttgtggggtacatttgctgaacagatatttagggcatgtcaagactctaatcgtggaatggtgatttgcattctcagatttgtgaaaatcaaatcttataaaggtatatctaattcattctcggcttcctctcttatatctaaatgaattgttattaagatacttctatattatactaggtgtaaggactctatcaaattcctttgatgttactcaagtgcatgtcaatccgccttcctctgaagcggttttcttccaacaagcgtaagtgacgtttgattttaagtttttcagcaactttacaaatggaatcctataagaaaatgtgtttgtgcttactagaattgtattttacagcctgccctctgatggcctaagcctcatctcccgcgaaaggcagccaaggtgggaaatggttgtaaacaaagatgttgattggcttgattatctgaggaattcaatttctgacttgaagtgttcaatcgaggttgtattcatatcacctctagcaaataaactattctatttacgatatagatcacctctttaatatctgtcaaaaacgttttctgcttttgtagattggaaaggctagggttttgtgtactatttatgccattgacacggattgggcatggtattacattagttgtaagacttgcaacaaaaaagtgaaccatatcgatgctggagtccatggtgtgaataacaaggggaaaaaccaaggttttggtgtgccacttgcaaaactgtggtcactaatgttgtcccaaggtaataacaatcaacctatgggtttagagaaactatttcattactcattttggttaaactatttcattactcattttgagtcaatntgtgttacaagtttatgctttacgctaatgttatggacaatcttggagaggcaaggtttctcttatttgattcagtttgctctgaactcattggcgagtcagtcgcatctattctcaatggatcactcgatgaggtaggttctctatgtttattaacacaaacagaagcggtgtaaactgaatagatcctacactgattgtaatatacatttttccttcttaggttgtggaccctgagaatttgctacggccagttaaaaacttaattggaacgacctttctcttcttggtgaaggttgaaacgaacatatatcagatggaaaggaagactacaaagtttggaaagttctttgcaaggttgaaaaagaacacataccatattttgctgatatggtgaatcttgcctctattgtgtcagctgatcaggttagctaaatcaaacattatctaaaatttagttgcccgtgtattgacaattggaaactgatatgcgaaacgattctttcccaaaggcacaactcatgttagagaatagccacgacacatcagactccggtactccttcttccatggtattgctgatgaatcctccacctctaagaagatatatgttgaacccattgacttggaaaagtcaaacctagaattcagactcacttctcaacacgcacaactaggagatcctagcggaaaggatagggatgagaaaggaaaaggcgtggagactggagtaccaagtttgaggagcagcgttcagtatgaaaagaaggacgtggctgtgaaggtcaaagttgagaaggagtgatcactctctaactttcacaaataaattcaaaaggtttcactttgattttcattcccaatataggatcatcatgttggactgtttttgtttggtttttgttttactagattttgatttgttataataagttctctatcg

SEQ ID NO: 21622 - DNA, 711 bp, Arabidopsis thaliana landsberg
acatgtatatacccaacattattgttgggcttatactctcttatatttctaagctctcaaattattaattactgtgtatcacaattgatttattggagagaaaagttgtacatttttaatatctttttcttaatcttttgtatattaatcttcagtcaataataataactttattgtatatttatgctatctggtttattttaaaagtcttagttaagagttataacaggggcataatgctagttattattcaaagaccgagtttagtgtgatttccggtttttcttgtaaaccggtttgttattactcctccaattattgtctaccatatttttaattcactccctaaaatttcttgtattctatttttaaccctatgtttctatttgtgcacaataacaccaaaagttttctaccttcctgtgagatagttgtcatagtcatagtcaaaattcaagcttgtatatttgcatttctgttaataaatgataaactaaaataaaatgactttgaaaaattgtagtattttattgatttgaaaatgaactagtacaacgtataagtgctaaattggagataacttgagtccccagtaataaactaaagaattttgtcaaaaaatatagaaaaaaacttaatttcgtaatttttcatgcccgtttcgttttctctatttatacaacatgttataatgtcttttcgcaaaagata

SEQ ID NO: 21623 - DNA, 617 bp, Arabidopsis thaliana landsberg
taaatcaacactattgtaatatatgtcaaagaatttaaaattatttaaggtaactcaaatagttttttcttttttacaatatcagttttttgtatcttactttcttttaaagatatatcattgatgttttttttatccttattttgaaaatcgtaaattgcttattaacgtttttaatagaaaagaaaatttataattgattaataaacttgatttcatagtctttatggttttagatgagcaaacttttatgagtataacttttagaaaaatgtaaacaaaaccttatcactctaatatacttaactataaaactatttttctctacttctttcgcaaactaaaagatgaaccatatctctatatttacttttgtactcttcttcatgtcttttccattttcatataatttgttagttctactttttttagaatctattggaaaccttttcattgagatatcactcttttgcagattatgttcatgttatacataaaatcacataacggtcttatcctattacacttttgcagatttcttgaaataattttttttttctttttggtttctgatgtgatcattttacacgttattcttttcccatgaaatattacct

SEQ ID NO: 21624 - DNA, 2770 bp, Arabidopsis thaliana landsberg
  unsure (1)..(2770): unsure at all n locations
taaacatacaatatatttgcatttttaaagatatttctatattttagtagttgttaatttactaaattacccatgcatatatttatttacctagttttaaactaccctcacaatgttgtagttcacaaaatgcttctcaattaatagtatagatacaagctctaaatctttattacctcttaaaaaactaaaccacaaaaaaaactgaattttaattttaagggaaatttaaaaatttaaccaacaaaaaaattatatttgcaaaagtaacacttcaaacaatacacaccgatgtgtaatgaaaattctacaatattcccaaagttaactcgtgcgtgtaacacacgctctgtttcttcttcattcttagagaaccatcgataacttctatgtttgcctctgttcaaattcaaattctgttttttatttactgaagttaaaaaaaaccatcaatgtgcatgatgctcgcactgtagaccaaaatagaatggtaatatattaattgtattaaatgccgtgtatattggtgttaaagttgattggttgtgccttaactattcaattaaccattctattgcaagaccgtgtcacatcactgttaaatgaagagctccttgcaaaagagatcgacttatctttctctgatgaggaggaggatgattaagttttacagatgatgtcgttaataatggaggagcacccattcgagcataattgttggagtggtggcgtggatgctgctgatgttgaacaacaatctgaagatgagtgcatggcagatgaagctgttaatgtatctaagtgtgatggtgaggatgagattgatgctgagaccactggtgttgctgcggaagataaagaagagggtgttgcttgtgacggtgaagacaacttggatgatcctgtggataaggatgtaccgggtacaccgacagataatattatggagtcggctgatggagaagaagcagatcatggagtccnnnnnnnnnnnnnnnnnnnnnnnacttatagggagtctgcttgatatttaattagggaggcacttataaaagaggcggctgctgaagttgagaaacgtattctgaagattcaccaagaagacagagatgaattgaaggcctaatttgatgctgaactcgttaggcataaaaaagtattggtgtcaatgcttggtgattgttttatggaggctgtaaatgggataaatagacagccgtcacagaaaggagaatgtagcaaatgtttatcggatagctgctctacaaaggttaagtaacctttatttgcagtatatgtttacttaaacatttgcaactatatgtgactttcgattttactatacagcttatacttatcttaacattttgtttgatgcatcaggaacaaagaagttctgagcagcaaggtaataagcatggcggttaagtgcctgttgaccctgaaattgctctaaatggaggaagtgacagtgtactaggtgcttctggcatagctggtgtatttggtgtttcggaagggagcaagacggctcctattaatgaggtgagcaaactgtaaacattataactcatttggttgtgatgttgataatagacatataattggattatgaattagggaggatgtgacgattgtagaacatatggaaggaggaaaaaaacctctactgaaatggattcacactctactaggccttcaaaacgagttaaagagagtgagcaggtggcaagcaagaaggtagtactatttttacctgcatgtttcagactgtagctgtagtttatgttccattaactacacttattttcactattggatattgacaggttggaaacatagacgaaaagaatgcacacaaccctgtaagacttgacttatgtggtgaaaataagtggtatgttctgtttataaacgcttaactatgtacatgtgacatatgtttgtaggaggtagctgcaacagtccaattggatgatgaaataggcgatctggggccaaatttttcattgggcctaacgcaagaaattatgaatgaaagtagcaggttgcctccaagagggaagaagaagacatccccaaagaaagttattgttttgcggtctagcaaccggataggggacattccaaatgtgagaaacagaggtgagactcggactagtatcccggtacagccgcgtcaaccatctgtcagaggatcgggtaaaggacaggttagtgggcctgctaaaggggggaagaacctacacagaaaccgacatctcttatttgcccgttttaacagttctgagttccaaggggagagagggttaaatgttttctcaaacaaatggaacggggagtgtaagtctttacagcttctatatgtgcagtaaaatatgtgtattggtatcagtcctaatggaatctgtatatgtttccatgtaggtcttatgttctggctgatggcactgtaatggagaatactgaatttctaaccattttcgaggcacagacactgctagatgaatcagtaagttctacatgaaatctgtctaaccttgtcgataaaaatattggctcacttcttgttgtttagtcatattttgtatacttttctatgagctaacagtttttttccaacactacagggaccagatcttttagtgaggttctttcagatgtgtctggataaaaataagccacttcattttcatttcctaccttcaagtttcatgtcagagctacgacgccagtacaacacatttngtggagctgtagattaaattcc

SEQ ID NO: 21625 - DNA, 3806 bp, Arabidopsis thaliana landsberg
aagtagttcttgactcattctattacatgattttgtattgacctgttttttaaaattttgaatcttttcagtgtttgtaatgacatgttctctaaatctttatattatttttggaacttgtcaaacacattcttccataaacaaacacatgaaactaaatatactcattcaatatttttgttttgcaagtgctgctgtgtaaataataagaatttgaagctgatatatggctcttattacacgacaggttagtaccatcttatatattactgtggcttttgtcttgaacattattgtggattattatggtgttgaacatttctaagggttctgtaagccaatatatagcatgaacggcccattggaaataaattacgagtaggtatgtggttatgatggatttgttgttttgttgttacagtttcaattacgagtgattaattttcaacccgttgttgatagtttggcaactcattgcaatgagttttggtgattaatgatcacataaatttttgaaatttggtcgaagaatcagcagcaatgaaataaacatgaatttacgatcgaaacaagatgttatcaccaaaatatgttggttttaccacaaacaaacatggctgatatatctttggtttagaaaagtaagattcacatatcaatgcattacaatttacaagaaaacatgctaattcgtaattataatctaatgagtttcattaatgctatatatgaaatgggaatcgtgatgtgacttacaaggtgtatatacttacaaaatttctagacacgatcttaagtaaatacaattgtaaacaacaagtataattgtatatcccaatacgcccccttaaggacggaccacaatttactagtctaatattgataaaaagagattcaaaccaatcatgggaaaacgattttgtggcatatgtgagttgatatatacgtagacgagacattgaaactaactatgcacaatgtttttaaaaagtttgaagagttttttttttttggttaggatacatttatagtgtacaataaagtttctatctttgagtgacgaggtgagaaactctttgattacattttggccttaaaaatagtcttatcattcctttgcatgcatattcaaccaagatcggaagttggatctgtaaacttatacagttcgatccatccgcactgtagattattatagattattatttgaaacaaacacaattacaacgatctcaccaacgagaataaaaacaagaatacaagattacctgctacaattacaagtttttggtcgagtttttctaatagattgatgacattaataagtgtgttagatatatttagattgcttcttttttcaatattatctgttgagcagacagacgaaacaacacgagcattaaatagatgggacattccatagcccacaagcaatttcacgaaattaaatgagaaatggatgggtcaagattggattactcgagaaactgaggaaaaagaagaatacgtaaggagttgaaacggaacgtggactatgtcagcccgaagaacacgtttaatgactatggccccatgcaggaccattcccccctttctttttaggtgttagatccatatttgttttgaacactatcaaattgttttggctaaagaaaaacactatcaaaatatgttacattattctcttccgttttgcctaaactcgaacccataactttcaacctcctcttttaagtttttactttcacttattgttagttaattttgaattaaacaaatcataatttcacatagtattaaacctatatatgtattacttaaaaaggtaaaatttgatacgagatgaataaacaaaattaatcaaccatttcaaatgtacatgttaaaatatctcatattagatatagatatagagatgattttatattggtatataaatcgttttcacttattggcaattagtattgagttgaaaatctataatttttctacatgcattgattcaactattatctttcacatcatgcattaaattagcttgggattccatcgtacattagtgtatacatatgccatcttcttcatcattagataatttttcttataaaataaatgcaattataacaatttgattggatatgtcttgtcatttagttgcggaaaaatcttgacgtctcttcttgtctgaagtcttaagtatataactggaaagtccgtattggagttcaacaaaagaagaaaaagaagacttttagttagatcctacgttactgaactcattatatatatatctggtgagacattctcctacatatgcagtttcaactttcaaagccaacaaataataaacagaggagaaatatggaaacacaaggcaaagtaatcacttgcaaaggtaattggttgtgtatataattaatctttatataaatatgatgtgatgagtgagtgagcgtgaatgatgaatattgaacagctgctgtggcatggggagctggagaacctctagtaatggaagatgtaaaagtggatcctcctcaaagattggaagtgagacttcgaatcctcttcacttccatctgtcacactgatctcagcgcatggaaaggcgaggtactcactcttcatgttcttcttcttcttcttcttctttcaattatatctcttcttcctatctcatctctatcttttggtcagaacgaggctcagcgagcataccctcgaatccttggccatgaggcagcagggtaagtggtataattaaatctgctatggatctcatttttcatccctcaatataattgaatgatgaattacaggatagtggagagcgtaggggaaggtgtggaagagatgatggcaggagatcatgtgctccctattttcacaggagagtgtggagagtgcagagtgtgcaagcgagacggagccaatctgtgcgagagattccgagtggatccgatgaagaaggtgatggtaaccgatggaaagacaagattcttcaccagcaaagacaacaaaccaatctaccattttctcaacacatcgaccttctccgagtacacggtcatagactcggcttgcgtgctcaaggtggatcctctgtttcctctggagaagataagcctcctcagctgcggtgtctccactggtaattaaccatctctgtataatgtatatgacatgcatgatgtgttttcttatttagtgaaagagataagtgtttatggaatgaaggagtcggtgcggcctggaatgtagctgatattcaacctgcctccaccgtcgctatttttggactgggtgctgttggacttgccgtaagtccaggttcctctttgtttgtatggaattggttacacatagacttaataatgccttgttaataattggagaaacaggtggctgaaggtgcaagagccaggggagcctctaaaatcattgggatcgacatcaaccctgacaagttccaactaggtatgcagatgaacatgcatgtcagtcttaaagtaggttaaagagcattgttcctaaatgaagtgtgttttgctggatgaacaggcagagaagcaggcatcagtgaattcataaatccaaaggagagtgacaaggcagttcatgagagagtaatggagataatagagggaggagtggagtacagcttcgagtgtgcaggaagcatagaagcacttagagaagcctttctgtctacaaactcgggagtgggagtgactgtcatgctgggtgttcacgcaagcccacagcttctccctatccatcccatggagctcttccaaggcagatcc

SEQ ID NO: 21626 - DNA, 837 bp, Arabidopsis thaliana landsberg
gatctatcacaattggatgctgctttgtggtcatatttcttatggggacaaaagagccaaggtatgttgtatatgctcaattctctgcattcttgattttaacactagagttgtatagttatatggattttgatgtttaaaggctgaggatagatttgaaagaaactagccgagcgagaataccgtgggtctattggttccggaaaattctgtactatcaagttgccatggtttacctcctcactcgattagtattgaatgtttctcaggtcggtttctgctttctttgttgcttctgtctatgttcatattggggtaaattctcacaccaagtgtttcattccatccttctcaggcatatcttgcgttctttgttatcgatgatttgcaaatggatcaatccgctaaagctttggtaatattttcaataagctttttctttctcttacatatgatcattttagctttatataatatactcttgactaaatgttatatatttcaggttcctgcaattatctatatctgcagctttgttgtatcggttctgcttcaggttcgaaattctcataatatgttgtcagcttctctttttcctttgtttttgctaagtaattacaactattctttgtgtgtaatcatgttaggagattccatggaacgggagacgcttgaaggcgtattatacagctggtggtataatttggatattctgtggtgcagcaattcttctattgcctagagacataagttctttcatgtatgcgatatctgtctttatcggcatcgcgaatgcattaatgatggtataatgttctctaccgctcagtttgatat

SEQ ID NO: 21627 - DNA, 530 bp, Arabidopsis thaliana landsberg
tcttaacagtttaagacaagttagtggaggaagtaaaaggaaaataagaccatattagaaaaagaacaaaaacatatagaaaaaattctaaattattattttttgggttcaaaacctgcttaatatcttccacaatatattgtaaatttttggttttagttttcgtataaattttaccggtgtatagcaccgggtataaattgggtgagttacaaagttttatggctgagttacgaagacatacattcctgagattacaaaaagtgattttttgagaaaacgccaacaataattagattacatattcacatgcacacaccaataattaatattcaaaataattcaagtaaaacaaaattttcaaaataattaaaatttttatgttttgctgtagaataataacacgacacggctagtcacttagtggtttacccgagtgatgacagcgacatggcttagttatgactgagcccagaaaccttcaaatcctccaccgagaacttcgtatctagatttactttagagtcata

SEQ ID NO: 21628 - DNA, 672 bp, Arabidopsis thaliana landsberg
ggactaaaattcatcatgtttttatttgtgtaaatgatgtaactacaagaaaatttttgccgttttaactacggatcacgcgatctctaccggaatctgcgaatcgcatattttatcctctcacctataaaaaaatgccttctcctctcattcacttcgctcgtttcttgttaaagactaaaggaaactctttccttctttccatttttttctcaaagtaagtttcaagagtatatcgtttattttaagttcgcaaattctgctatcgagtgttcccaaattctgctatcaagtgattgtatcttgcaatctgctgcttataaaaaccgccacattatgagagttagtttagattatgaaaagagattaaatctcgcctttactcgtttttgaaaaccgtcttttctaatcggtatataaagctcttttacttttatttttaaatcaggatttcgcggtcctacaatttattgtttaagaaaaaacattaatgtacaaagatgaataaaaaggaataaattgaaaaacaagatcaaagataagacactgtgataacaagctgataaatcctttctggacttggcactcctcatggaaaaaaaactctatgtacaataattggtaatttggaaaacaaaatcaaattatttaaatatcttatatcttttatgt

SEQ ID NO: 21629 - DNA, 673 bp, Arabidopsis thaliana landsberg
tcctttcacaaagtttaagtttttcaatcttcactgtttaattgttctgtgttgtagttcaattgtaaaaaaatctgttaaaccattgcaataataggaacatgagccatggtgcaaaaagtatatggaactatataacgagcttagagaaaactgggagaggctttattgggatgaagggtattcaaagaaactcgcaagtgatcatgcaaattatgaatccgctgaagaagacgatgaagattttaatccatacaggtttaatccctgactatattcttataatgatatttaggtgtggatgggtggttttgtgattggttgatcttcttaatcattgcaggaacaggcggtctttcagcgatcaaacaaaggtaacaactttattatgttttttgtagtgagtagatttgagatcttgttgtggttcacttctgtctaatttcattgttttccctgattttgttttgcgttatctgtaaaacttgagtctgatttttgtgagaatcggaaatgaaagcaggagcaagggtttaatagaactacacaaggtgataattgggagaaagtcagtcaaatcagggataaatttgagtatgatagagaaaggaggatgagagataaaggtgagttttcatcaccaacataagtgtaatggtacttttatatactc

SEQ ID NO: 21630 - DNA, 508 bp, Arabidopsis thaliana landsberg
  unsure (1)..(508): unsure at all n locations
tgcccggcgatttgcctctaagctttcaccttccatctctttcaagactttctcggctttatctttannnnnnnnnnnnnnnnnnnnnnnnnnnnnnnnnncttgcgtctggaagtccagttcaacaccttcatctttcattgtctccagaatttgctccataccacttatgtcatttgttgcacctttgacatcaatcaggattttgtaagtgagaagacttggcttgatattttctttctccatgagcaatagtacatcagcaattttcttcctgtcgatcctcttgtggagcagaagcatctgatcacaagtaaatccagagagagggaacccaagtccttcattttgttaaacaccagttcggatttcttcacattgccagcagcaacacaattcgccnnnnnnnnnnnnnnnnnnnnnnnnnnnttaaaagattttgggatcttctgcatacaagcttctcccttttctaaacacgaatcttaactgtcagatctaaccgaga

SEQ ID NO: 21631 - DNA, 571 bp, Arabidopsis thaliana landsberg
agccaggcatatggatttctattagattaaaacagttttagagcaagttcagttttggtttttagtggatttctatgatgggtttgtaacctaaaatgggcccagttgaatggaaaagagaacaatccatttaggttcgttcctaaaattgggattttggcaacccaatagaaactcatacgtggcatctttttattgggtcaacttattgacaaaaccaaaaaaaaagtctcacgcgttttcttcttttcttcttctctctcttttcctcttcttcgccgacggaaacacaaaatcgatttgaatcgtcgacaccggaaagctgacttgttcatgaaatcatgacgattcatccacctaaacgcactgtttcaaccactgggatgatgatccagctagaccttctgtaccaaatcctaatttcacttccccgcgcttcaacacttcttctcgaatcgaaggttctgttcccaggtgaaattcgttatctttcgatctaaatctgcttagttgttagatgtttgtgatgcccttaatagaaattttggattttgatttggaatctaaaaag

SEQ ID NO: 21632 - DNA, 698 bp, Arabidopsis thaliana landsberg
tttttcatgttgatgatgatgcttgaatttgtaatatatgaagattttgtccatgtcctgaccaagttatggaggaaaaagggtgtttgaggagatcaagttctgacattaggaattggaatcctttcatggagaatgattgaatgttgcataccacatcatgaagatgtaggggtatgcatcaatggaattttgtactagctatcaatagttgtatagagacttaaataatagtttgctttgacgttaaagtcatataaactttgtttggagtgataaaagacaatgtaaattaggtttagttcattatgatgacgctacattgatgaaataactaataagtcaaagaattgagttgtggattctagacgatctccaaatgtattgccttcatggagaagcaataacatgcttcgaaattggtcgcacactgtctgtttcaggactttcgtcgaatagtttcatgtaattcccacaactccaaaatcttgaatctttagagaaaccctaaacacgatcttatggggattgaatctattctccacgaaacagagatttggaagccgaagacgaatagattcaatatagactgtcacaaaaccaacaagaacgaacatttggactctcgtggaaccaaataaacaaagatggagattcaaatttcaggagtaaacgaaaaaccaacattcttgaattga

SEQ ID NO: 21633 - DNA, 634 bp, Arabidopsis thaliana landsberg
ttccaatatccgggtttcgctggggatatcaaccaagtctgttggagatagactgaagattggtttgtttaccgtttttcgtgtgtgcaaccagcgttcatgaatgctacagtcgtgccgcgagaagccagcagggcacagaagtcaccgtgcccgactatcacttcatcaagcgcctcaacttcgccttcaatgtgttcgaaggtgcttggaatattttcagctgaaggggtaaactcttaggagctggctacaaccaagttgaagacccttttcagtcattgtacgcagcggttgccgaagttcaaacacatgttctgaagctctttcaaagtttgttgcagctttgtatttttgtcagcttcagctttgtattttgtctgcaaatcttttctctcttgtttgaagctctgtaatttttggagaagttccttgtttaatctagtgttttcggcttgggcttctgcaagtgaaccctccattgcctgaagcaagaaatctttcttctcaagagaagcttcgtagtctttaattttgttctccaaaccctcgattataatttcgttctttttgtcttcaaggtcttgctgcattctcagcgcattgcttagcaacatactctgtagaaataacc

SEQ ID NO: 21634 - DNA, 563 bp, Arabidopsis thaliana landsberg
gccaagagtcaaaacaagaacccatcgcaagcagtgatggttatgtaagcaaatttccagtcacggttagggataccagaggagtctagcacacgtaacttaatcgttggatcaacgccgtcgagaccgatgatctctatcgaataaatattggaatcggtcatgaagatgaactgaggacaagcacgagcgaagtggtttttgatgaaactcttttcatcgaaaagataattccatcgtttgcaaacggatctgaatcgaacaagagattgggctgcaagccgagacagtatatcttcctctagctcccatggaagcggaaccattacctctggttattttttggggcgtcaacgagatcttcttctctttgcagtactttaggagaagagccatattattatatattttataccccactagaaaagtgacacagctttgttgtcatgattattggattaaaggatattgattaactttagattatgttggtaaaaaataagcaaataatacccttattggacatttggtccgacaatcttaagagaattatgaattttttt

SEQ ID NO: 21635 - DNA, 443 bp, Arabidopsis thaliana landsberg
  unsure (1)..(443): unsure at all n locations
aaagctcgtgcccgcaaacatgtaagctaatcagcttttttacttaattatactttgtatttcaaacaactgacttatcggttttagtgttttagtgtgagatgacaggagaaagtactccagattttctcctgctcttagatgagactcatagaaaacctgatgggactttcatcgataaaaagtcggaggagatctataacgaagtgtcatcaaagattcaagaggaggagtctcacctgtgttcagacgacactacggagagcacaagttcaggcgggttatctgttcaagcaaagaacaagatctatgcacatgtaacttatcgctttcaannnnnnnnnnnnnnnnnnnnnnnnnntcaactcaatatagttacagntttttgtgttgctatgtatttgtctggtggggctttgaattatgtctaactgaaatgatta

SEQ ID NO: 21636 - DNA, 1280 bp, Arabidopsis thaliana landsberg
ttctctacttgcttcttttaaatgaccctctaatatgttaccaacgattgatcttgataaaagggacgattgttccctgaataacaaaaccaaaagtaaagattggcaggtatttatatatacaaacacagaacacataatgatgatacacgaagaaccatttttgactaaatttggatcaaaggataccaaacaacattaggaaaccaaacacggttaagatataaagtaagaaaacagcagacctggtcaattgcacaaggaatcaagcaacgaagcttgtccattccagagaacaaattaaatgtgaaaatgagctaggaaaagatggagcttcctgcaaatatatggaatccaatttagaattcaggtacctgctccgcatggagaatgatttttccaatatgatcttcactggaaaaggcaaatattgccttagcctagcaagataaaagatataaaaatgaaaacacatgcattagcgacattgtgcaattgaaggagatatatatagagagagcaaagtcaccttactatatcgaatattgtttgaaacctcgctcatattttcttatagaaaccactacacacaaagttatcgttggttgtatatcttccctcttcaaaactttttacataaataatacactcaaaaatttataaattatgtggaacttgatgaaatatgatgtttagcgaagagtatattttactattttctagaaaattatattatttactaagagattataaattaattatgttgttgttaagtaataatagaatatttacgttttactggtcttaatgccatttatgaatttgaatgtaagctaatatgatcataattatcggttacattgtaaagaattcattgttataatgacatgcaatttaatgtgggtttttttggctaaaaagttcttattggtcttgattctggtcaaacaatatgaactttgtaaatgtagcaattttctttgttattattgtgaatattatgataactttaatttatttgaataacttgtgtaaattttaatgtcaattttctacattaaataatggacgtacaaaaaatgaagagataatttttttttcttaagagaaataagtgaatttaattagagatagttatgtatacttatatttagaacccaacaattaaagagacttttttgattttgagataacacatgtcgaatgaatagagcgctcttgtcagttttaaagcttactttgggaaccttattatttatataaatattttatataactaa

SEQ ID NO: 21637 - DNA, 500 bp, Arabidopsis thaliana landsberg
tccattaaatcaagttaaaataaattaaattcaaataatgtaaactattttatagtcaaattaaatttgataaaactaaaataaataaatatattaatttattttttctcatggtgtatgatatatatgatttacattttgattttaaaatataaattagcacaaaaaataattaattaaaaaaaaatatagcaactgtttataacgacagtcaaacgaacaacacagcgacggttattagcgattgtcgctgtaattggtcgctgaatccagcgacagacaaacaaacaatgtatgttgtcgctggttgctgtagctgatcgctggtcgctgtcgctgaatccagcgacatggaaacgaacaaggccaatgactcaaggtgttatccgtaacaataagagattactacagtctagatattctccttacatattagagtcaatgatatataatattccttacactaaagaaactgatcttaccaatgaaaagcagaaaga

SEQ ID NO: 21638 - DNA, 498 bp, Arabidopsis thaliana landsberg
  unsure (1)..(498): unsure at all n locations
catccgccagctccagatcgattgatccccgcctgggtatcatctgccaaacaagaatctgccctgctagctcgagatcgatcgatccgaaggggggatcgatcgatccaaccttctcgacgagaaaaccggttttccttaaccggatttatccgtcttttctgtatttgggtataaaaaccccagagacctaattttatttctacattttcttttatgcttctttttctacaactttttgagagcttttctttgtaaacacctttgggattagagattcatccactttgacactttggagaagatttctgaacctttatctcatttactcaatttgaattatgttttcgttcatatccctttgtgttgttcattttgctatgagtgagtagtttcttaattgggttttagggttctaagtaggggattcaatgaatngatggtttgattgttgtttggaagttctgatctctaagttctttaattcacatgttagcc

SEQ ID NO: 21639 - DNA, 617 bp, Arabidopsis thaliana landsberg
cgaccagatatacgaagaagggaggagcaaacgctcaccaaagtcacgcaccccatggtctggggcgcatccgaagctgggagtatgcgtgggggtccggcttccccatcgcggccgacacccgccattggagggcgtcgaaggggagaggatcaggggacattcgtgagccctcccagtcagcttccggggtcatctcccagagcgacagcgccgctccgccaatgggagcacccttcggcggtggatggcggcgatcacacccgcagcggtaagtcccccctcccgcaactccttcaaggcctggagaaggggctcgagatttttctgcctctcgtgcggggtcccgtggcgccaggcgtcggtggcagccgtaacaactcgctgagaaaacggtgggagcaactcaccgtcgttccggaggtagaaccaccggcgctgccaccccgttgttcgaagacgcgagaatggcaggaatgtactgcaacgcccgcgactgcctcaacaagagaatgcagcctgcgggccgcaccgctgcacggatcctctctccccgtcgacaaggcgaaaggtcggcgagaaagaagtaagtcacaaatccaatgaggagcgatccc

SEQ ID NO: 21640 - DNA, 622 bp, Arabidopsis thaliana landsberg
  unsure (1)..(622): unsure at all n locations
cggttgattcacgngatcgttgtcgtctttgcttgtgaactacaatttgttcagggaccttctttggttgacatgttgacttagcctgcattttcatatttttaaagtgcttaattaactcttcaaaaagatcaggttgtgtcttagcctccacgggtgttgaggttttcttttgatttgggtataaggctgctttcttttcttgaacttctaacccttggaatttggaattggcttttggagcgcgttttagtgcttgtggagcatacttattccttagcaatttcttaagctctctccacgaggtgatattcgtctccttgtgataccaacgttcatcaacttcttgcaatcaccatttgtaagcatctcccgtgagttttctaagtgcataagataatctcttctctctcgggatgtggttgtcgtaaaaccattcatccatgtcattctcccactctaggtagtctctttttcctgaaaagttattaacttcattagccaattgataatattcaggataaatcaaagatttggatttgggagaaagaaaaaaattttttgggttgctccgtgttgatctcattgtgtcgtccggtggcttagtcttaagctcgtgttc

SEQ ID NO: 21641 - DNA, 1345 bp, Arabidopsis thaliana landsberg
  unsure (1)..(1345): unsure at all n locations
aatgtgcagcttgtccttggatgtgcacaactggtttcttctatgaatgcagtaaagaagattttcagctacatgtgcagtgcgccaacctgtctgagccactagtccatgaaagtcatatgcatcctttattcctaacatccaaaccaggagagaggagattatgttccgcttgcaaagagtcgtattttagtgtgacaagagaaacattcaactgcatagagtgtgattttgctttgtgctttagatgtgctactttacctcaaaaggtgaggtataagcacgacaaacatatgctcactctttcgtatggggaagaaacaagtaccatgacatattggtgtgaagtttgcgagagaaatttaaatccgcaggagcgattttataagtgtgatgagtactgctctatcacgctacacattgaatgtatgttgggggtggctttatacatcaggcctggttcatcgtggatctgcttcaacaataaaaagatgtatgttctacccaacaatcatcatatgtctcgacctcgttgcttcatgtgtaagaagcgttgtccacagaaaatagttttcaagtacgacgaagtaatattttgtacccaaaagtgtagggggaaatatagatactagaagagtgagcaagtagcttgatggtcattgctaacatgttttagtgagtattcctttgcattgagataattgtgcaagataaagtgaaagtatatgacctgtaaaatctgtctgttataaacactgcaaagattggtatcgaatagaaacggaattttaactttntaagagtcaaatctctttttgcatcacatttctccttgttctgtaaaatgtatacacatggaaatgtgtgttaatcttctaaaacttttagaaaatcatcgctctctctctctctatgacgttttagtttgatcaaaatgaaagccaaaaaagtggcctatacagggatcgaacctgtgaccttcgcgttattagcacgacnnnnnnnnnnnnnnnnnnnnnnnnnnnnnnnnnnnnnnnnnggtacattaaatatttctcgcggaattgcctagattgtgattctgtgacagttttctttcaagacaagtaagtatcaagtgctacaaattggcaagtataatttattcaagagttgaaaatatcaagtgttcagaaaattttcagattttttttttgggtttattcgatttatattttgttttctttttattctacaaaatcttagaaaatactagatcgatattttccttcttccacaaataataaaaacgaaaataattgttgttaatagtataaaagtatttaatttcccaatcatttgcgat

SEQ ID NO: 21642 - DNA, 556 bp, Arabidopsis thaliana landsberg
tgacacttaggttttggtttatacgtgacacggacacctgtcactatactggtttgaaattgggaagaaggagcgaaacaggaagagaaaagagagtaacgcccgaatttggtgagagagaagaagaaaaaatcctacccccaaattcagggcgttacaaacctatcccccttaaaagaatctcgccctcgagattcagggttggctagcaaagagctcagggtatttggccatcagatcatcttcacgctcccaggttgcttcttcctcagagtggtgattccatctgactttgcacattctgatagtcttccttcgggtgactctgtctgccgtctcaaggatttgcgctggtttctctgtgtaggtcaaatcctcctggacctccagaccttcgactggcaactgctcttctggcacatgcagacacttcttcaactgagacacatgaaaaacatcatgcactgcggacaaaccttctggcaaactgagctgataggcacttctccacgccttgcgaggatttgatacggccaatgtagcggggtgctagctt

SEQ ID NO: 21643 - DNA, 375 bp, Arabidopsis thaliana landsberg
ttttcttcttctttcctaagtcatcattctcagatctggagaatcttccacgtgatctctctccatctttattgcttcagggcgtactgtcacgattctgacctatttctacacgttttagagctttcccaaaattccttgctagcagtgccattccatccttaatctcctgaaactactcagagccttgatctgcattaaatgcaatattcttcgaaggtttgactttgtcctgatcagctttcatttcttctaacttgagcattcccacaagatcaacaaatgatattttatcagtattccctgcaaccctcataactgctttgtgggcagcaaacttcggtggcaaacaacgtaacatgcttttaacctaat

SEQ ID NO: 21644 - DNA, 1051 bp, Arabidopsis thaliana landsberg
tacgatgcagtgtgcataacatgcttccgctggttctgttgtgctgcagcttctgttatctccttctatttctgaatggtgacgtggcacatccttgtagtatggcccttgtcctcaccacagaataggcaataaattttcctgggttgatccccaaaccttccaccgaagcccctagcgactctgccccttggagctgggggccgaggatagctttgttgctgccccgaagcctgcgaggaatattgtggcctttgttgttgacttcctctgtcgtcattctgggcggagtggattgatctgacatgccttggatgaactctccctccgaagcccctggtcatctcggataatctgtaagcttcctcccttctttgccgaaagtcattatcagcgcggatgtattcatccatcttttgaagcaatttctccacggtctgagggggtttcctggcgaagtattgggccgtagtcctagccgaaccccttgatcatggcctcaatgacaatttcattgggcactgttggcgcttgtgcctcagacgcaagaaccttcggacatacgcctggaggtattcctcatggtcttatgtgcactggaacaaggcttgagctgtgactggcttcgtctgaaagccctaaaaactggtaaccaacatgtccttgagcttttaccatgacatgattatccctggccgaagagaagaataccatgtctgggccacattttggactgctgtgatgaaggactttgccatgacagctgcattgcctccatatgaggatattgtcgcctcatagctcatcaagaattgcttcgggtctaagtggccatcgtacataggtagctaggtggcttgtaggattgtggccatggaatggcctgcaattatgctgccaggggagaagcatcatcaaaagtaaaggtaccatgattaaaatcatcgtaccattcatcttcgttgaatgagtcctcttgacgaagctccctgtgttgaggcttcggtcatgattatcttgagtaagatgatgcacctcctcagtagcttca

SEQ ID NO: 21645 - DNA, 968 bp, Arabidopsis thaliana landsberg
  unsure (1)..(968): unsure at all n locations
aactggtcgaggctttcttgctcgtgctgatctgcgaattgatcttcatccccaagcctgtgtttccccatcctccggctgaactaccgtgttagcggcatcaggagttgtctgtccgctggttccatttcgtgcaagggagcttggcgaattaaacatcatccttcggactccaatagggtttcctgcactcatagaacgagcatgagattgtatagtactaacattttgactaagagatacctatattgtttgtagcgtatcaacaactttttccacatctgagaacttctcagacatttccgacatggtttgctgcatggttttgagagtttcagctaacgaagcactgatggcgtcttctatggccattgctgcttgtctcgaaaatgtggtgaagaaaaatctgatgacttaagaatcctccgtccccacaggcggcgcgaaaatgtggatctcggattcacacactcaagtatttatttatttagagagaaggattattcttgaagacaaatgtacttgataattttttaataancatagagaaaactatgagttttgtaagaaaatgtgtatagtaagtctgcacaaaaatgcgtgtgtctttacatggtcattgacccacaaattatactcaaagaatacatttaattctcatttacacacaattattctatcttaaatgtatccgtttcagttttcgaattaactattcaaacgttcaaatttgaattgatttcaaacttcctgggctttatcttctagccctcttgactctccaatccgggcagttttgacctcgatgtcccgttcacctcgcagatccatcacttcgtgtgtacttttgcttaaagaagcccatatgcctttcctattttgggcccctccttcttacgcggcgatctttgaccgatcccgaacccatggtgcgggatccgacaccaacaaagattgctccaaatgac

SEQ ID NO: 21646 - DNA, 574 bp, Arabidopsis thaliana landsberg
cataactaaacaataacccagccatcaaacataataactcagtcatgaaacaacataacttagacatcaaagaacataactcagcaatcaaaaaacataactcaaccaataactatcataacagagtacaaaccttaactcaccaccatgtactgtgatatcttcagcaatggtcgattctattgttgcacgggtacggttgccaccccatctaagcaacggaatctcatcctctttgaccacattcccatatcgctctccaatagtgttgattgaatcatacgcccaagcatgtaacacgaaagtcgtaccattgatggtgtacgacttgctaataggcctcaacagttttatagaatcaacaagggcttcaaatgctgaccgaccccatggataaatcttcatggcttcgtcatcaaaaattcttttggcactctcaaatgatatcctagagttaggatgcaagccgtaaagttcattggctagaagagtcaataacccaaaccatctacgctttttaggaggccatgctcatgcacactactaagcctcgcctaagttcatctaacttagg

SEQ ID NO: 21647 - DNA, 543 bp, Arabidopsis thaliana landsberg
ttcaaatcacctacaagctggacctgggatctttgggctgattacctctaaattaacccaaagatcgggggcttgtgggggatagatatcccccgggtccactaaaagagtaaaagacctcacaaaaggcccaagggcgcaataaatcgtaaggtcattctttcgtgggcctggggagagacaaccagcaaagcagagcgacatgaggccggattggaacaaacccggacggcccacaacgtcgagcgagtgaccgcaacagagatccgactttcccgcgctggagcctccatgcaatggagccgcgcggagattagtcggcggggttacgtggagataaactcaagcagttcactatcttttagctactcgttgttatcatatccacatgtattgccccacggtcgaatatataaggcctagggggcacccttcagaacgatcgacactactacttagcacccacatcaactctctgcactctcaattcagagagctctcttgtaatattgtccactagcatactcaccaggacgtagggtg

SEQ ID NO: 21648 - DNA, 535 bp, Arabidopsis thaliana landsberg
  unsure (1)..(535): unsure at all n locations
ttgtattcatatagatatatgatatcagaaatggattcctgttttatttgtttgatagaccttaacatgatggactttaacatgatggaccttaaaatagctacatacagtatatcaatatatatatatatatattattgatttatatgtccatcattttgtgtctggattagatttttattgctacgtagatcaatgggttgtctagtatagtatagacaagttcaaacttgcttggatttgcttaaccaatcattaactcgtattttaatttcaatctctcttgtcaaaaacaaggatgcttagcttagctcatgcacaatctctacggccaaccagacgtaaatactaaaaagccccatctcatagaggtcacaaatagacacaatcttagggcatataggtaattaaacacaatctaaatttttctcttctcgccaatctaannnnnnnnnnnnnnnnnnnnnnnnnnnnnnnnnnnnnnnnnnnnttgctttctattcaatatatacacacttcagttaccacagttgag

SEQ ID NO: 21649 - DNA, 691 bp, Arabidopsis thaliana landsberg
  unsure (1)..(691): unsure at all n locations
tatatatagttttacttttatgttatgtatgtttacaattttaatatttctaataattattatgttttgtcaaataaaaagttttataatattttattttaaaatatatataattttttaaaaactcacttaaggattctaccattggacaataaaaaatgtaaaaatttaacaaaaactctaaactttaaattattcaaaatttattattataaacacataatgagtacgaaattaggattctctaatagacttgctcttagagtttctttaaaattaaaggtaaaaatgaattttcgtcttgaaaatccctttttgtcgatgaagaagccaataaacccctgcgaaaaacagaagtgttttttctttttaattttaaatcgaaaatcaatgatattactagtatttctccatccgaacctaacaattacacccaaaaccatggtccgtttctgaacctcttcatccgaaccacctttactttttttttttgaaaatcaaaaaatcaaannnnnnnnnnnnnnnnnnnnnnnnnnnnnnnnattcttcttcttgtaaacgttaagcttttctttctatatctctcccttctccttttattcgggtaacctcataattcgtaaccgcattgcctctttaaattgttcaatctatcgatctgtcgcgaagagaagtcggagaaagatgccgc

SEQ ID NO: 21650 - DNA, 548 bp, Arabidopsis thaliana landsberg
ttgactctgtaattatacatgcatcatgctaagaatcatactaataacattttcccccttagaaaagatgccgccacgtaccaggctaacggcacgcaagtctacgggaccaattggggtgcctcggcatcaattggctccccgacatgaaagcagcagtagtgggagtaacgaccccatcggagaccttgaagctcgtgtgagtcgacttcaagcagcacttcaacataggactgatgcttgggtcgctgacggagacagaatcaatgaactgagaagggacatccgacacttgcaggatcaactcgctgatcgagacttagcacttgactgggccgtgcagtctcgtttgctaatgtgtgctaaggaagcaagggctcaggcctgaattaaagaacttagctcgactgtcgatgacctgcaggtttactgcaatacgttgcacgaggaagtccatatattatactcacaactacacccaagtgagcctgcaccacctgctgaggcagaagctggaccatctcacgttgcgggacgtgcgctgggtg

SEQ ID NO: 21651 - DNA, 746 bp, Arabidopsis thaliana landsberg
  unsure (1)..(746): unsure at all n locations
aagaagttcctgacaacatcgccagtgttaaagccgccacgccgagccacgccgagtcagccggccgaagatctgttgttgtacatctcttgcacgactcacgtggtgagcaccgtgttggtagtcgagtgagcagaagaagnnnnnnnnnnnnnnnnnnnnnnnnnnnnnnnnnnnnnnngtgaagttctgggaccctcaaagaagacatatcctcaagttcaaaaactattgtatgcagtacttttaactgcgcgcaacgtccgacannnnnnnnnnnnnnnnnnnnnnnnnntagtcactggatttccaataggggatatcgtccacaacaaagaagccatcggaaaaatagccaagtgggcctgcgagctaggagctcacgacattgagtttcggcctcgcactgcaataaagactcaagcactagttgacttcgtatcaaagtggatcgagcaacaagtaacagataacccggagactgcagaagtatggcaaatgtattttgatggctcgttaaaactgcagggagcgggcgcgggaattctctttaccgcacctggaggcgagcacctcaaatatgccctccaattgttatttctagcctccaacaacgcagccgaatatgaagctctgattcatggactgaacattgctatatcactaggtatcaggagactgatggtatacggtgattctatggtagtcataagtcagataaacaaagaatgggattgctcgaacga

SEQ ID NO: 21652 - DNA, 849 bp, Arabidopsis thaliana landsberg
cagttctgatgtgtgattgcattctgtagatgtcagaaaacaggcgcagaggaggaaggcgtgctcagcaggagcaggcagctctgcaagatgaggtgccccagcagcagcacctgccgcccccgcccccgatgtccatcgagcagatgtttctgatgcagactcaggcagttcaagccattggttagactctggccgccatttagcagcagctgcagcagcagccaccacctcagcctcagatgcccagagacaagcgtgctgaattcatgagaggtctcccccaacatttgctcactcttctgaccccatggatgctgaagactggctgcacactatggagcgggagttgcataccgctcagtgtgacgacagggagaaagtcatgtatggtccccgtctgttgagaggagcagctcagtcatggtgggagtcttacctcgccacccatgcccaccccgacaccatcacctgggaagagttcagaggaagctttcatcagtaccatgttcctgcaggtctgatgacagtgaagaaggaggagttcctggccctcaggcaagggtcatcgtctgtcagtgagtaccgagacaggtttctgcagttgtctcgctatgctcctgaagatgtcaacaccgacaccaagcgatagtaccgtttcctgagaggcttggttgaccctcttcagtatcagctgatgaatcacaccttcccgacattccaacacctgattgactgagcaatcatgacagagaggaagcgtaaggagatggaggatcataagcgcaagatcagtggaccccagcctagaagcagcaatcgtcctcgtttctcaggcaatcaacctca

SEQ ID NO: 21653 - DNA, 640 bp, Arabidopsis thaliana landsberg
  unsure (1)..(640): unsure at all n locations
ctaccaaaaaacaaaaaggcnncgncatttgttccttattagcgcacgcccgctaatcaatgcattatttaatagaaacatgattgtcttaagtaattttacaaattcatattattttgtatcattgtttgtctctcagattcatgtaattggttaggacttttttttttctttgattgttggctaacaaatggatagagctttagagctctccaaagtctaattggttcaaaaaaaaaagctcagaaagaagatttatgaataacaaaattacatgccctaaatgatttaaatgtagggcttattgttaaaacagggctttttttgtataaatctttgaatttaggtatttttgagttgggctttgaaaaagagtacttttccccaggaaaagactattttacccctgtcatatgtatcttctcctacattctcttttctcgactgccaccacgtttatggtttactcctccgaccaaaacctttgcctgctctcgcgaccacaatatttgcttttcaccactgggtactccatcgataccatttccatcactttaactaacaactctaccacctccaaaatatataacctctccgccgcaaacacattcttcgatccgatgacttcaatgtaatttaa

SEQ ID NO: 21654 - DNA, 568 bp, Arabidopsis thaliana landsberg
tgttttgctttgtgatacaatataatcgcgtagactgtcttatgcgatatctttgtgtttgaacatctgggacacatcgtggttcaccaccttacctaggaatctgaacatactgccagagattctttcttgcgtaaggcaagagatgagcaatgtctggagttctctcatctctgacaattctattttcactttctttcaagtgtgatcagagagtacaacttcaagtcttcttattgcaatctctcttgacctatcttcaacaacatttgacacaagattctcaagatatcaactcatgacaaagtcttcaaatggtcacacaagccacgaacatattctgctccatcatctttcgtttcctgaggtttcacgacaggtttgctcacagctttgtcctgtgttttaacaaaatctgattatactatttcctatatgccctattatttctccctataaaatctgactattatttctttttgttaaattttaatttgtccgatatgccctattatttcttcctataaaatctgactggaacaagaaaaaccctcataacaaaaccctt

SEQ ID NO: 21655 - DNA, 376 bp, Arabidopsis thaliana landsberg
  unsure (1)..(376): unsure at all n locations
aaacatcgatgacgcacggtgcttccttattcagagtgacaaatccttctaaaaacccatgttttatttgttcaccgcctccgccgcaaataatgtcaatagctttctaccaacgaatcttattacatcgagggagcataattcatcgcaaatctatccttctgctttgatcaactgctgcactctctttccaccttggtcagcaatcaccgaaattagggtttcacctaagggnatttgtccctagattcggcacattaacacgtgtgaagcccaagcccacaacgttatttaggggnctgtttcaattcgtactttgataatctttggtcgacattatgctttcgatggtccgacgactccatctgagaactaa

SEQ ID NO: 21656 - DNA, 655 bp, Arabidopsis thaliana landsberg
atccccaaagaatccggtctagatgttccacactcgtaccaaaggttttttggtttttatcccggattatatccgaacaccgtaatcaaaccggtgatttgcctcgtgatttcgtcgacgttttgctctccctccatggttcagataaattatccgacccggacataatcgccgttctttgggtatgcacaccatttatttgattaattattcttaattatatttgcgaaaattgttaggattatttagattaaaacatgaaatttgagactcaatgtgacgtgttgtggaataattaaagcattagaagttttttgtttgacatcaaattagtaaattttagattttataacagtttctataaaaagtaaaaagcactaaaatttttgagttattattacaggagatgatattcagaggaacagacacagttgcggtcttaatcgagtggatcctcgctaggatggtccttcatccagatatgcaatcaacgggacaaaacgagctggatcaagtagtcgggaaatcaagagccggtaatgaatctgacttggcttcactttcatatctaacgggtggggtgaaagaagtattgaaggttcatcctccaggcccacttttatcatgggcccgtttggccataacagacacgatc

SEQ ID NO: 21657 - DNA, 516 bp, Arabidopsis thaliana landsberg
catcgaagatactttgcaattacttgaccagaaagaaacgtgcataacttcttgcgcttaaatctgattgcagatctgtcagttgatgtggattcttgggagcgtgttctttccatagacaccttattcctgatctgagtccctctggtctgtcggaattcaccctacaataaaccttcttgaaattgttcttcctctttcctcttttctcttcttcttcttctttctttgctttgcccactctccgattttactaagatctgcttcatctcacttctccttaatgacatgaaccagatctcttttccccaggtttcctccattgcggtcgtaatgatctgttctcatccgaagcgtctcgccttctccactaatccgtttacttctctttgatcatctttctctttctcctcaaggcaattcagtctctcttaaatcaaattctctttctttgatggtgtttaatctctctctctctcatctctcgacgaagacgacacgttgacatgacacaac

SEQ ID NO: 21658 - DNA, 608 bp, Arabidopsis thaliana landsberg
  unsure (1)..(608): unsure at all n locations
gcaaattntaggtagacacgagcaaataagaattgttttggtctgcctttacaaaactcagatactaagcggtatgtggcaacatgtgttgaagaatgggatgcacgatatttgaaggctaagcattcaacttgcttctctattcgaacatataagaagttgcttacatgtgtatagtcgagtactgctacatgcatcaaaagaagaggtactacatgtttagttgcatccgtattgcatgaagattatccatgtcaataaaagaccccaagtcctgaaagtctcattagtcttgttcaggaaaaatatagtacaaaagtgtcatactcgattgctaatagggaaaaaaaactacatgttagtgatattcttgccagtccagaggagagtttcaagatggtttatcaatatttgcatatgtttgagaaggtggatcgtggcacaaaaactagtgtgatatttgatgaagaaaaaaggttacctatttgtacctattctccaccttttccctcttctcaattgactctttctctttatcttcagccaactctctttatctttagccaaaccactngattctttcctttctctacatcttctccaatctc

SEQ ID NO: 21659 - DNA, 486 bp, Arabidopsis thaliana landsberg
gtttactgatattaaagttttctctttgccatttttttgttttagttactttggcaaaatactggtttaaaagtagctaattaaatataattcaaaacacatatacaaaaaatgcatcagtatttaatattttaacatggtaacacaaattcttaattcatacataccattaaaattttaaaaaatcaacattaacaaaactaacttgtgtttcaccatcgataacacaaatttctattgcaattttctaaccataattttttatataacaatacttgacatcattacaacctaagataatttttcatctaagattttcagtttaaaactccagaatttgacttatagttcacaatattagctattatgtcataaacaaacataattaacaatcgacaatgtttatatatatactataatatatatgactaaaacaaacaaaaactaattaaatgtaaattttatacaacacattgtttacaatat

SEQ ID NO: 21660 - DNA, 650 bp, Arabidopsis thaliana landsberg
  unsure (1)..(650): unsure at all n locations
gcaaagaaacaaattttccggagacagttaccaccgtctttacacggctgagtacggtaacgagctggatgaagccaacactcaaaaacaccatgagaaaactcacaagagtctcctctcttgcaacaacctttacgaaactcaggacacgccgtaccggagtaatgaaacttcctcggatcacgacggcgagctttttctccgggatgagcgtaaggacactccgtccaatcatggctccggccacgagcacaacgtctcactttaaactcatacatccgaaaatgatcgcatgtataagcatcgattggtgaatccggacccgagagatccggatctgaatccggatccggttcgtttgacggaagatannnnnnnnnnnnnnnnnnnnnnnccatcatactacttcctccgtctggacttccgtaaatatcagacaccgttagatcttcagaaagtggccatggaggaatatgaaccgttggattaaaaccacgatgagattctccgatcatcatttttttacaacaattcactcaagaagaaaaaatcacattcgtctgagttggttttgttttttgtgtttgtgtttgctaaatctccggcanagctttacttttttattaactgatgctgagtagtgggatata

SEQ ID NO: 21661 - DNA, 813 bp, Arabidopsis thaliana landsberg
ctctatatatagagtaaaaaaaaggaatttctacattttttctctattttatagttaactttattttacagatatacaatgaagcaaaatcaactatatttcttctaaaatagaggacattataaagttgtgcattggaaatgctctaactatatagttaatgtttttgtattacttgcaagattcgtttgcccctggagacttatttcttgattaatcaacctacacccacccaccaacccaccttctttgatttcaataatatgaatctatgtttcatagcccgacttattgttttcaatattgaaaaactttatccacaagctaccgtgtgacctgatcttatcatcctcgtatttattatatttctaagaaatgatgtgatatcatcatcattttcataatttaggtcaaagacgttttttatgttggtgcataaataaaaagggtagtaaagtgcaaaaggctagaaatgtgggggagtagtgcaaaacattaagagtaggggtttatcgatgattaacttgatcgttaggtgtaattatcattagactttgcaaaatgcaaactgtaacgaatgctagcatgatcgccgtctggagctttaacacgagtcttactcacgaccctttatttgactctccaacatatgtcgaatccaaagcaaaccactaacttcttaatgttttggggcacttttctttggtttaaaccataaaatgtcatcttatgttaatctatttgaaattatcattacttatgaaagtgttatggcttagggtgtatatttaagaacccccttcatatgtggga

SEQ ID NO: 21662 - DNA, 457 bp, Arabidopsis thaliana landsberg
tatctaaaattttccatatcactgctggagacctaagtcataataatataataataaatgtgtgtaggtgtgttttgcaacaattttctcgttggccagaatggtgggtggaccttacctagtttacgtaacaatatcagccgataatcccattctcatcaaggtatatcctaatatatgaatatcagaaattcagaatatgacatacatttcgttttggtctatatttattatcgtttcatcaattgttcaaagtttttataaagatgtgaaactttcaagattgaaaagaatattttatttagtaattagatggtatactattattcttcatgatcacaaattttagttgagttataacatttcctgtgtttttttttggggtgttcttattttcttaggcaatggcgttggggttacaacttgtgagcgcattctggttctataaaatcctcaa

SEQ ID NO: 21663 - DNA, 651 bp, Arabidopsis thaliana landsberg
ggcctatattttatgaatgtaaattaagtgattgtaacctgcttccgcttattctttcctccgatgtgatgtaatgtctgcgtgattggtgaagcgctcttgggcggtatgatgttgatacagaggaccgaacttgtcaagtgattatgtgcatctaatggtcatctgaggtccttgggcaaggatatctgtaggtgggcctaataccttgggaggttccgtgatagctggtatcggagcgaacgccatttcttcagatattacgtactaattcaaaagaattttcaaacacttacctagaaatattctttcactcttaccttatcactttctaattgtcccttatcttgtaaagtcaggtaatgaagtgcaatatatgtaggaagtggggaatcaacgaaggttgattccataattattagattatgcatgtatcatgtttaatactgtactaataaatcttcccctcttatggaaatatggtgcgcactaagactacccagcgcaaatcgactggacctcatggtgtccacgacatcagttacctctaggacaaaggaagtagtagtgcagtaatgaccaattggagcctggaagcatggtggagcacccggcagactaccccagaatagggcatgacggatacccatg

SEQ ID NO: 21664 - DNA, 618 bp, Arabidopsis thaliana landsberg
tgcatcgtaacaattgatgaacatgttatatgtatgtgtggtgtctatggcctatgagttaaagtaatgattgatgaattgtgtttatgtgttaaattggtctatgcgaatataactgtgcgttaacttgatgaacatgcatatgaattgtgaattgatgagttgtgttaatttggtgttacattgatgtggaatgcgaaactgagtataattacaattttctattgttaaattagtttgaaattaactagaaattgattattatttacatatttttttcgtgctttggctcgcgagctaaatgagccagctcgagctcgtaaacgagctgagccgagctgactttgtagctcgttatcttaccgagccaagccagctcgaactcggacgaactggctcgatatccagccctaactgcaacctcttattgaaagtcgcctagaggggggtgaataggcggaatctgaaatttacaactttaaacacacactacaagccggggttagcgttagaactaaaatcaagtccgggagagaggggaaacaaatcaacgagaacaagcgaatgacacggtgatttgtttaccgaggtcggttcaaagacttagtcccgttgcga

SEQ ID NO: 21665 - DNA, 1750 bp, Arabidopsis thaliana landsberg
gtatattgttgtctctaaatgcaattaatatagcatatagaatcattatccatgacctacaaaaaaaaaagaatcattatccatggaaaacaaaacaaatcagtatttaaaattggaatactgccataagaaaatcgcgttgaagatggaaaaatatatatcatcgccgcttatttatagcactaaacatttaatggagaaaaatatatatgtcaaatgacgtttagacagaaaaattgtcgtaaaacaattatgctcgaatagtttatccatgcatgtagctagcgacctagcgtgaatcgaatcattaatactgtatatgaaatggaattcagcccccatatctacaaatgatttctttctcaaacctgttgttccattccattctatcaatatatatcctactatttctttgcattagtacatcaccaatcagaataagtaaaccaaaaccagccaatatgagttcaacaacatttaacattttgatatactttgtaaggcaggaatgagttcgatgtacttaagagtttccccacatccttgggaaggctttggttggattctcgaacatttttagggaccaccaagtttggtaactgtatgtgtcgaaagaagtgtttcttggaaacacattagctggtacaaagtttacatcatcaaaagttcataaaatcacttataccataatgtcaaatatacattatacttcttacaaaacttatccatcagctggtaccactttcaacgtatcttttgcatgtgaataaagttaacttttaaaatatttgattaactatatggtactgaattactggtcctctattttattttttttacattgttgttcatgcatatatatacctaagaaaacctcatcgaagtttatttgctaagtgatcataggaattgattggtaaactcttgttattatgttaaacataatgataatatatattcaaaaggttttttaaacggtagaaagttatttgtaaaaaaggaaaacgacaaaataaaacttttatctaaaaaaaaaaaaggaaaagactactggaatttcgtaaagcgttaaataccaagaataattaattaagaaaataattgtatttagtttaaaatgttccaaacaccaaaatcaattaaattccgaagaaaacactccaaattcacgtggcgactttctcaacgggcctaaaatattttcacctattttatgtaaatatattagtcaaggcccattaaagcccacattaaccgtcgactttagcgttaaccgttgattagtctgacaacaattcctcatctaacgacacgtcatcgatctatgtcatatttcaggatccaattatacatcattacacgaaacgtataaattcaaaaccgaaaccctcaaaaatcatctttcattgcccagaagttttcatcacaatcgctgaatcgtggattaatggcgccgaaggcagagaagaaaccggcggagaaagcaccagcaccaaaggcggagaagaagatcgcgaaagatggaggaacgagcgagattgtcaagaagaagaagaagacgaagaagaaccagagacgtacaagatctacattttcaaggtattgaaacaggttcatccagatattggaatctctggtaaagcgatgggaatcatgaacagtttcatcaacgacattttcgagaaactcgctcaggaatcgtctcgtctcgctcgttacaataagaaccgacgatcacgtctcgtgaaat

SEQ ID NO: 21666 - DNA, 755 bp, Arabidopsis thaliana landsberg
aagtgataggcgagcttatgcaatctcgctttcttggtattaaacgtggtccaaacgctgcagtgattaggaagttcctacttgacgactatcatgttagtatatcatattgcaaagcttggcgagctcgagaggtggcaatgaagaagtctttgggatctatggccggtagctatgcacttattccagcttacgctggactccttcaacaagcaaacccaggcagtctctgctttacagagtatgatgatgatcctactggtccacgccgtttcaaatatcaattcatcgcattcgcagcatcaattaaagggtacgcatttatgcgcaaggtcattgtagttgatggaacatctatgaaggggtgatatggtggttgtctcatctgagcatgttgccaagatgggaattttcagatcttcccactggcttttggaatcgttaacagcgagaatgatagtgcatatgaatggttttttcagcggctaagcattatagctccagacaatccggatttaatgtttatctctaaccgccatgcaagcatatacacaggattgagtaaggttagacacaaccatccatctcacgttgcttcatatagtatacatatatcgatttacttaatctgccaataagctggttctattttgattggataatgaatgatttccctaatattgttgcaggtctatacgcaagccaaccttgctgcttgcacggttcacatttggcgcaatattagacatctatat

SEQ ID NO: 21667 - DNA, 826 bp, Arabidopsis thaliana landsberg
  unsure (1)..(826): unsure at all n locations
tgtcttttcttttgacaaaaccatggtttttagtttttttgggggggtaatcgttgcaagtgcgatctggggtcgctttggattatgattactttagatattttttggcttgagtatgggcacgattctgttggaatagatgactatatacagatttcaaacctctacgccttcacgcttaatcatcccctctaaatcataaggggctatgcatctcaactctctggaccattattggagaaacgcccttggtatgtgcaacttaactctttctcaagcctttatacttcaataatcgatggtcatgtttcgggtggccatggacaccaatctagtctctcattgttcatttggttatggtcttgtgattatctatggtgtttcccacaaaccttttccatcttttggaacatatttccaccggaatcttccttcttgaaacaatttttcaaaagctcttatgcgttaaacgcacgagccatcaatgaccaccagctggtccgggaattctcgacgtcttcaagcatgattccctattggcatcaaaagattttccaagttttgtaagcttctcaaagtcgaacatctctccggaaaactcattgagcctttatctttatcttccttgtattgttttagtttcagtttgtatgaactttcaccttttgagattctaatggaatgaaagtattttgcaaaaaaaaaaaaaaaaaaattatttatgtcttaaatgtctgtattgacacttcaatggatatgaaatatcaaatgacttntgtacaattcacatttcgggattttaacatgagttatttaaaataaagca

SEQ ID NO: 21668 - DNA, 651 bp, Arabidopsis thaliana landsberg
tgaagcaaatagatgctagtgctgcattatactccacaagccactgcacagaatcatcagccagactcacaaacattgataatgagaataaccacagagattaataaaacaagacgttaatgcacacttacattagaatcttcagtgaagttaaaatactgaaatattatcgccacgatcaaaaagacaataccaacaacaatacccaatgactctggcctgaaaacaaagaggatgaagaaattttaatcaaactaatcttaatctttggaaaatcagagattgataaaaactcacactttaatatctccttgaggcgtgcctcttttgttgatatcaaaaccaaacatgttacgtctcagaacgtatctggcagtaacaggaatcattttgagagtgacgaaaaacccaaccaagctaagccccgcgttaattagaatcgatcgcttgagctcattatcaaccttgtagtgaaaacagagaaggtatagatagagcgaacagagaagagtagagatcacgaagatcactcctaatttcggcggcgcgagacgaaattcctcacctggaagcagaaccagtctttcgggtcatcttctgctcagatggcgctgagttgggttcgacgggtccggtttgttgggattgaga

SEQ ID NO: 21669 - DNA, 418 bp, Arabidopsis thaliana landsberg
caaaacagagacgggctaggaatcggatcataggacttcattaataaaatggaaaatggtttgcagaggataaagaggggcaacatatagcggtgtcttattttgagactttgtttaatacgtcgaatccccagaacattgcggaatctttatcagaggttaaaactttaataacggatcaaataaatgacttcttaacggcacctgctacagaagatgaggtaagagcggctttgtttttgatgcacccggaaaaagcaccagggcctgatggtatgacagcgttattctttcaaaaagcatgggctaccataaaaaagaatatgctttttctgggtaactctcttttacgagatggagtttctgattagcagttacatacgactaatatagagtttgagcctaaaaacgggacgac

SEQ ID NO: 21670 - DNA, 1070 bp, Arabidopsis thaliana landsberg
atgcccggctttccaaatggcgcatgccaccgtggcgactcatgcttattcgcacatggcgtattcgagtactggctccacccggcgcgttaccgaacacgcgcatgtaacgccgggaacttgtgtcagaggaaagtgtgtttctttgcccacgcgccggagcagctaaggcagtctgaaggaaagcacaggtgcaggtacgcatataggccggtgagggctagaggtggtggaaacggcgatggagtgacgatgagaatggacgacgagggttacgacacgtcacggtctccggtgagaagcgggaaagatgatttagatagtaacgaggagaaggtgttgttgaagtgttggagtcggatgagcattgtggatgatcattatgagccgtccgatttggatttggatttgtcacactttgattggatctcagagttggtcgattaaatttgggaaatcaaagcagagaacaaaagaaacccgatttttatagtggattttgttaaaatccacaagatcaagattcaagatgagagatcttgtcatgtatatggtaaatttaattgtaatgatttattgcaatgtcgcaaaagaagttacttctctttgcatgtaaacagattcttgatcttctataagtctttgtattatctatcgtataaacaatgttataaaacagagtttcaaaagaaaattggctaagtttgtattttagtcactactagtcatgcaaccgttacgtagatattatagttgtcgcttgtcagtaactcggtatatccgtatatagctataaaaagtttgggttgttgatcgttgaccagaaaaataaaacagcaatttgattgacagtatatacgattattttgtaaaatgtagatgttgaaagaaaatttagttacaaataaagtaatttttaattaaaaaatttataattgataatttatcttaaaaacatctataatcaatttgctttggtataacaaaaccaaatatgaaaatagtaaaatcaattattaatttaaaattgatataatatgaactacatgacggaacaccgaagagcatgg

SEQ ID NO: 21671 - DNA, 746 bp, Arabidopsis thaliana landsberg
aacttgcgtcacagaatgtaaacgacttgaccgccagtatcaggcaaacctagaacatcggtttgaccaaagtagccgtgaaccgagatagatgacaacgttaaagattctaggaacccttgcgaagaatcgatcaatgttttgaggatcaggggcttgaagaatctctgacaagattctcattgtctcctttactctccctgcgctttctccccatcctttctcaaaaccacattccttaaacctgttttcggtttgaactcaaaattaaaccgcttaacaaacccagcgactagcaacaaatatgaatttgcaacgttcaaaatgcaacaaggccaaacgtgtctcaattttgttgcaatctcacgacttgctgagttactgcaacaaaacatattgtggtaatatcactatacgatatagcaatgtaaattattaaaggtttaacctgagttcaaaggcttggaaaggtgtgtccttaggcagctccgataggaaaacatctgccaaaatcaaactcatctcaagctttctagccgtgttaagagtctcattcatcataagcttctgaaaattatataacaacattgagatagaactgatttaggctacaatgtcttacaaacttaaattgttttacaaatttaaatttaagcaaatactattattataaaaggaaaataaatgtttgggaaattattttaagaaatgctacataatacatttggtattccaaaactaacaat

SEQ ID NO: 21672 - DNA, 507 bp, Arabidopsis thaliana landsberg
tgcctatagcaccgccacaaagaacaaaaatggggccctaatttagtttgagaatatacgtcggttatgtatcaccgagtataataaggtatcttgaaccacaaactggtgatttgtttacgggacgttttgccgattgctattataatgaagatgaattcccagctttagggggaggaattcataaaatgcatgtgcataaagatatagaatggtgcgcaccatctttaaaatattttgatctccccacaaagcaacgtgagttggaagtagaaaattttgtacatttacaaaatatggcaaatcaattaccagattcgttcatcgatacaagaaaggtgacaaggtcatatatccccgctacaaaaacccgtcaagagttaaaattcctaatgagctggaattagatgggagcaaaattaatgaacataaggttcaattaaagcgtgagaggcatattggctcaaaagataaaaatcctcgaagaaattgcaagaagaaaataaa

SEQ ID NO: 21673 - DNA, 500 bp, Arabidopsis thaliana landsberg
aaacgatgtatccatacattatttcaagaatttgcaacgaatgcgacatattttatattatactaagacttacccacagctcttgcttcacccgctccgccttgttattgaattccctgccgtcccggtctactgcatcgggggcgacggcgtagtggtcgaaggtgaaggctgggcccgtcactccggcgtactccacaagtccagggaagtgttccctgcacagaggccgaggatgttgttggggggcccacgatgattcccagcataatccaaaaccgtccaagacctgtccaagtgataaatacaaagtattagtctatattatgattatgaacacataatatgaacaagaatgccgaacataaagttacatgactctctccttccggccgaatcaccggccgtcctgtccgcagtatgggacgcgacgggagactcgcggggcctcgcaggtagatgctcctccaactagagccgcctgaacgtgacgcgtctgc

SEQ ID NO: 21674 - DNA, 763 bp, Arabidopsis thaliana landsberg
gacctttagtttgttgtcggccagttctctcgggactcccgacatatccgcaggctgccatgcgaatacgtctcggttatcttacagaaactggacgagcgcgctttcctatttatcatctaggctggagctgatgatgggagtcttgcgctcgtcagcgaacttgaggttgattctctttgtctcctcagtcggccgcatagaggtcagggcttgagcttcattcgcgggtatcgcgaggtctttctcaggctttgagttccactgcgaggaggaagtcgtcggtggtttagtggtgagggtagcctgaatggccactcggaagcattctgcggtgccttggaagtcagcatgcacagttatgattccttgtggtcccggcatcttcaatatcatgtacgtataatgtggaatggccatgaactttgccaatcctggcctgccgatgatggcgttgtacccgcagtcaaagtttgccacctcgaacctcaggaactcggttctgtagttttccggagttctgaaggtgaccgacatgtagatgagtcctagtggatattctccttcagtcggcacgatgccaaagaaaggagtgtccgactcatggagctctttgaggggaactcccaagccttggagcgtccaggggaaggttacgttgatgttgcttcccccgtccactagtaccttttttaccctgctttctcggatcactggatccacgaggagcgggtacttgccccggtggtcgaagaaaagccac

SEQ ID NO: 21675 - DNA, 1789 bp, Arabidopsis thaliana landsberg
atttgtcaatagtttgattcttctgcaacctgagatctagttctgcccactgtttcatacacaaattatgctcacgactagattcgtgttctttaagccttttcaaaacattcctccaatcactaaaccctgtagatgtcaattgactattgtcaccttgattgaacagtttacaacgaaaacaaaagatcttgttcaatacctttgagtaaactagccaacgtcgatcttgttttgctccatcacccatctctcttgtataatacaaatgtgaaaaatgtcttttaacactgttcttagaaaagttataaccaagcgacagtctttttggtggaccttgtactaccatgaaatgcctccattcattccatcctattttgatattttcccaatttcaaggatcatacatatcaaaaattccacaagtctccttcagatcatcactcttctcatgttcatttgtattcacatcatctttaacattcatctcttctccatccactacattcacgttttctcattcaacacccgcttcttctctttcacactcatttatatcctcatccactctattatctccaagagtttcatctcctttattttccacagattcatcaaaaatttcaggttttttgaagaacctgaacaaagcgttctcttgagattttgcttgttcatctttcagttttctctttttctgtttttacatccagacgattgatctttcttcgttgatgacatttttctgtaataggaaaaataaagttacaatgattaattgtaattttttaattttagaaaaaatagaatggagcacgagtaattagatttaataaacatgatttggtgacaaaatgtttaaagaaaatatttgcctttgtattaccttgatcaaaagcttgaccaaagagtcaaaaacaaaagcttgccgacgaggcgacgaagaagatgaaagtgcaaaccaacgaaaaaaattataaccctaattgttaaataataaatcgtaagtgtctattttgtttctttaattaactaatgaattataagcacatgtttgaaataagcttatacaagcccattattaaattttctttatagtttgagtttcaacattatataacactaacatttttttttttttaacaccaaatcaaatatattaaattataagagtattacataatacatgatacatgaaaccactcaaatacatttcattgaattaaataaaggaaattgtacacaatttcgatgaaaaggtggaagtgacctttctttccaaacggaagccttacaggcaacagataaatctgttaagtcccctcgtcatatactcgtaaaaggctaacatcttatagatgaaactcccaaatgctttctgcattactttggttaaacgaacacacggatatgttgcttgaaatgaatctcgatcatgtcttttataacactctacccatcgtcgctggttagtgaccatgattatttttcccatagaacccgaataaatagatcgttggacagtgagtacatcaccatcattagaccatgaacatgaataaacggatccttggactgcgagcacatcaccatcatcggaccatgtgtttgggaagaggaaattattgtcgatgccaattccttcactcaaaagaatttgtctattgattcctggatcaaatacccaaatgacttctccaaaccatagatttgaaaaaacttcatcggttgaaaacaaagataaacgtcggtgagagaaaccaccgaaaataaactttaggtaagggga

SEQ ID NO: 21676 - DNA, 593 bp, Arabidopsis thaliana landsberg
gaactgaacacgtcggagacttaaacatttttgatctttcttactactatactcatgggtgggggtgatgggatatatattgtgtgtgctcttgttcacctctatagtttgctctagttgtctgtggtgatataggtaagttaattgtgctcatatctattgtcgcgttttgattgagtaacatgatgacttctctcactgttgcatgtgttaggaggtttactcgcgaaagaggatctaaattggtatttttgatcacaaggatttttactcaaaagttcaatgctccctacaataattggtcctatgtgccattggataaaagacaaagattgtttttagagtttgcggtaagcttcatgtatatctccaactttccttatactatactatttaatctttcaagttttcactaacttcttacttttttgtagaagactcacacccgggatcccttaataacagggacagtccaatattacttcaatgagatcgttaagaggcgcttgaaggacatggttagcattgcaaggacaactcgagagcagcctccatggattggagaaactctgtgggggaacaatgtgtgcgta

SEQ ID NO: 21677 - DNA, 552 bp, Arabidopsis thaliana landsberg
  unsure (1)..(552): unsure at all n locations
aatctattgcatgtttggtatctacgatggtgcatacggcttgttagccaattgttatgtatttagtacgatagaggtgatactgtttgttttgatgttgttatttctattgaattgttattttgaaattttttaatgagcgttatgttatatgatattatttgtgtaaaaaagataaaattttaaactaaaccaatagacgtacacaacaatattgagatacacgtacacgtgtacgactgctccaaacagttacatcctaaaaatacctaaatcacataaatcttatattatgtacgtacataaaaatatttgttgaagcgtacatagtacaatattaaaatgagtataaaaaatctctaacaactgcctacgaggatagatagacagaggatgagaattccgtacacgttcattacaattataccctttatttaaatttcttatgtgtatgtatgcaatttacggcgtacgtatatgtagacattgtaatatgttacattatgttntattgtaaagacgatttacacaatatntattgagtttgtactt

SEQ ID NO: 21678 - DNA, 1043 bp, Arabidopsis thaliana landsberg
atccctgaaatgaaccaacaacttgctatctttttccttataacgttgtttaattactgaaccagagtcgtgtggctttatgtttaccatcattctctttgttgtctttctagtaacactatcctcctctgtagcatagaagcataagtccttatcaaagtgctgatcgataaatgctcccttgcgaagcatctttttagggaaggcacctttcagttccatatgcaggcgtaacatttcattgtttgtggagccagggaacataattttcccgctaaaaagctcatacagacagcaaccaactgaccatatatctaacggatggtcgtagggaagtccaagaactacaatgaaaaaagagagtacagctttagttataatagaacatacagccatgaaatatccaagtagatgattaagacaacagctacagtggaacttacttatttctggagctctgtagaagcgactaacaagatatggtgtaacttcgtttgtaccagcaaacattgcactaccaaagtcacaaagctttaacgtgtttcttgcctcattcacctggataatcaaggaacgaccagaagttaaaatttatgtgcatcaagcaggagaaaaacacagacaagtatagcttaccagcatgttgtcaggctttatatcgcagtgaagaaccccacagttcttgagatgtttaagggatatgaataactgcgttgcatacactctaacaccagatagttgaataccaatgttgcgaccatacttcttcacaatctcacggagattcagatgaagagactcaaacaccaagcaaaggtggttcctatacttaaaagttgaaagaaaacgaacgcagtggcgcttattctctgggtcagagccagctagcttcttcaatatctgaatctcagtctggccggccttatgcctacacaaaacgtgatatgatagtgagacattcacaactcttaggaagataaatcaaacatcacttgataagaaatttgataaaatttgtcccgtcctagagaagaccacttaca

SEQ ID NO: 21679 - DNA, 912 bp, Arabidopsis thaliana landsberg
gagaaaacgtgtctcacgaaactgcgaataactcaaccaatttaaatccaaatacacttctgtaaactggaaaatatcgataaaagacttggaaataactctaccaatttcgttatctttgaaaacgatttgatatgacgaaacggattcctcccaaaccccaacgattctgctccttctccttctctctcttttcttcctttataaaacgaaaagtggataactaaagccctaatttcgagtttcttttttttataggtacactctaggatttccaattaacccaactaatttaaccggacgatttaaatacaaaccctaaccaattttccggttcacgggcgttacaatataaaccaacacttctggattttgattcgaatccagaagttttcttccgcaagacctgagcatcatacatcggagattccatggtgtgattgctgccactagtcaaggtacttctttctctttatatgtgatgattcatcaacttggtcacgtcttctaattgagagcaagtgtaggcaattagcatatgtttccatgtatatacaatactcaacttcagtcccaacacgttcacttagaaggagaatcagcaatagaaagaaatcgattacgaaaccaatccctaatgaatcaaagtttcaagatacgatatcaaagcttccaccaagattcacccctgaagaactctctgatgctataactcttgaagaagacctgtttttgtgtttccatctctttaactgggcatcacaacagccaagattcaaccacgggaattgctcttaccatatcgcgataaggaaactcggagctgcgaaaacgtacacagaaatggatgatattgtgaccaggtactctctggtcgtcatattggtaacgagactctttacaattcgatca

SEQ ID NO: 21680 - DNA, 243 bp, Arabidopsis thaliana landsberg
tgtgtcgaagattcttattggtccactaaatacaaaacatccaattctatattctctatatggtatcagagcatcatcgatacctaaaaacctaaaaacagccgcctctctcctttctatcttcttcctctccgttgattttgtattcctctgtttttcaaacttcaaccatgtcgaatgtttcttctgaaaccgtcaacctcaacaacacctccattgttcacatgaacatgtcgaatgtga

SEQ ID NO: 21681 - DNA, 500 bp, Arabidopsis thaliana landsberg
  unsure (1)..(500): unsure at all n locations
ttccgggaattttacttatgttttgcttacagatatgttttcaagttcaatggtttcgattagaagatgtggcggttttagttaggagctctgaatctgggtttagagtttagtttcaaatggaatttgggtttgtaagataaaggtatatcgtaaattgattcaaaatctggaaattgtcattcaatcaaagctcattgggttgtgatgtttacaagttgtgtatctctgattctttttttgcaggagcttgagtttacactctctgcctttaggtgggattaagtcttctagtttcagaggtcaggttctgtatatttttccaactttgatgcaattctttacggtctcattgttgctgttcttccacaattagactcattcttgattagctaattgtattttttttttctctatatgacagggaccttcaaagtcaaatctcaaaggacaggagatacagagccgnctaataaaaacttcaaagatttaaattccaa

SEQ ID NO: 21682 - DNA, 525 bp, Arabidopsis thaliana landsberg
taggaccgtcggccaccccaccggagagggagcagtactgggagagtgcacgccgtgtgcgtcctgcatagccgcctctgcagtgtccctctcggagatggagtaatgctccgaaaaggcctctgcaccccggagatcatccgccggacggaagctaggcaggtagcctcccagcggtccgggtacctcccgcgactgtgctggtagactacacagcgatactcgatcgaccaggtgtgccggtcgaaagcccgacacaacaaggtgtcgagtgcgtcgtggaagtgacaaccgcgagcggcgtcatgggtgatgggtcgggcgaccatccctccgcctcctgcggttcagaggactcagagctggggtctgagccgtcgtcgtcgtcgtcggggtctcctccaggacgctcctcagcagctggggtgtccacggtggtgaagggggcgcatcagctgaggaacaggggaacggcgcctcacagactctacctcctgctcaggtggagaggaagagcctgctgct

SEQ ID NO: 21683 - DNA, 704 bp, Arabidopsis thaliana landsberg
ataattcttttttttttttctttggtttttagaactagaacgagcatgcatgtaagtggaactagatacaactaaaatatgaatatcctcgagaataggtttttcgaaagaaaaaaaaacttctaaattgtccagttttgcaagtttaccatctaggaccaaaaactacaaaataattatataaaatttaaaataatacgcaatatagtccttttttataattttatatatattttaaagtttttacgatcacataaatatatttttaaaaattctgaagatataatgaaactcctcatctcaaaagctttaatttatcaaaaaatttaaatttgacaataacgaaaaagggttatattgcaaattgttttacactttataagattgttctgcattttttggacacgggaaataaaataacaaaaatgaatgagtttttttttttgtgcataaacccctcaaaaatacgattgaaagtactaatttatacaataaagaaaagaaaaaaaaaaacatttgtattgatgaaaatattctaacaacataacaccttatattaaaaaataaataaaaagaaaagaataaaaatcaactcttgtaattcattctgaggtacaatggagttttttttgttttttttttctttcacatggagttaaaagtcgaattaatcaaaccatcaacgttaaatagttttgattaaa

SEQ ID NO: 21684 - DNA, 3404 bp, Arabidopsis thaliana landsberg
acacacatagacaaaaaaaacttataaatactacttgttaatgcccttgtttctccaattattaatttagatccgagaaatgttacgtggaatatttttcatattagttactgctatttgttctacgaaaactgaagcttgcgagaaaaatgcaatagtaatcataaacgatctcggtcctggtagaattctccaatatcattgtcgctacacaaaaaaagacttaggagtccaacacctaaacttccatgctattaaaaccattcatcttcaggacgagggaaaaaatataacaaaatggcattgtctctttaagcaagggcttaacatgaggtatcgtaattacgtagaagcatacagtcaaaatacagaggctcctcaatgtggtcaagtacgtgtatggactgccagaatgagtgggatatggtttaaaataagttataataatccatctggaagatatatacgaggttggaagtattgaaaacgcgttctaatatttttgtaaaactgtttaaatttatataattcttcagctgcttatgacatgaacaaaagttataattcatgtcaattgttttcctaatatatatgtcatttgatatccatgtaattgaatacatatgataagagggaaaaaaaatcttttttaacacttttcctttttctcatcaaacgccacttttttagactgaaagtggagatcagggtgatgatgatgaaagtaaagaagaatctgagtttaggtagaagttgatggatgttgaactctactctactcgacgtgtcccaactatactaaagtgtctacaatcatggctctctaccacataaaagttaaaagtggtatatccaagaactaatttgatcagttcatgaaattggttcacgacatgttacatgcggataatgttcttccaaaatctgttcatgagatgaagaagctcttgaagctttttggttttagttataatttgattttcacatgattgcatcctttattgaaagatgtttgaggagtttgttagctgtccaagatatagtccttcgagatggaagtaagataagcatactagagaggaaaagaaggggttcccgcaaaggttcagaggtatttttcgatctaaggatagatttaggaggatatttagattaaaaaggattgcttaggagttgtgttggcatttcaacaatgctagtgtagacggtccaatgcgacacccagttgattcattgacttggtctcaaataaaagataagttttcaaagtattctactaaaccaaggaaccttcgactcggcttttttacagataggataaactcgttctctatgcagaaaaaagtattgtacatgatcgatgttgttagtcaactacaacatgttgccgactatgtgtatgaaggctgggaacatcatgatgactatgctcttccctagaccaactgcaccacacaacaacatagatgtgtatcttgcacctattatagatgatctaaatggtttgtggaaagaatgtatagaggtttatgattcttatatgaaggaaaattgcacacttagaactatattgttgtgggctattagtgattatcttgccttagggacactggttagatgtatggttaaagggaaataggagtgtaacatatctggtaaggacaaagggaaataggagtgtaacatatctggtaacgaaataaaactataaattgtgtaaatatatcacttaacaaatgctattagagggttacaggctggagaacagagtatgtaatattgtgtttagctacaagatttcgaagaccgcgtgatacaccacccgttattatatgtaattcaagacactttcacactttctggggtaattgaagaacgatacaatttgacttgtgttgaagtgaagaagaaagttgcattgaatcttataaaaatgacaaggatggtgtcattgacatcaagatacaaaggtaacgaaaataatttgatgaaggaagatactgagttgtttcaggaagttgaagccgttgaagatgaagaccaggactgatgaagacaatgatgatgagaatctacctttgattattgtgacgattctgatggaacagattctgatgacgggaattttagcttgtacgggtttccaccacaagaagaagaaaaacctaatttaccaatgaagaagatgagtttaagtatttttattgaagaaaaagaagatgatcattattcaaagttagaaatgtcttctttggatttggttggttgcaatgttatgaaacaaaatatcatttggagacacgattgaagacaacaattatagtataaaattttgattttatgttcataaatcgtcaccatttatattgtttttcaagtcttgtgttaaaaagtgaatgtggaggatatgagctacaccattaagcgactctccaaaattccatgtgtgtgtgtttgtcttggaacatacatgttcaatgacagacctttctgcacatgttcgacaagcaactgatgatatacttggtatgttccacaaaggttttagtaatccagagagagaattggtaaggggaagtccagagaatggatatgagaaaatacccatatacgtatacatgataaggagagaagatcatggaaccttaaatgcgacttgaagttgatacacacatagatgtaagtatttcgcagttaaataaatctagtctgaatcgtcgccatcttttgtgggagcattagattcaaagagagatggctagggtttagtagaaagatcgaaaaagataagacatgaattggaaaatatgtgagagagaaaaaaacttaagaaacgaaaaacctaaatcgagacttattatgttttttggtttttgtttcttaattttgtgttttttatttatttaattaaagaatcaaatttgtatataattttttataggtatggcataatggttataataagtttgattgaaggttaattagtgttttaacagaaaatttagtttactctagttatctatttcgattgacaatcattctagttattttttcaaagttttcagttaaactagataaacttcttaaacttataatatggttaagtttgggttttgtggtaaattttaatgtctaaggttagttcatttgatttattcttcatggttaagcatacatttcgaccctaaaatctcttctaaccaaaggcttaatttgttcatgtttttgtctaaacttagttaatattatataaagaaaaagcttcttacacacatagagaaaaaaaatttataaatactacttgttaatgcccttgtttctccaataattaatttagatccgagaaatgttacgtttaatatttttcatattagttactgctatttgttctacgaaaactgaag

SEQ ID NO: 21685 - DNA, 1153 bp, Arabidopsis thaliana landsberg
atttatgctctttaagctagaaatagagtcatggcatgtagacagttcacaagaaagcatttcattccttttaatttctaatgcaagagaattttgtgcctctacaaatttatcatgctcttcatacaaaagatcctcttgcttttctaacaacctattcttatcattcaaggcatcaattaattcattaatcttatcaaccttagttctatctaggcccttgaataaacatgaatagtctatttcatcatcatcactagactcatcctcacttgaaaaaaagtagtattatttcgagtacataccttcttctcctttgccatgaggcatgtgtgatgctcgtttgggaagaggaatgatttgttgaaggcagtggcggcgagtccttcgttgtcggagtcggacgaggagcaatccgaatcccactcctttccaagatgtgcctcgccctttgccttcttatagttcttcttcttttcccactttccactcttcttgtcctggtcactatcattatcggggcaattagcgataaaatgaccaatcttaccacatttgaagcaggagcgcttccccttcgtcttggtcttgttggatgctccttgcgaccccttagcgccgtcttgaaacgcttaatgatgaggccatctcttcctcattgagtcccgctgcctcaacttgtgccaccttgctaggtagcacttccttgctcctcgttgctttgagagcaacggtttgaggctcgtggattgggccgttcaacgcatcgtcaacatatcttgcctccttgatcatcatccgcccgcttacaaactttccaagtatatcctcgggcgtcatcttggtgtacctaggattctcacgaatattgttcacaagatgtggatcaaggacagtaaaagaccttagcattaggcggacgacgtcgtggtccgtccatcgcgtgcttccatagctccttattttgttgacgagggtcttgagccggttgtacgtttgggttggctcctcgcccctgatcattgcgaatctcccaagttcgccctccaccaactccatcttggtgagcatggtgatgtcgttcccctcatgtgagattttgagggtgtccctaaatctgcttggcattatccaagccgctcaccttatggta

SEQ ID NO: 21686 - DNA, 471 bp, Arabidopsis thaliana landsberg
tcttgagaagcctcaatgatccccgcgccagtcaccgagcttcggccctgtcgaggggtagctctccccggtggagatattgcaggtacggggtctgccaatttcgatcaggcgtgaccccattctgctcttccttgacacgcagtgcctcaccctcgggggctgagggtgcctcgggctgagccgagggcacctcgggctgagtcgagaccttctcgggctcgggcgtgtcgtcggtcttgactgagggttgatgtaggtctcgagagaagacgtccggaggaacgcgttgtccaccccgaggctattttagccagctcgtccgcagtctcgttgtatcgttgggcgatgtggttaagttcgagcccgtagaacttgtcctccaggcgtcgaacctcatcgcagtaggcttccatcttcgggtcacggtagtgggagttcttcgtgacttggtcgatgacaagctacgag

SEQ ID NO: 21687 - DNA, 1945 bp, Arabidopsis thaliana landsberg
  unsure (1)..(1945): unsure at all n locations
tggcatcgcttttttttattttttccatggagccaacaaattttaaaccgaaactaattcggtaattgtaattcctatgagtaaatttatgcagtgattaaaatgtgattaactatattggtcggatataaacagtacaattcgtcggtaaattatttaaaagttcagtatactttttggatgaacattaacgtctttaatccgtttatgtgttgttttattttatagtatgttgttaaatttaacttaacaaaatttaatgtgtttggaatctgttactagtatttaacaaggaaacacaatttgctggtgacagattttgctatctctaatcaactttagtcttgaagtagtgttacaacataaatggtcaatagagcttgtttaccaaatgtaaaacgaggagaatgacaacttgatagtggtaatttcttataaaaaaacacaattagaagaggtgtaagcaagtgtggcaactcttcttcccatatatatatgcaaatccaagcttgtacataaataattagagggacgaccttatatttcgacatacaaagatatgtttttatttttttaggcattagacgttaaagcaccacttgacattagaatacaacagagagaccaagtgcagtcgacaatgcatacaaaaaggcaggaagatcggaagttgatgcggctgtgaccagcttgtcgtcggtcacgcaccgttcagattccacgatctcaccaccagcaaccttcacagccacctttgtcccataactacttgcacatctcttcttctgcaatgtaataatatagcatgccacaatgggaattagatgagttataacaagctggcaaaaattataatctatgctaaggaagtggtgccataaatgtgatgaattatatcttactaaccttcaacaatatgctggaataatattagtcataaccataaccataggagattcctatgtgcttagagcaacttatcttgacatttttgtttcgtttaaattaaaatatggtttggttcggcttcagttttaacttttaagtctttagaatagtaaaacgaatttttgtaaaacggtgtatattaccttaagggcgcctgtggcggcaagtagccaatttcccattccaatggcagcaacaaacttgcctttctcaacaaactttctgaccaattcgacggccttggggttcatcaccaagagctccggagatcttcctccgggaaccacaatgcagtcgtaatcatccacagagacatcatcccacgcaacggtcacatagaagttgtgaccaaacttctcagtaggaagttgccgtccgtcttcaaggtcgtgtacgattgtagcgcatttctcacctctcttcttggttggcgtcactgcatccactttacatcccaaagcttgaaacgctttaaatggtacgttgatactataatcttcaacacaatcctaaatataccaaaattacgtattagtcagaccatttttttaattccaatatataaagtctaaaagagagtcttatgaaaataagctacttaccccaatcaagaaaagcaaagaagtctgatgattctctttagagctagaaatcttggagccaagtgattctaacaaaactttgagactatggccaagcgttggccaccccatagtggacatgaaactgccgtccttgacacaatcagtgatttcgaaaagggtctggactccaggctgttgccaccatgcgccgcnnnnnnnnnnnnnnnnnnnnnnnnnnntttcgaacgccgtgcacttcattccaccggtgagcagacctgccgccgcaagaaacagctggctgtggcagctcgtgaagatgagcttcttgagttcggcgaatctagcaacaagactcacgcatttctcgtcggcgctcaaaagttcggtgaacgtccaccgggaatgatgat

SEQ ID NO: 21688 - DNA, 151 bp, Arabidopsis thaliana landsberg
gggatgttcccgcaaccataccgcaatacttcttaccaaggtttatgcactgtttcacatccgaagggtcacactcggggacaagagtcacatgttcctgtgaatcaacccactgcacataaaaatctgttgttgccaagaagaagtttta

SEQ ID NO: 21689 - DNA, 517 bp, Arabidopsis thaliana landsberg
tgttaagacacttacctcaaaacctaaagtctctcaccaattctctcaaactcttttcttttcaataggattaccacaacttggtgtgtctatttatatgaaagctcctagtcattagataactcctaataacattagataactactaaatttagatatctcctaaatacaatcttatcctaaatctcttaggatttggttagtttatttctcaagctaacttcaagcttatcaacattcactctcttaagcttgaaatcacatttcgacaaatcttgaactccaactagctctctcatttctttgaatttgattcttccaagtgcctttgttagaagatccgtcttctgttcttctccgagaacgtgttccacttctatttggtcattctcaacacactcacgaatgaaatggtacctcttgtgaatgtgcatgctccggccgtgaaatattggattcttggcaagtgctatcaccgatttgttgtcaatgagcacctcaccttcttgcatgcttt

SEQ ID NO: 21690 - DNA, 793 bp, Arabidopsis thaliana landsberg
tcagaccagtaatttttgtgcaacttcacatgtatcatgtatctcgttctccacaaaaggaacatgtctttgtgcatttgatccacttaaggcttccttcctattattgcagctccattctgcaaattttccaataattgcatctatcatatataatagcgcataccccctcacatccctaaacacaccattcatagattcaaccgcattactagtgtcaacgttgtacttaactccaggaaaaagacatcttgcccatttttccaaatcagtgttttcatcaagatatgtggctaccttagggtgtcttcttctaaaatctgcatattcatgttcaaactcagacactgaacaaatggatgcaatttgtctgaactttttagcaacctcttctttgttgtatgaaactttcgttctcacattctgtgacaaatgataaacacagtttccatggtgagagcttgggtacacctcagccactgccttgatgaggctagaatttctgtcagacataaagaccaattccgaactgtctggtataatggttttgagagttttgaaaaaccacttccaagtaacatctttttcgccatcagctacagcaaacgctaagggataatggtgatgattcgggtcttgagatgtggcaaaaatgagcacacctttatatacagtcttcaaaaatgttgcatccacaataatcacttttctcatgactttaaatccttcaatggcagcccccaaagcaacaaataggtacttgaaccttttttcttcatcccccaccccccta

SEQ ID NO: 21691 - DNA, 462 bp, Arabidopsis thaliana landsberg
aaattagggtttgtttttgccgcacctataaataacaactttgcttcccatttgtaatttctagggttttgcaaaaccaacaccgaagatccaacacgatgggacgaagtaagtcgatcttctcttctcaccaacaatctcaattcgaattccttgagttcgattcgtcatttggtagaatcgtcttttgctttaatccgtgtgaagaaatagtctaagatttcaattatatcaatgcaaggtttttgtatatcaacgccattgattttatcatttcgaaatgtgaaatgttgaattgattcggttttcgtagaatcgtgtttcgtcaatctgtgattcatatgaaattgctaggcttaggattagtttgagattttgattatgtcaatctagggtttagtgtatgaatcgccattggtttgggttttggatttgtttgaggtcattttaggtttttttttt

SEQ ID NO: 21692 - DNA, 510 bp, Arabidopsis thaliana landsberg
caagatcgaggaacctctaaggacacatatatctccatgaaacgggaattttctgatataaaagacatgaagaacggtacagatagacaaacaactacctgttttggatttagctagagaaggctgtacaacaacatgcatcacaatgactccaccagcaatatctccaaatggtgtcttacactgcccaacagtcttgttgttctccaagatcttacccgagcttatcagcttcacttcgtttatcccctttggaacaactgttttgcctaaccaaaaccacaaaaaaattgatgcttggatcaacctcaaatcacacagacttggcttttctcatacatcaagcttataacatctcaaatgagctaataataattcatctacagctctaaatttcgaatttctaccgacaattgcaggattcagtgacaatcaacacgaaattcgtgggaagatcatgaataaaaccaggatcagattggggaaaaaggggcaccgattcaaaaaacc

SEQ ID NO: 21693 - DNA, 703 bp, Arabidopsis thaliana landsberg
tacccaagcttcatatccattccccatccatgaaccaaatcattctacagaaatcaaaacaaatatgtcagcaagtgaataaattacttcaggatcagattactaacttatacaagtaatcaagtgaaaattacctgtataagattccaagtgcaaagccaagcagctttcgaaaacaccggagccattccttcaacaaatctacaaacagagaaaacagaacaaaatgtatcaatatatatagccaacaattcaaagaaattaattcatcgccgaccaaaccattacccggtgcaaggaggatctgagctagtattagaacatcttttatggcctctattgatgtaaactctcctgtgtttttaggcatcatgatgtaaattagtaccaaatgcattgaaaaccaaaaaaagttcctaatgaacaaaatttaacctatgaaatttctttgttttagagcggagagtgattttatggtgtatttcagtcgagttgtggtccaaagccggttgagatatctccagtcccactgatttaactatcttcaaatatctgcagaaaaaatagtgtcacttagtgctctatcactcatgattccttttagttgaaagagtgagaagattaaacctttctggattgaaattatttactccaagatccttgtgccaaagagaaatataatcataagtggatacaacatccg

SEQ ID NO: 21694 - DNA, 1061 bp, Arabidopsis thaliana landsberg
ccgcctatactaaaagaaacagccactctagcgtttggtagaccagtgggtaatgttaactcgccaaaacgatacacctcaccggatgttacaagaacgaggcctaaaggacgctctgcttctccttctctgattccgactttttcaggcacctcacatacaacaacaactcccaagtctataaagccatcaagcactgttgcggattcaactaggccaggaaggaagttgtcaagagcttctgttcaaatggctatcaatcacttggtaataacgttctcttgtcattatttgattatagctaaatatttttgtcatttataacgtttatcgtggtcaatagtatagaaacgttttttatgaggttttgcttgacgataatagtgtcacttcaaatgcaggacttggcacgaaatggtaaagttagtacacatacgttttcaagcccaatgttgtatccacacagcatcagatcttcttcttcgggtctaagaaaaccgtgtggtagtagtgaaggcagctgcagcagcagcaaccatgaagaggaagatggaagaagcttaacgaaagaacagaacaacacagagaacaagaacgatagctgaggaagatggtcagattctagctaagacagaaagtctctctttcttggaaacatctgctcttgaagccaccaatgtcgagaaagcattttaaactgttttagcaaagatttaccacatcatcagcaaaaaaagctttggctgctgaagctttgataatttttatttgtaagaattattaagttatatcaaattataattatatcaaaaatatttttttattttttaagaaactcatttaaagattctaccattggacattaaaaactgtaaggattcatcaacaatcctaaactataaaattatcaaaatttagtattataaaatgttaaggattctttttaagaaactaaccaatggacatgctctaacacaccacctttaaaccataaagagagagaggccaaagagagaaaagaggattgatacgtcacccttgaaatctctatttgcattaat

SEQ ID NO: 21695 - DNA, 903 bp, Arabidopsis thaliana landsberg
tgatgtactcgaagaagaacggctgaacacgataattcaatcagcacggtaccaacaaactctaaggcgctatcacaataagaccatgcgacgtcgatccttcgcagttggagatctcgtcacgtgggagggacggcacaagttgtcacctctatgggaaggaccattcatagtagcagaagtcactcggccgggatcatatcgtctcactcagatggacagcacggaaattgggaactcatggaacatagaacacctcagaaagttttatccctagctgtatttcaaaaagctattgggacgacaatgtattttgtaaactaggaaatatatcatcaataaaaaggcctcaagaatactcaaattgttcatggtcgacctgcactcttacttaactcggggtgaccactatgccctactaacggagcaatcgacttaagtcagcaacgacttaaggcggtgcaacatgctcacgcttacttaactcagggtgaccactatgccctactaacggagcaatcgacttaagtcggtgacaacttagggcggtgcaacatgctcacgcttacttaactcggggtgaccactatgccctactaacggagcaatcgacttaagtctgcgacgacttagggcggtgcaacatgctcacgcttacttaacttggggtgacactacgccctactaatggagcaatcggctaaagtcagtggcgactaaagccggtgcaacatgctcatgcctatgcaattcaggggatgacttctatatcccgcgatcgaatttcataatcatcgtgcgtcgtttcattactgcaaattgacgaactgatgaattctgatacaataagagagtacttatatcattcgaatgctgaactgatcgcctcgagcaaatactcga

SEQ ID NO: 21696 - DNA, 2013 bp, Arabidopsis thaliana landsberg
  unsure (1)..(2013): unsure at all n locations
tgctttcttctgtttatgacgttacacgtttttttatggcgggtgttgagcaaattaacttaaacaaatttgttttattatccatacctcaataaaaattgcgatttctagttataaacaaaaggctgtacatagcatctacggtaattattaactattaagtaaacatgggtnnnnnnnnnnnnnnnnnnnnnnnnnnnnnnnnnnnnnnnnnnnnnnnnnnngaaagtccgtgagaacatgaacccaagttaatacaccttcacatgattagccccacttctcctaaatgtctcgtaaactccaactattcggctaagattcactaacgtgtcatctctctattcgctattcccagatctccatgacccacttcactccctgcgcgtccggtacaatcgccacttccataacaccaagagtcaatacaaaaaaaaagccgactccattattatccctctctctacaaaaaaaaacagtagagagagatatagagagcatcaatggcgtcgtcgtcaagactttgcgattcgtgcaaatcgacggcagcaactctattctgccgcgcagacgccgcgtttctctgcggcgactgcgacggtaagatccacacagctaacaaactcgcatcacgtcacgaacgagtttggctatgtgaagtatgcgaacaagcaccagcacacgtcacgtgcgaacgtgacgccgctgcgttatgcgtcacgtgcgaccgtgatatccactcagctaatccactctctcgccgccacgagcgcgtaccaatcactcctttctacgacgctgtaggtccagcaaaatccgcttcctcctccgtcaatttcgtagatgaagatggcggtgacgtcactgcttcgtggcttttagctaaagaaggaatcgaaatcactaatttgttttccgatcttgattatccgaagattgaggtcacgtcggaggagaatagctccggtaacgacggagttgttcctgtgcagaataagttgtttctcaatgaagattacttcaatttcgatctctctgcttccaaagtttctcaacaaggattcaatttcatcaaccaaactgtacgaatctctctctatcttcttaagcttccatggatctggaaaattttcagatctagatctgaaagtttggatctgatttgagtttgtgaaatgttgttaggtttcgacgagaacgatagatgtaccgttggtgcctgaaagtggaggagtgacggcggagatgacgaacacggagacgccagctgtgcagttatcaccggcggagagggaagcaagggttttgaggtatagagagaagaggaagaatcggaaatttgagaagacgattaggtatgcgtcgcgtaaagcttacgctgagatgaggccgagaatcaaaggacgttttgctaagagaacagattcgagagagaatgatggtggagacgtcggagtttatggcggattcggtgttgttccgagtttctgatattttccggtgaaagaaacatggtagtagtatatcggttaatagcagattaaggataattaaaactaaaatgtttcctgattttattcaggggctaagttattgttagaagattgttgttttttgaattaattctcacaattgtatcccaaattatatagtttacttaattttgaactaataaattttgatttactatctctgtaagaaatcgatatgcaaaaataaatgagttgagctattaagattaacattcatatagaacacaaactcatacaatcagctgtggtggtgtccgagactgcaaaattcaagaggcgatggaggccaacgttgatggtgaacgaggccagattcgagaagcaaaagcttgccacatagctgaagagaaagagcattcatagaagaggtggttcatggttgtgggtttcgatatcgttagagcgaagcacacaagctgcagagatattcagtcccccacttacgtgcctgtctttggtacgcaatctaccaatcaaaaca

SEQ ID NO: 21697 - DNA, 661 bp, Arabidopsis thaliana landsberg
  unsure (1)..(661): unsure at all n locations
aagagcaaccagatatcgaatcaaaactccatctgaagaacccacatatgagaataacatacttgaatagcctactaagcttgactgagattctgagccagtcccctgagaacatttccaatgatgatttggccaacgcatattctacgctatcttatgtgacaaaagccgggtttaagttagattggttggagaagaaactgaaagatgttggtgagactcgtattcaagaaattcgggaagagttgaaagacatgaagcataagtgtgtagacatggaggctcttctggagttcttactatgaatgttgtttgatgcttgagttgctatgaatggtgttttggtctcttttgttttcgttttagttttggaatagaatcctcttaatcttcgataagtaaaagagacttgttatttatgttgccctaattttctttatttcaactctgcttcttgatggaaaaggaatttaaaaatgtctttcttgtctcaatcagtgctgatgatacgtatgtgcccttatcaataaagagtcatatcaagcttttttgatagatctgtccttaacatttttgtttgactgccgttttataaaatatctgctgggcttctgacgatgaggatgactngagtagatggtagccgtaaagctttggacta

SEQ ID NO: 21698 - DNA, 521 bp, Arabidopsis thaliana landsberg
  unsure (1)..(521): unsure at all n locations
taccgggcgatctcagagcggttaaggaaacgctattatttaaatttaatagcggttaacgcccgctatcggtaggcacattttctgtagtgactgctatattgcatgcaaaaatatcatcgacgtcgaatatgctttcggtttcattttattccagacatggtataattaataaagatttcttcattatctttctcattatcattctcatgatcaggtacttgaatctcttcattattcatgtctaatgtctctaacttcctcggtctggccattattaatttctactccttttcttttacgaggattcttgtctttggaaccgattggtctaccacgcttcatgcgtgctctagacttactagcagtttgatattgtccttctgggacatcaattttaattggagcattttcatctggaatatgtgacttggtcactctgttcaagtcagtaaatgattctggaaacatattggcttatatctgtaaatatattatctttngaactgctaagtcatatt

SEQ ID NO: 21699 - DNA, 1146 bp, Arabidopsis thaliana landsberg
aatcagctcatggacagctcgctttctgtcttatgcaggacggctagcgctcatcaattctgtcatagtaagcatggtaaatttctggatgtcagcttatcgtctaccaacaggttgcattcgggagattgagaggctctgctctgctttcttgtggtccggacctgatcttaaccccaagaaagcaaagttagcatggacttcaatctgtcaaccaaagcgagagggagggctgggaattaaatcactttcagaagcaaataaagtcagttgtttaaagttgatttggagacttatctctcgtcaatcttcattgtgggtgacttggatgtggactcacgtactacgtacgggctctttttggtctgctaatgaaaggtccagcttgggatcttggatgtggaaaaagctgcttaagtatagagatttggccaaaactatgcataaagtggatgtcaaaagcggtatctccacctctttttggtatgaccactggtctcagctgggaagactcttcgatgcaacgaatcctcgtcgggtcatagacatgggaatcccgcttgaagcaactttggattctgtcttgcaaactcatcgcagtcgtagacaccgtgttgaaatctacaacaacattgaagctgaaattcagagattacaacaacaggaacgagaagctggtccggacgtatcactttggagatcttcgagaaatgagttcagaaaacagttcgtcaccaaaattacttggaacaatgtccgaatgcctaagccacaaatgaactggtataagggtgtatggttcccctactctacgcccaagtactcttttcttttgtggctcacaattcataatagactcccaacaggggatcgcatcaaaacatggagctccggccaacaagtcgcttgcaccctctgtggcaatgatgaggactcacgaaatcatctctttttctcttgccaattctctgctggaatttgggagaacatgactcaacgcctcttgtctatggattactcaacggactggcaccatctacttactctgctctgcaactcaaccatgccaaaggacttactcttcctgttccggtatgcctttcaagccacaatctaccacatttggcgagagaggaatgctagacg

SEQ ID NO: 21700 - DNA, 477 bp, Arabidopsis thaliana landsberg
  unsure (1)..(477): unsure at all n locations
catgaccgatgcctaaaaatggaagccaaagtgggactattgtaaatcctacgtttaatgaattagaatgttgaattattttttcagatttttatacatatgaattgttgctttcaatgttcccttaaccaatgaaagtaaagatgctcaaaggctaaatatgaagaagataagttttatttctcttgattattctccttagggtttaaggttacatcatgtttccttttataggcattacaatcttagtgacactagggttttcactgacacatatcaaatctctattgatcctaaaaagtcaaaacggttttgtaaaaccactccttcttttccagcacagctccttgtttttgtcctttgatccaatcttgatgtgcttttggttttgtcttcttttgcnggggaagacaattggaactgngngttgtttagggtctgcgcttgggcctgttgtttattgggcttaggtaactg

SEQ ID NO: 21701 - DNA, 712 bp, Arabidopsis thaliana landsberg
ttagttaaattataagaaggatggattagttaaccggttttccggtttggttaagtgataaaaccgagactttgtgttaaaaaggagactccctgaaggccagaaaagagcaaaaaaaaaaaaaaaaggaaccacctttgaatttttgcaattctctctgatttctccaccaccaaagtgattatatagttatgaatattgaacacaattgcttacatgccgtatacaatgcattatctgctgctactgtcaaaacagctctactcgttatgaatattgaacacaaccccagccttgttcgtgcccgggggagtcatatttgtacccgaccccaaagagaaaggaagctcaaatgttaggttgggccaatcatgtgtcttcacatcctctaatatccataaatcaaaactttggaaaatcatgttttgtttgttattctccttaacattgttggacataaattaaaaactcatttgaatcaaaacgtaagatatctcttttcgaaacaatggaaaactaatagatatctaacatagtatttattcaatttattaattactacaccagtgatctttattacagtttcataccatgatattaccatcaattatttatagatgatcaacggtgatatatagagatagataatacattaaagtagatagtttaatatttcattacagttttagacttgatgccgtcaacgtatata

SEQ ID NO: 21702 - DNA, 516 bp, Arabidopsis thaliana landsberg
  unsure (1)..(516): unsure at all n locations
cgccccacagcgggaggctcaggcggcaccagttgccgtggagcgagttcccgaggccggctcttctgttgaggcggcgtcgcgctgggggaggtggctggcgcggacgtggcctcgggccaccaaacatgccgccgcgctggcgtngacgtgccgaagccgttgccgtcctggccatggagcaacccgtcgccgccgacgctgagatggccgaggcgtcactactcggtgcctcagaggaggggggcgtggaactgcgacccgtcccgccgagcgcaaccttttccctacgcggcggagtctcaaggggcggcgcacgttgctccggttccggacccgtgaggcttcggatcccttcttcgttcttgacgatgagcgggaggagcagtcttgggacgagctcgcgagtgtgccgaggaacagtggggtcgtccggtcaccttggaggtcttttgcagggacgtcccaagatctctaggtaatgacttaggccaccttttttatgataaggcgtct

SEQ ID NO: 21703 - DNA, 206 bp, Arabidopsis thaliana landsberg
tgactgacctgctgcagtagaggtctcggtattgatcttaagaaacgagggatgagacactgaagcagatgcgctggagacggctagagtgtttcgagccgcggtcaccatggctgacagatcaccagcacgagcaggagccctggcgttggctcgttgaacacgaagacttggacgcctcatgcttgctaatgagagtggtagtg

SEQ ID NO: 21704 - DNA, 674 bp, Arabidopsis thaliana landsberg
gccaagttattttgaccgttttcaattgtcgttatcttctctatataatccaccatcatattacatcgaaaaatatacattacattataaatatggcaactccaaccaacaaagagcatttctcgggtggacttgcaaaggttttggcagaaaaatggcaagttgacgtaatgctcaaggcaaagaatagtgatgaaggtttagttatctctgcccacaaagttattcaggtctcttcttttttcatcttctctttattgatatcatcatcttattcaagaatcaattaaatttagaaatgctaatgtttagtgagtgttccttttatgtgaagtttttttttttttgggttggtgtggttattgtaatgattctcttaacaagtatgtttggaatttgaataggcatcaagatcggcggttttgaagaagatgctagaatcagacgagttcaagacttcggctaagcaggtgggaacaatcactctcttagagatgaaacaagaagagctagaagcttttgttgagtttctatatagtgatggttctatgctttcttcgaaagtgaagcaacatgctcgggcactctatcgtgcggctgacaaatactagattctccgactactagagctatgcagatctgagcttatatcttctctgaattcgacgaattct

SEQ ID NO: 21705 - DNA, 524 bp, Arabidopsis thaliana landsberg
ggtaacgacttataattggtgtaaaagccttcatgctatcaaatgcttttctaaacttcaatgctctagcgagcatttcatatgtagagttccatctggttggaacatcaagagataaccctgccccactccttattcccactctctctacacaggctgcaaatgcctctttcctctgtggagatgctttaacatataaaacactttctcgaatgttgtgtaaaacatccttagctaactctaaacctttcttgacaatgatgttaagaatatgagcacaacatctaatgtgcagaaatttcccatcacataacaaaccactgccactaatcatctgaagctgacccttgaggattttcaccatactattattattggtagcattgtctagagtcatagaaagtaccttttttttttagtcccattcctttaaacaatcaagaatcctattagcaatatgttcaccagggtgcggagacttcaactcacaaaaatctagaatttatttgtttaaatgccacctt

SEQ ID NO: 21706 - DNA, 559 bp, Arabidopsis thaliana landsberg
  unsure (1)..(559): unsure at all n locations
attccttctaaagcgttcttcttgaaggcttcttgaagtaattcctagagatttcaggaactgatcttataatgtctatcaatcnnnnnnnnnnnnnnnnnnnnntatctagtaaagctctaatgcttcttgaaaatctcctctttcgtttagacggtgacgataccacaaatgttcggaaactctggcactgatgatgattaagatggacgaaactgttcaagttggtggagatgaaactcaaagaatgtgccatcctgaaaacaagatggacgaacgaaacctataagaaattctactcttttccattgccatagtttcttcgtttccaacctaactttattctcttcaacctaattcaaatcttacacggaatcatcaacagaagctaattgaaatatctatctattcttcaaaaaaacaagaccttcaagtaatcaaaatcaaaatgcaaaaataacatcccccagatattagggtttcagtgtctaagacagtgaatttcgattcccaatctatagaatcgagaaaaaccttggaatggagttaccagcaaaag

SEQ ID NO: 21707 - DNA, 2460 bp, Arabidopsis thaliana landsberg
tattagcatcctcgacattgagctacccgttctggattggggtgctttgtttttgaatccccaccttcaaacctctccttcaacttaagatttgttgttttcttgaggacaagcaagagataagtttctgggagttgataacattgtattttactcattttaggtgtgtgtttatcatcatttagctttgcatctgctcattgtatcatatcattttgcaccattttagcttattttgcacacttaggcatttaggatcatcttgcatacatattgcatgttttggtatgttttcaggtgcagaaggagcttaaaaggattctactcgaccctctactctatccaaccaagagggaagcatcagagcattctactcgatccattcactcgatctaggcaggtacagaggaggcagcaattcactcgatccacttactagatcaaggcagcctcagaagaagcagcagatcgatttactctcccctcctacctgatcctctactcgacccatttactcgaccaagggtgaccaactctaccagacttgttgatctcgtcttcggatcctcctcattccccactcaaccagacatctgagcatacggataggagaggaaaaagcatctactcgaccaattgatcactcggagcatacacacaaaggcgcagactttgcagcactctctttactcaatccccaagatcaagcactcgcccaaaccgcctcaagtcccttgtcttatagtgaatctagaattttcaacattttactataaatagatcacttcgggatttgtccaaaggatctagcttttatcctttagtttttctttctgttcttgaatcttcaaaacttaattactcttaatttattttgttttcccttttagttctttaagtaaagttttttagcttgtttagatctacattttgctatgatttcagtaatttctgggtttgtgttcttagttatgttgcttgagtagtgattagtgttcttgatgatggattagattagggtaatctctaggatagtcaggtagttaagatttggttagatcccttctggattcgttggcccctatgcggatttcgctggctcatgtggagaattaatcatagacgtccaacgtctaaaagacgttcaaatggatgtctgatctacgaattcgagagatttgtagacttgatcaagagattggctagtatgcttattggctttggtagattattgcttaaaccctgctctgctatgtttcaacaacgagagttgtgattaggaagtggtagagttatgggggtctctgtcacgagagtggattgaccctgtttttgaatctatcgtctagggtatctatctttcacctgttagcctctttatgaaccctacagttgcccttatcaatgaattcatccttaggacctctattgttcttagatttattggtattcaccccctgattgaacttttatttacctgttatttgtatcccctcttgattgtattttagttcttaatattgtcaccttttggttctactcgacccaatgatcgagtagggcttttaagttcttatttttgttgtttgaatcctgacctatgattgttactagaaaccaaccatttctataatgcggcttgacttaggcgcttgtatacacatctcgattgctagcaataacagtagactggattgacaccccctatagctacattgacgcgttagtgtttaagggaaattgaactgaacacaccacacttcagcacataagtaggcctgaaaaacctacttattaaaccaaaaaggcatataacgggagtatccctaccaaacgctacaccgtcgtgtagacaactcggccacggtagctaaccccgtctctccgatcccttcgcactaagtggcgatcaagtaacaacgttaacaaaaccccacaacaacacaattcactatgaaggtcagacataccacgatcttgatacgcttatggtctctgcctcctaccacgagcaccacgcatctagacccaacatttcaagatattatgagacatatggttactcaaacacataaaattatcaatatccttactcaacgcaacctcccaactataagccttaagcataagaatctaaaagatctcatatgcggctcattaccaccattcacactattaactaatactcatatgattcacgaaataaatcaatgaatgcaagagcatatgatcatgcaactaaaaaatcaatcaatcacccaaataaacacccaaacttagtcctcttaggaaccttcataccatcatagcttcatcatcccttccgttgtacaaatatctccaaagtcttgtaaaaatttgctcctacgcaaaggcaatcttttgcccttgttccaaactcataaactgcaactccagacgatcacgtgcctctggtggaaaattcttagactcaaactc

SEQ ID NO: 21708 - DNA, 1101 bp, Arabidopsis thaliana landsberg
tctactactatttttagcatcatcttagaacaaataaaggtagatggtttctcactaaaggcctagtcactttatattctctccagtctctgcatatatacgtcatataatagcttagcatataattgcttagcttctatggcggattcttcatatatacgtgtcgagagtatagagatcaagagcatcttagaggtacatgacagagtaccaattcatcaagtgactagcgctttctacgaaatggtgttgaggacaatccaaaatctaaaagaaatcaagaaagatcaaatcccaaggttaatgtaaatgcattcgcaatacgagcataagaggacacagggtcgcgacagggaattcaagagtcacatgaattcatagagaaactatggaacttaagtaatactggatattgcatacaacggcaggccaacgaagacttcatctattacaaatcaatgatcttttcaatatagaaagatcttcattaacaagatgtttaaaaaaaaagaaaaaaaaaattaaaaatgaaacttcaaatattaaactgcaaaaagtgatctttagttatcatacttctaccaactatttcttgaaagcaaatgcagtattgaaaagagactaatcttgtagttgcactaaacttggaacataagaagagcacacaagtatgccttgttgccactgggagttcgagattactccaattttgacagatttgaagtatccataatctccaatgatgtaagccacttggtaacaaccggtctcggtccctttattataaaaaaacacagcgactttcttctcctcatcaatgaagaagctcctaggttcatagaaagttgaaaaaagatccggtaaaccattgattagtgacgtatccactgtcaaaaaagtgctccacgataccgtgttgggttcaatcttagtcgaaatccaaatctctataatctcacgtgtgtcgtagtggttatatacacagccagcttctcatctctagcccaagatagagtcaaatagtcaaaattaggagagggagggttaacggcagagacaaaaacggccaaatctctcggttgtaaatcaaacatagtaaat

SEQ ID NO: 21709 - DNA, 1109 bp, Arabidopsis thaliana landsberg
ttcccattgaaacgaatctatggttggtagtgaatctccagtccaggacagagttaggttctcatacacttaatagagatgtatgggcgaacgacgcggtttcgagaaccattgagtcccacttcatcgtatggcaggtctatgatgatacgaacgaaggtcagaaaatctctagtttctacaagatcgaatctgctcctcctgtggtgtttgtaatcaatcccatcactggccagaagatgcatatgtggagcggcttgattgaagctgagagtattgtcgaggatttgatgatgttttgggacgctggtcctcacgaaaacattgcttctctgacaaggaacaggcgcacggaaactacagagacttgtttgtcaagctacaacatctacgaaacccctgctccttcctggggtgaagagtttgaagaggaggataattggtcgtcaagaagcaacaataatcaagtcgtggctcctacttgggagaaagaacttgaagaacaagacgagtgggagatctggtcgtcacgcagtgacactgatgagtttgtgcctccttttatgggggacgaatatgaagatcctgatgaagtaaaggaggaggagacttgtttagtgttcccggttttgacagaagagccaaagggagactgtgatcgaagcggtgtgtgtagtctctgcgttcgatttccagatgggagaagaaaacagaggaagtttctcaagaccgaaccgattcagcttctttggtccttctgttattctcacatggatgaatctgagaaaaaggcattcaagctggtgcaggcgattcccggtgcttcaaagactctagattatgaagctgaggccacgttcgaccaatctgggctcgcttattcgctgatctcggttacttgggaatgaagctttcaaggtttaggttaacctgtaaccaaaaataggggtttgagtttatcaaatttggtgttgacttagttccttctttatttcatcgtagtgcattgtgaagaaaacaagtacctttctagtattatatatattcttttgtggttcgaatatcatgttcaaatatgcgattagatcaacacacatcactcttctaaa

SEQ ID NO: 21710 - DNA, 595 bp, Arabidopsis thaliana landsberg
gatgttttattggtttctaaaataatcttatttcaccaattaaaactgctttgaattattcattttgtcatccacaattaatgaaaaaatggtttcggttttgtaaatgcataatgtatcctccaaaaggttttcttgagatgttcctactcgttggaattcaacatatgatatgcttgttgattctattggttataaagatttattgtgtagttttatttaataaaattacagttctttaactttatggcccactcattaggatgcttgtaatgcacttttaaagttattaaaatgttttagtgatgcaacgtttttattatccagtgtttattatcatactagtcatttacttttatatgaatgtgttcatattgctgatgtgatgcatgaacatgaaaataatattgttttgtcatcatgcataactagtatgagagataaatggttaaaatactatagataaatcccacctcttaatttgcttgcatctgtttttgatcttcgaactaaatttgatagtttatatgattacttcgtcgcatattataatctattacatttgtctgatagtattaatgttccaaacattatt

SEQ ID NO: 21711 - DNA, 794 bp, Arabidopsis thaliana landsberg
gttgtgtgtgtgcttatatatatgcagtgtgctcttgggaatatagagtttgtggatatccttaaggtgatccggatggattatacaatgctatgcgatgttaaaaccggaggctgtggaataacaaaccttgttcatcacatcttaagtaaatgtccacctgtcttcataatcggtaaattaagaccaccatgtttgtgatgttttgttttcatttcatttattatgcttatgataaagccaatgctggtgttttgtgggtttgcaacattagtgttagaatgggagaagagtgaaactgaaaaacaaatatcagaaacaacaaaggctttatactgggagatagatatcagcaggatgtacgaaggattgaaaccaaacactaagtaccggcttgtgtcaatggtaaatcatctaaaacagtgtcacaaatgtgttggttattgttcttgtgtgttatttgttacagtcttagagtttgggatgtgatgcaggttggttgtggtgtagaagaagaagaacacatttgtgtatcttatgaaaataatcggtggttcaatctcagacatgatgctttaacaagagaggtaagacgaaccaactgagtttgtctctccttgattcgagatatgaatttagataggccaaaataggagtgatgcatttctggtaatgccataggaagttcgtaactggaaaagtgtggatggattctgtgaagagagaaaggatcggccagatattctgttttatgaagctaccagctcgatcgattttctaaactaaaaagtgac

SEQ ID NO: 21712 - DNA, 649 bp, Arabidopsis thaliana landsberg
  unsure (1)..(649): unsure at all n locations
cgtttagggtaagaacattacgtcacacgtttattttaatattattttatcatcgccctctttgtaatttcgacttctcttcttcgtcagatctgaatcttaatttcccccaaatcaaagcttttgacctaaatccgtttcccgggaaaaataaatcaacaaaccatcaccgnnnnnnnnnnnnnnnnnnnnnngaagaaaaaatgtcgcacaacgatacgattccgctttatcaatcatctcaatcagacattgacgagattgagaatatgatgaacgacagttttcaatcaggtcccggaaccgtgcttcctgctcgaccaccgagtccgatccgtccgtcgattcccgtttcatcctcaccgttcgttcaatccaatctcccaccgcttccaccgtcgtcttcctcctccactcagaaggtgatgcctgttccagctcctccaccgcttccgtcagcaggtaacgaaggtaacaagagtattggaggtagcggattcggatctccgccaaatacattgacggagcctgtttgggatactgtgaagcgagatctgtcacggatcgtgagtaatttgaagcttgtggtgttcgtaatcagtatagggaagatcctggganagcacttagggattgggactatggggac

SEQ ID NO: 21713 - DNA, 590 bp, Arabidopsis thaliana landsberg
tatggatttggattcccagccagatccgttaatgaagcttatatctctcatttctcaaaaggtctcactcgtcaactctacggatcttatttcggagcaggacacggattcagcgccagacttggagattttcatgttactcattcaagaatcatttagtctaacaccggagccagagcttatatcactcatcaatcaaataatttcccacgtcgtctttcggcagcgacagtcggagtcaatgcctgatttggaggcggactagagccggagccagattcagagccagagtcggagccggagattgatctggagatgaatctcatatctctcattactcaactaatctctcaacctataactttatctctgaagatatatctcattcctcaaataatctcaatggtcagtaaaatggattttgatttgcagccggagacggaatttgtgtcactcattactcaagcagtctcgctcttcaagtctatggatttggattccagccggatccgttaaggatctcatacgctcatttctgaagaattctcatccaaactatccggttttgaacggaacaggactgaattgaa

SEQ ID NO: 21714 - DNA, 607 bp, Arabidopsis thaliana landsberg
gaagaagaaagcttccaagcaaaaggtcggcacgccgatggacgaacagcaacctggtcgacctccagaggagatgccagattccagtgggggttactatgatactcccaagaccgctgttgcatcctgagaacgtgccagccggatggtgctgcgcttacgccaatttctttgagaaatatggcttatttttcccgattccgacgtgcatcctcgagatgctcttttgccttggcctcgcctttctttagatgtgcccgaacttcgtccgccatgtactggcattatttaccctggcccggaaataaacagagaattcggctgccatgacctgcttcagcattttcaggtcaagaccaacgctaggagcgaccaagggacgttctacatcagcgctcgtcccggatctctagtcctaggcggtttaaaggcctgtcaggacaccaattggcgatccaagtacttcttctttagagtagatcgtcattcaatcggcaattttgatctcgcgaggatgaggaggactggtctccaacctgggtcagatggagactgagctcttgattctatattttgagtgtcttcgaatcgttgactgcttttgttg

SEQ ID NO: 21715 - DNA, 662 bp, Arabidopsis thaliana landsberg
ctgcgactgtattgatgagctgagaccaatcacttgtatactcccgcttgaacaaacctctagcgagcctgtcgagataaccaaagtaaaagtgcaagagaagaagagatgatctctagattcaatgcagtttttgcagaaatagcagacccctgttgcgtccctgttccatcttagtatcttagcgcctgtagcaagcctatcatgaaccgccagccatacacaaaaggagtatttcagtgtttcatgagaaaagcatactcctttctaccatgtcgctgtattagatgtagttatttaagataattaatcaatatttagatttaaaaaactaatctaggtaacattagaaagttaatttcacttcaaaaaaatagattaaccatcaacattttacgacaaaatgttttcgtaaacttatgtccattttacaaggcatttaggaggaatataaaatacaacgttcattcgtcgtaaattagtgatagaaatattttaacttaaatcatcctaaattactgtttagattaacgacaaatatattgcttcagttttattcattgtaaagtcaacagaaattagcgatttatatacaaggtttgatttttaatagaaaaagacgaaaagtaacttaagtcaacacaatttatttaaaaattact

SEQ ID NO: 21716 - DNA, 730 bp, Arabidopsis thaliana landsberg
  unsure (1)..(730): unsure at all n locations
attttacttttgcttaaaaaaaaatagatatagatatataaattagtatatgtaaattgtttttttagtgttatattctttaagaaaaaagaagttaatctatttatgtcaacatctgatcgatagacttgacacatggcacaatcttatgagttactcattttcaaaatcatactttttataataagatttgaaaaaggaaaacaaataaattagataataagataaaaatatgattgaaattaattagataatatttgatagatttcttataaaaatagctgcatggagtataaagaaaatctaaaatgttgtaaattatttatttgcagtaatattttagtatcgatttttatgattatgtccctaatttaaataccttctagatccgtcaataaccatgaactggtaaggttgactaaataaattttacgggatttctttccactattattgtttactttcttcttataacggattttctacctttctttttagtttacttgtaattctttttttgacaaatacagctttccttttcttctaaagaatcaatagatgagtttctttgactttgaccttgttcagtgattttccttttgtttggttcaatattttatctccaaacaaatcatatttctgaattaaccatttatccgtttggaatgactaaacttataaaattntatggattttcatatcttttatttattagtataagtcagtttct

SEQ ID NO: 21717 - DNA, 800 bp, Arabidopsis thaliana landsberg
tatatttcaatttttttagatatatatatatatatatatatatatatttaatacatttatataattattaatttataatattaatgaaatcatatatttataaaaaaatattatcttattaatttatcgatttgtgtcatttgatctcaattcagaataaaattttttttattaatttataaaacttattaatttatcaatgttttacaataaaccgttgaacacataaaagaaaagtcaaagttttctgccaaaatcttcttgaagattacgatctaattaattacaaagatactaaagatttcttcatataatatcatcgataatattaccaagtcattgacttgagctacaaactctcttccccttctttgtttgtattggttatttgcagaaatgttgatgttcactataccgcagtttttcttcgcagcatgggtcatggttgtatcactacaaatgcaagggtatataagttgcatcgagaaggagaggaagggattgttggagctcaaggcttatgtgaacaaggaatattcatatgattggtctaatgacacgaagagtgattgttgccgatgggaaagagtggagtgtgatcgtacaagtggacgtgtgatcggcctcttcttgaatcaaacattcagtgatccaatcctgataaatctttccttgtttcacccctttgaagaattgccgactttaaacttatatgatttcggatgcacaggctggttcgatgaaatccatggtatatctttcaataattccatttattattcttttttgcttaaattttt

SEQ ID NO: 21718 - DNA, 1043 bp, Arabidopsis thaliana landsberg
aacctgggatttgagttctgaaaattcaatttcgaatcagatttcttagatctaattttctctgacaaatcaggtatgagcaagatatatgcacatacataccaaggttcttggatggtgaatcattggtaaagctgggagcaccgatcaaatggttctataggattgcaatggaggacactgtttgcaggttcgcacgcttgcgtgatcttcaggtccctgagacgtttccagtttcttccacctggattaagatttatgcttcagcgtttggtaagtttcacatgacttatgatacattctgaaacaatggtaaactcacaacacgatatggatgaatgcagatgggagtcactctcacttgttcccccagaagcagaagcatattggttagtccatgaattggattcatcatactctcttagtctcatgttaaatatagatgttgtacagatctttatatggttttgacactgtgattatagattggatgcgtcttggtgcctttgttcttgactctcgaacttcattcctgactgagagtttgagtggtcgtctgaaagtcccaacagaaggaactatagaacaaatgttacaatccagtggttcatgtcttatcaacgacatcaaaagcggtatttggattgcaggtacgaaaattttcttatacatcatcatcttcagaaactttgtcagctgcaggaagaaactgtaacgtggcttatctcatttttcagatttacagcttttgcgttgccctctttgtgacctcagtacctgtgatggtaaaagacactatctgttgctgagactttaggattcatgctagtctattagtctctgcaataactaaattgcaactaagagtgtttctgttttactaatgtaggaacaatgcaaactcttgatgttaggcacattgaactcttcttagtgaaggctacaaagatggaagctgggattataatctgttggatctcataagttggagaaagacgcaagtgcagcctgtggagccatatttgacctcaaacaccttaaaa

SEQ ID NO: 21719 - DNA, 1984 bp, Arabidopsis thaliana landsberg
taaaacaaaatcaattttttcccccgtggttgttttgtaaaaaacataggagacatctgatagaaaaagtcgtgtataaattacttgtattaaaacaaatgtttaatagtggtataatttggactaaaaccaaattgataagtatcaatcgatagctaaatcaattttgtttttccttggtttattttccaggatatgtttttctctggaacagcaacaactgcctcacaattagaatggacaatgacagagcttatgagacatccagagtgtatgaaaaaacttcaagatgagattaattcattttcgacacataatttgaatgtaacggagaaagaagttgagaaaatgaactatttacattgcgtgattaaggaggggctacggttgcatccctctggtccactattgttcagactaccaagtcaaaatgtccaattaaagggatatgacatttctgctgggacacatgtaaatggttttttttttttctttttttaaattcttataagagtaaacctaaatgtaaaaatgtgcttgacttggaacacaggtcataatcaatgcttgggcactccaacgaaaccctgcgatatgggggcttgatgccaatgaatatagaccggagagacattttggtacaaatttggatttcaacggtactgattccaaattcgttccatttggagcaaggagaagactttgccctggaatcggattttctttggttttgtccaaattagcactagccaaccttgtgaaacggttcaactggagactcaaggtcggaccagtaggagatgataagcctgatctagctgaagcatctggtattgatgtttgtcgtaagtttcctctcattgtctttccatcaattgcgcacacacattgatgagaaaacagagagcgtgtccaattcacctgttgaagaatgatcattgagtgtggcctttgttttagtgttcctctataacaaaatttgatattggtggtctacatagatccggtgtcttcttaagtaaaagtaaacctatgtgtgcttgttagttgttacatgatgtaattgggtgtgtttgcatatgtagactaatgtcgctatttatctttattttatgaataaagctataaatttattatataataacctttcaaatcaaaccaatcaatttttttttttcttataattttgctaccaaccaaaagaagttaggacgaaatgatattgatctctctatgcttcaccactttcttagcctttctcttcctaaacccactcctcaaacgaaccaccaccaccaaacctaaccaaccaccctctccctggcggcttccggtgatcggatacctccaccagctcagcctccaccctcaccgctcctttcgttccctcagcctccgcctatggtccgctcatgctccttcacttcggtcgtgtccctaccctcgattctcgaagtatatatcatcctctgacgtagctcatgacgtcatgaaaacacacgatcttaagtttgccaaccgtcccaaaaccaaagctgtcgatataattattaatggtgggagagatgtggctttctcctcctacggcgaatattggagacagatgaagggtatgatttttttttgttttgaaaagtcatttattttttatacaataatactttcctatatatatatatatattttttcgaaatttaggaaaggttattggcttatagatttataaggtattgaaaatccaaacaagaatcatttattatttaatcattgattttaaaattctaattaaaatcatgtgttattgatttgatgatttataaatattagttaaaatcctttgttattcgtttagtcatttatttttggatttgagaatccaaattatgttttaaatggaattgaatggatttgaaagagaaaaataaaaggattcaaatccatgagtatacacatgttatttcaaaatcaatacatcttgatttca

SEQ ID NO: 21720 - DNA, 506 bp, Arabidopsis thaliana landsberg
cactctatatggttatatgcaagggatgagatttaaaatttttttttaaattactaatatattaggatggggggggggtactagatgacaaaagaatacatagaataaagaattatttgttacaattaaactagccaagtttcgaaagacataaataacataactacataccttatatcactatatcatatattgttattgtatgtattcatgatagtaaaaaaataagataataagtatataaatattcatattacagtaaaaaaactaatatttcaacctttagaacctcatctactagcaatgtaggtaagctgaaaaatgacgaggaggaggatcctatgatcgtggttagtaataggatcgttaaagtcatataataaagagaagatagattaaagagagaagttgagaaaaaaaagtttaaaagaaagaaaaaaaaatgtttggaaagcgatgaatgaaattctaatttctagaatcatattcgctacaaagcagttacc

SEQ ID NO: 21721 - DNA, 586 bp, Arabidopsis thaliana landsberg
  unsure (1)..(586): unsure at all n locations
cggacgggtataaataaggaatagaaagtctcgggaaaggggacttttcgagacctggagaaannnnnnnnnnnnnnnnnnnnnnnnnnnnnnnnnnnnnnnnnnnnnnnnnnnnnnnnnnnnnnnnnnnnnnnnnnnnnnnnnnnnnnnnnnnnnnnnnnnnngtctgctcgtcaagatcagccagctcgcccagaagagccagctcatcgacacaagtcagctcgtcgggagaagtctgctcgtcaagatcagccagctcgcccagaagagccagctcatcggtacaagtcagctcgtcgagagaagacatctcgtcaagacaagccatcttagcaagaagagccagcccaccagaaccaccagctcgaaacggcatcgcctcgtagcgccctcaattacgttctcagttcgcaataagcctttcagcccgtcgattgcccagcttcaagttcagctcgtggattagagattgattcttcaccttccccagagactcacgcgtacttgtttaattcgtgcattaacaaagggggataataattattgcgcttatgtgattagtggtgtccgcatcgatagactt

SEQ ID NO: 21722 - DNA, 970 bp, Arabidopsis thaliana landsberg
tttttattgtgtaatgtttttttggtcattccatcagtatgtcatgtgtttgggtaatgagggtgcacaaattgctacaactgtctacctaagttaaagcttaaaagatatggattcatagactatttttatgccgacatctaacattcgtcgatttctttttatagtggttgatgaatttggtttgggcaacttctaagcacgatgtctaccttatgtcacaatatttggtgagccactattctactttgacatccggaaagcatgatgttctcaatgttcaaggtcatgtttccccatctgaggttagtttcttcctgaatgatataagattcctctataaatacctacatcagtttaatggttgttgtcttttcttgtgtgggtgcagaaacatcctggaagtttgttggagggatttacaaagactcaagtgagtacactcgcagtgagagataaatttttagttgccggtggatttcaaggagaacttatatgcaaggtaagctctagagttttacaatcatggatttttagtttttcacacaacaattacatgcattctaatcaaggaacttcatctttttccacattgattttattttcagcatcttgatagacctggtgtgagcttttgttcacgtactacttatgatgataatgctataaccaatgctattgagatttataacaaacccaggtatttgcatgtcttttgcttgaggttgtatttgccaacttgtctcttctaactgattttttgatgtctgtctgtctgcagtggggcacttcattttactgcgtcgaataatgattgtggagtcagagattttgatatggagagataccagcttgttaaccagtttcgctttccatggccggtgaatgtaagtccctactttttccttgatttttttttttgtttttggtttggtataagttgatctgtagtgcttgtagcagtaagttt

SEQ ID NO: 21723 - DNA, 590 bp, Arabidopsis thaliana landsberg
aatactttaatattttatgattatttatattatgttgtcttatttatgattggttgaacctttaggaagtaggtaatcttaatctccgtgcttttagccaaaacaactaatattatgaaacggagggagtatgttttataaagtctttattatcatatcatttgtctcaacgattttaaaaatttcatgccattggttttaataccattttcctattttttaaaaaggtataaaagctttattgtttttggagtattaatttagcagaatattttcggattttaacaaaaaccggaaaattaattaaatctttctaatccgtaaatgtgatttctaaaaaaaaaagtattaaataattagttattatatttggaagattttattaaaatttaaatttataccctaaaacactaaaccataaccatatcatttaaaactatactctaaagctaaaatagttaactcaaactttaaagttttgtgtctatgatactctgataaatccaaaagttttgatagtagttttgatatattagaataatagtaaagtcgaagtcgaagctgcaatctaggtgatgagtgtatgattg

SEQ ID NO: 21724 - DNA, 585 bp, Arabidopsis thaliana landsberg
ctgtgaaacgtgagttgcgactaacttccatgaggttggctcacgtgcgggctatgacgtgccacgttgtacaaatttgtggtcataaccgttgccatgtcacacttgcattctctttgcttttcacaaagggcaaaaaaaccaaaagatgttgtagatagagtcatagagagaaacaaaaggaatatttttttttttctttttgctatttcacttgtcgttttatgtatctaagagcatcttcaatggtagtttttaagcctaagtcttttaatcaaaattaaagtgtaataagtatagataaataatattttttattatggatctcttaaatttggtgaaaccaaaaccaattatctcttaactaagagacaatttgcataggtttcatcaaagttaagagacttatgaatatttaaatcatataatttgtttattctttattaagaaacttgtttaaaccccccattaaagatgctctaattaagcatgttgattatcaattcaatgtggtacctttgattatgcataaaactatgtatcttcttctttttttttggatttgagaggaatacatgcatgtgt

SEQ ID NO: 21725 - DNA, 764 bp, Arabidopsis thaliana landsberg
ttaaaaatatgaaaataaacaatttgattatcgacgtctcgtgaagagaaatgggtaagtaacattgtacggaccactggtccttccccaagtgtcaccttcgctttgcattgacggcggagatttccctgtagatctacgaaacaaaatctgaaccaaccaaaatatctatttttaatttccttttattaacatttctctattaccctattttacactattcttttggaataaggtgagaaccctttgttttatcaaatttgcttattatatttaatgttctcagctgtaacagtgaagtacaaatagacctttcttttggcaatagatgtttttggtagagctgagaaccaattgacaactgtgtaatgtattgcgtcgacggatttgtacgcaggatttaaggaaagagaggaagatcgagaagaataattgtaagtattcaaaatttcaaacccaaaaatagtattttgtcaaagattttttcaatgttgtgtgttcttattaagttgtagatgatcaggacaaaaatcagttgaatatgtgctatgttgttaatcaaacatacatatattttttttcgtcaatcaaacatatttagtttgtacgttatatccatatatattgttaaataaaacaaccatatatatacaatttgatgtcaatcatataatgaaataaaccacatagaaacctttgctcaatttgcttaatcacttcttttacaatgaattttccgtgtaatagttttctcttttgagatc

SEQ ID NO: 21726 - DNA, 987 bp, Arabidopsis thaliana landsberg
ccttatccatgggtaagcgatttcccatagcctcaaaagtatattggctagttatgagaatatttactgttttgtgccgacgctacagcaattatttatgctgccatctaagaacctcatgagataccaagctaaccaaatggagcattctttacataggaaagcactacgtaatgaattcatagtggcttttatgcaaccatttggagggatgaaggagttgcaccaaaatttggatattactgcaatcagtgagttaagtagctggaaccgaatgcaaaaggtaaatatttactagtacattcttcattttaacctctgcaacagtgggacacaattagcaagagaaatatttttggtgcatagaggaacctctatatatctaattggcatagttgtgacatatatgtttcaggacgaagacgtttacacattcttcgagccagagttgaccaagaaagccaagtcgctttcttcttcaggtagtgactcccccaagaaggtatcatcgaccattgttgacctcaagggagagaattacttctccgtagctattggacaaacgcacacaaaggctcgctatttccttgactcatctgatgacgttgtgaaacttattggcaagctttgcacacacaacaatgcttgattctctctgtaactagagatgttagctaaatgatactattgaatattttaattgtgcaaaactcatttgcatcgttctgtttgtttctgttttcagtttgtttctttgactctttcttccctttgttctttaatggattagaaactattttcttaagagattttattgtcttgcccttacaactacgaaacacattatttattaagccaactagggaaaacagaggtacttcaagtaaggtttggtttataaaaccttataaattccctactgcttcttagaaacatgatacagacaaacaaaaacacactgggaaacaaaagccacttaagatatat

SEQ ID NO: 21727 - DNA, 503 bp, Arabidopsis thaliana landsberg
tgattttgcttctgaaagtcgcaatatttatctaggcttatcaacagatggatttaatcttgttggtatgaatggtgaagcacacaatcttgttggtatgaatggtgaagcacactcagtctggcctgtgatagtaactccctataatttaccttcgggcatgtgtatgaagagagaatttttctttctatcagtccttgttcctggaccaaagcatccaaaaaaaagtctagatatttatcttcagccattaatcgaggagttgcagagtctgtggagtaacggggcagaagcgtatgacatatcaaagaaagaaaaattcacgatgcgagctgctttgatgtggaccatcagcgactttccggcgtatggtatgttgtctggttggatgacgcatggtcgtttatcgtgtccatattgtctagatgatcaaaatcgttttggttccaaatggaagaaagcatagttggtttgattgtcataggatggtcttactcaagatc

SEQ ID NO: 21728 - DNA, 758 bp, Arabidopsis thaliana landsberg
acacgattaaaaataacataattacatcctaaagacaaaaaaaactatattaattaaacaaaaaaatatatacatgttcaacaaaaatagggttatataaaaaaagatatttcttttttcaaaaagtttaagaacaaaaacaaaccaaacccgtccaacgggcgggcttttccctagtatatatatatagtatagattttagggttcatattgattttatcttcttcgtttctcgtcggttgtgtcgatttctccaagactgtgtcttgccggctaaggtatcggtgtttcttatctctctccaaaagcctaagtggatttgatagattacttgtggcaatcttttatttaggtcaaaaactaaaattcgaagggtttgattttaacgtttatttttgtagaaaaaaaatgtccagttcgacacagatggattcgcaaatcatctcagataaagcggaggctgaacgaattgttaagaacgtagcacgttgccttgccagaaaaggattgaagtttgagaagaggatgatgaccaacgtcaaagatccaagaatcaactttctaaggaaccctgaagatccctttcacggatattacaagcagaagcttagtgattacctttctcagattcaacaaaatggaactatcgttgatgattttggtcatgttccagcaacgaatgttagtacaacagaagtcactgagcaacctccaggtatcatcagaaataatatcgagatgatggcgagttacatttc

SEQ ID NO: 21729 - DNA, 1315 bp, Arabidopsis thaliana landsberg
cttctctctccgacttttcctattttttttaatattattttatcaaatgtatctatcttatatacttttgatggagaatgctccaatgataaaaaatagttgacccgttagccacgctagtaacatagtagttctgcataccattttctcttcattctcaattgcgtctgtttaaaatcaatgattgtgattttctaactttttcatattctattggatgggtctccaggtcaaggcgtcaagccaggtaatccagtggttagcagacttttcggaggagttcccgcaaaattttttcttttctttgaatttaatgtgtatgcaaacttttttttaacataattataaatttctatatcctggatgttatctcgatgtgaacaacacttggagtcctcccacaagcttctctacattcccttgccttagagtactcaatcttgaccatagaaacgctgcacatcttgttgtattgttcccgcaaatcttttttgataaaggattcaggctaaatcccaaagtccaaatagccacgtgattcctcaaccctaaatgccaagacttgcacataataagtttgaaccatataaaaaataaaacgcctaagcctaaatcccatctaacaaaacttgcttacaccatgtgtttgatgtaagaatgatatccctctttccaacaatcttgcttcttccctgatttgccataattcaccactaatttggtaagttgtgaagaaacttccatgaggggtaacatgaaaagaatcaccagatctacaatccatgagctatcgtcagcgacaatgttgcaaatattactttgttcaatgagatatacatctacatcttcatctgccacggcagtggtggtcttttcatgttgttgactaaaaatgataccaaaggctcacaggcacatgttaataccattataccacaatttactatctagatattaaagacataaatggtaaataagttatagataaattttcctatatggaacggaaatgccttctgtttgattttctggatggtgaaaaacaatggagcaattcttcttatttaccaagattatgcgagtgggaaaaaggtctaacctcatagatgatatcgaagaagtgtgtcggtctaatctgtaggtcgagacgtggaggctatccccagttaaaggaatctgtaccaaactgaaacatcttgtactcagtcaaatgccaatcctgatctgctacttatttgacaaacgcagaaaaaaacagcccattgtatagatcgggaggtcttactattgaaggttaccaattgatggaatcggc

SEQ ID NO: 21730 - DNA, 917 bp, Arabidopsis thaliana landsberg
caagcagctgtaatatactcaaggcagagtttgatctttactctagtgtaataaagaacatcgcttccactcccatcaaaccacaagacacaaagaccaaagtcgcggaagcaggaaacgaagaccatattaaactcttggaagccaaatgagaattagctcggaaggacacctctaatggacaaaaaaatatcttaagaactggaagctaacttggtttacttttcacgtttgaaaatgtaataaatatttttaaaatgagaacattttgttgaaatttaaaattttagtaatcaaatttttattaatcaattctaccaaaaaaataaaaattagtaatcaaaataatttaataaagacattttgaatgataaaaaaaacttttttagttaaaattttatatttatgtaaaacatattgatcgtagaacatcgcttaaggattttatactatggggggatgttgtgtccaattattttacacatattgaatttaacacttaaaaacaaaaatattatgtatattttaaaaattaaaatattttgtgtaaaatattacttaaaacatattgaacgtagaacaccgtataaggacttcatactatggacgggatgttgtgtccaattattttacacatattaaactttaacacttaaaaacaaaatattatgtatatctaaaaagttaaaatattttgtctaaaatattactttaaaaataaaaataaaaaccttatattttaaatagttataaaaataatataaatgttaaaatttaatatgtgcaaaacatattgaacctaggacaccactaaaggacctcatactatggacgggatgttgtgtccaattattttacacatattaaactttaacaattaaaaccaaaatattatgtatattaaaaaaaaaaatatt

SEQ ID NO: 21731 - DNA, 1930 bp, Arabidopsis thaliana landsberg
tatccttcacgtctaaattttctccctatcctttgaacatctccaccatgttacagacgtgcccagttagacaagggattaccttttccagcgtagcttcctctgcgatgttgtgtgacttgaagcattgttccacccgaaataacagtcatctgggttaccaccttcataatcgggtaaatctaaacctctcggcgctggttaaggtgcacgaggaggtacgggaccttgctccaccggtgggagttgaaaacggacctctggaggtcgcagttgagtctcaggcgttggacaaggtaatattgcgtctttgttctgtctctctgagctcgaagtaggtgtactttgaaactgaggggatggaatggggctagaaaaggccaacggaccatagatctggaagcgtaaaagttgttgaatgccttctcggatgaacgccatttccttctccagagtatcgactctgttttccagtggtggcggtggtggaggagtctcgctgggagggggactgagtactgacgagtcatgagtagactcggtgacaacggcttttggattggcgggacagttgcagctctcaacgaaagcagcaatgataagcccgtgacttatcagaacaagaaataagagaagagtgagagagatatgcgccttatgcggcggagagttaagagagaaatagaaatgatattgaaatgattatgtttttgataaacaaccctaaaggggaaaattttccttaaatactaaagacccccaaaacccttaaaacaaataaacccttagcaccacaaaacggtgcgctttgtccttagacttattgagtagaagcagagcttctgaaccagccatagtctcttcttccttagccacttttgttcaggactttcctgagatacttctccagagctcttgcctttctcccgccacttctcatcttctttctcatctttgccaatggaaccctgaacctatcaaaagcacagattcaatatagagatttacaatcgaaagagaagatccaattcaattattaaggcaataatcaaatagatatgagaatgaattcgttcgctaagtgttagctcacgatacaaagatcaacattgatcaattactggaacatctcaagatagattctctctctctctcaacaaacccagaaaaatagcattagggaaagaaatgaactacaacggctctttaaagctgaattctccaaaaccgcaaaacctctccttcaattagcgtgtttcacttctcttctgtttcagcaaaccctctatttccatcagcgtcttccacatcctttgacaccagctgacgtggcaacgacctctttatgtaatatgcctgatgaaccttatcagttcacgttaagtttgccagaaaatgaaatcacaattttcacaaagcaatttcacgaaatcaatctcacaagtctgaaatactcgaaatcttaaacaaaccctaatttcagatattcgaaacaaatcggttttagaatgttctatccaaacgataccgtttcaaggaaaggttaaccgtctatttttcaagaccgatcaaatagcttttggtttaccatgaccggttcaaattaatggccttggccggttcaaattgaaggcaacattgaggagaaaagaagaactgaaaatttacataaactcactatttctccaataccatataacaaaaacaataaaataaattgcaccaaaatttcgacataacaagaaaccaagaatcacaattttgtacatcttctataaatccttgtgaagaacattcacaagcttatcataagaatctctatccacaagttgtttatctcgcaacatcgccaacaatctcgtcgcttcatcgtacttccctttcctataactctcatcaacaagtgttcctattagctaataaaaaatca

SEQ ID NO: 21732 - DNA, 1217 bp, Arabidopsis thaliana landsberg
taatattcgataatttagtacactataaaataataaaattcttggttcctaaaatagataattgtaaatttaacaaaatccataagataaaaagacaaaaaaacaaaagttgatatgatataatgtacggttttagattttagtgttcatttaaaaagattaattttagttaaagctcgtccaggatctttattggtaattttacttatttatcacagagtttgactgcattagaagcagagctttacaaagttggttcaagtaatcaaacctttatctcaacaattctcgatgcatacgctgagtatccgcacctgaaccagcatagttcttaccacaggcaagtgtgtataattttgccgaatatatattttccatgccaacatcgcaagcatagtaagtcaattgtaaaaacattttctccgtattgtttattgatcatgatcatgtattggcctcatctttcaactgctcttgacaggatcttgaattttctccctaacgcaggttagatgttattgataggtgcttctcgaaaagaacagtggaggaaattttctctgcacttgtaagtttttcattaatagacagcatatgttgacttgtgagttccgatcatgaatcatgagttcactgagttacctttgatattgcgctctaccatcatgtgttgattaggagagagaggtcacacaaaaaccaaacgattggctcttagctaccattcaagcattggagaaggcttcaccatcatgccttaaaatctcgctaagatcggttagttcccaaaatctgtcacatgtaataattgcagaaagctaacaatgtgtatgaaattcagataagagaaggaagattgcaaggggtggggcagtgtcttatccgtgagtatagaatggtgtgtcatgtgatgaagggagacataagcaaagactttgtggaggttttgtcagcttttccgattgtatctacatcctgaaactgtcctttgtagaccataattacaagaacgtgtcttacttatgtaggggtgcagagcagtattgatagacaaagataggaatccaaaggtttaacaaaactttccatttattattttttgctatgtcatattgtttatataatgttgtattgctgaaatttatagtggcagccaaggcgactcgaggacgtgacggatagcatggtagatcagtactttgagagagtggaggatt

SEQ ID NO: 21733 - DNA, 130 bp, Arabidopsis thaliana landsberg
ataatcttcatatgaaaatttgtctcttctctctttattttgtttctatcacgggcaatcctaaatgcaccaacgtgagtgtttatcttgtctaacatccttagtaaagttgcacctatttatgaacctt

SEQ ID NO: 21734 - DNA, 606 bp, Arabidopsis thaliana landsberg
  unsure (1)..(606): unsure at all n locations
tttgttacaggtggtgcctaatacaagaagcagaagttaatgggtgagactactgaccggggtttgtatgagatttttcnnnnnnnnnnnnnnnnnnnnnnnnnnnnnnnnnnnnnnnnnnnnnnnnnnnnnnnnnnnnnnnnnnnnnnnncgatcgatctggccgattcgatccgtctgaaagtcggtcttgccgatccgatccgtctgacggtcgatctggccgatccgatccgtccgacagtcggtctggccgatccgattctactctatgacggtcggtccttcccatccatcctctacatttcattgaaccgttagaccatgaggtcgcatgcgcatcagtttggtcaagttatactcgccgtgccgcaccccctttccgaccaacaacttcgtggtgtgtttggactatttgtggtgtgttgtgatggtgtggatgatcgatgtggaatgatttcaaaggccttgggcgtcctcccttatataaggggcaaatggatgtttccgaagcacacatccattccttgcaccttccgtaagtcacatccgtcctttcacctccgaaggttgcacttccatcgtaatgccgccttatcacctttg

SEQ ID NO: 21735 - DNA, 538 bp, Arabidopsis thaliana landsberg
accaaaaacgccgaacttatatttttacacatcatttcctcaataatttaaaatttcatgaaaaattatgaattattgactcctatcttacttctattttgttacctactatattatccatttcatatatgttgacaagttgacaatgacggtgagctccacaacaaccaaacaaaaaagtttttcttttgttttaaagctccaaaaaactgacatgaaatcactgggattagatcttattgtctcccattaaggcaaatttcattagattttccctttttggaaataattttcttttcgatttatcaactatagtatatacctttttttacccccaaaaacccagggattatatatacgtaaattatttacatgcatgaatatgaatagatacagtaaattagttgttcaataaaatatttaaactttttgctctcatctccaatgaggacgccacccacgttctctgttcgttagccatcacactgtcaaatggcagcttgtgtcaatcttcttctttcacagttcatgaacttca

SEQ ID NO: 21736 - DNA, 797 bp, Arabidopsis thaliana landsberg
tgtaactaaagccttttatgctctccttgtctatgacatgttccttccctttagcggttgctttcatttgaccttgggttaggcttctaggtacgatgcttccaacccctgtctgccaatgtggcttccgacaacattcttgtcttgtttctaaaccctcttgcgtcagtagtaggtaaattatcgaataacatccttgttacggctgaatccctggcggctcttgtctcatcgctattccagtacttatcggatatcgcttatgcagtcatactaccgatatctacgccgctacggtatgaattcactgtcgttgtccctctatccctgcgtatggatttgaccttcaagtgaacctcatctagatcggcccgaatggccataaacaacgtcatgtcttcgtcatcgacaatatagatagggtttgcacgctgccaatctggacccatcatccattgcggccattgatacgatagttccacctcatcttccgtccgtagattcagtctttccttaatagtctcaatcaccttggccaacgtgtctcgctcccggagcttcaccgccaagcataacccatccaactcggctacgtgctcataacatccggactcatctcgtttccactctccccttaccagcctaaccaccagagccatgaatcctgttgataatcagtcataactttaacgttagcgtacaagttagattggagataaagtactaagttgaaaacgacaacatttattacactatacctaggcagaacaaggattcatgaacattaattgattacg

SEQ ID NO: 21737 - DNA, 687 bp, Arabidopsis thaliana landsberg
atggcatcatgcgcatattttcttatcaataacagatttgacaagagataaaacctgggcagaagccccaccgagttcaacaattcccgttgtttttaaaggttcacctccaagcgaaccgagcgcatgattagcaacaacccaagcatatacaccttcatcagatcctgaaaattttccaagatttctagtaattataacaccaacaatagccaatggatctcatttattttactagcactcaactaagctactatataacaaaaaatgaaactttcatcaaaagtatcattgcaacataaatccacaccactccaatcctatcttttacttccacaatgtagaggtcaatgatcaccctaagattccctagtcttaaacaacaactgaagttccaagaactaaccagagataacagaagcccattcgtctcgaaaatcaaacccagaagatctaagaactcttctagtaacatcaagaatctgttcttgaacaggcaattcaagcaatctcattccagcagtagccattaacctaatatcactcttcttcaacttccccttatgaactctcttcttagcgaattccacaagctccgtcactgactcactcactccctccaaattatcagcatacgcagacaatccaggactcaacttcaaactagcgtaattctcctctccgaaa

SEQ ID NO: 21738 - DNA, 725 bp, Arabidopsis thaliana landsberg
caattgatcgaacgagattcgttttcgtgaattgcaagattataggaagcatagagaccttatgcaagcgttgtcttctccaagacatatatgtctagagttatttatcttgatgggtggaatgacatgggaaatcacaaaacacaaaggttattaaacattgatcacaatgaacagattaatcggagtgtgtattactgacttaattgagttgattttttaggactgtgtattacggagagcatcggtgctatgtatcattacccaatcaccaaagtggaagcagctcctttcaccaacatctcttttatcgatagagagcagtggttttagaaaatagtctgagccggaaattttttatttatgaaaatggtctatgtaagactaacatttttaaattaaacccacatttactttatttccacctatcctcggctttgcggagtttaccatatagccatctttcattattccaagagcccaacacctaaatatcaaaagtatcataacagatttaggccacaatgtggatgctaactagatgaaaaacaatttggacttcaccagcattaagaaacaaatacgtcaaaagttttttttttttgcatatatcaaatatgtcttaagtaaatgttgagaaccttttgtggaaatttcttagactatgaatgaatacttacaccatatgatatatgtgtaatatacatacatattttttgcttttt

SEQ ID NO: 21739 - DNA, 498 bp, Arabidopsis thaliana landsberg
acttcttccttcgctgccattataatttatgttggcgtcgactttatctgacacatcaaagtcatgcagctacatcaagtgaactccaaacaaaagtgttctccatattataacgccctcaagataactggtagattttgaggttcagatattatgactggactcaaattagttttctaatgtggacttatatcactcgtgctactgtatgaagttggaaattagagacagttacaaaaatcatctagtaacatcaaaaggacttcaaacctcatcttctgggaacacgccaataacctttgcaatataacgtttcttcaccattccaccctcaatctgaaacaatcaagataagtagtaagtatgaaattttgatttaccagagcaaatagcatcttaggaataatggtatggccaagcaaaatgagaccaacttgttcgagtacctgttgcctgaaaaaatcagcttttgccgcagtttttgctatgataagcaat

SEQ ID NO: 21740 - DNA, 501 bp, Arabidopsis thaliana landsberg
cactctctgaaaaatgaatctagagataggtcaattttaggttgtgttagtttctggaatttagagttcttatgttatacaaagttcgtatttttctatgatttacattgagctagaaagttagagtttttatgttctgatttacaatgtaatcgcgagtaagttgataaattttgcgttttttttgtttagtttatgtgaaattactgatgggttaattgaattttgtgttgttgattgtgtagtctctggttgcaaatgaggagtttcaacacattcttcgtgtgttgaatactaatgttgatggtaagcagaagattatgtttgcccttacctctatcaaaggtattggtaggcgattggctaacattgtctgcaagaaggctgatgtcgacatgaacaaaaggtttgagcttttgttgctcttctacgtttggctttctttagtgtgaacttaaattaattgtgacatttgagatatatggaacagttatatgtttt

SEQ ID NO: 21741 - DNA, 570 bp, Arabidopsis thaliana landsberg
caattttaccttgctttttgaaatagaagcattagagacctactaatattatacatgttgagaagaattacttacgaaacggtgtatcagatgagaggtaggtttcttatagccattgacaaagcggattgagaaccaaaacctgaattgcaacgagagatcgagatcaatggctaagcagtgctagaagaaagtacatcgcatgtcgattacaatccgctatatatgagatcagatttatgtcgccatatttcgagtgacgaagaagtccatgagaattgagtcggacttgagacaaaggaaaatgttcgttggatgttacaaatatgagaatctcgcaattgattatggaaattgattcgatcttcttgattttatttagtgggttgtcttctttgtggaactaagacaacaatgattatctacacatagattagtccaaataataaaattcataaataaaaaacaatcgagaaagtactaaaaggcttcagaataattcaaatttgggcctaaattaatagtacaaaacattccactaaaaggttctttggcaataaaaggttttgg

SEQ ID NO: 21742 - DNA, 522 bp, Arabidopsis thaliana landsberg
aagatttttacgctccaccacggagatgcgtccaccagtgaacaacatgccagattttttacgcagtgtaacgaattgcataaatacctacatcgtgtagtataatttgtatcagtatatatcataaactagttctaatgcgtttagctgcatggctgttggagggatcctatatttacgaagaaaataaaatattaaatgtgattttttgtttctatgcatgcaattcatttcctttcattgcatattctttccatcataaattcgtgtgcatgcagttggtaacagatttttacgcagtataccgaattgcataattatctacacaatgtggcatatttagtatcagtatatatcataaaatggtcattatgagtctagctgtatggctgttgcagcgatcctaaatttatggaggaaataaagcatttaaaatagaaaccgccccatatatttttcctaaatttatgcgcatgcaagggaacgtgtttgactcatgcatgcattttgccataatttttg

SEQ ID NO: 21743 - DNA, 389 bp, Arabidopsis thaliana landsberg
cttctccgccttcttatcgacataagtgccatctagtttggtatgcttcttgacaaagacctcaccaagacccaccgtccttcttaattcctcttcctgcaatgttaaaaatgaacaaggactaagacaacatctaaacttgcattggactatgtaaaacaaataacagagagaacaagaagttatttaccatttctgattggatttgttgatacgaacgataaattgatgtgaggaccgagcccattacggtcaaacatgcgagctttggaatatgtcagactctttgtgattggttcttcagtatcacagatcgcacacatcgtttcccagatatgggaatcgatgatcccagaaactttcccttatttctaaagaggtccgtgcac

SEQ ID NO: 21744 - DNA, 571 bp, Arabidopsis thaliana landsberg
cgcagattacaatactatgaggttcaagggaacctcacagcttatacaagaatatgggacgcgttcatggaatttatgttcacccgagtcggtcaaactcgatacctggctgatatatcccctcggataaatcaggaacctttgtctcctgatcttatatacgcgctgatgcagtgtattccggggatatcttctgaagactgtgaagcctgtctccgaaaatgtgtccgtgactaccagagttgctgcaatgggttcataggtggagtcgttaacaagccggtctgctatttccggtgggatggttataaatattatggtgccttcggtgatgaagcgccatctcaaccccccacgccgcttcctcttcctcctcctcctcctcgtgatccagatggaaaaaagatttctacaggagctattgtggctattgttgtttccgcagttatcttcgtggtgctggtcgctttgggattagttatttggaagagaagacaatcatacaaaacactgaaatatcaaagtgagttactttttttttttttttttttttttatcactctcacattac

SEQ ID NO: 21745 - DNA, 1173 bp, Arabidopsis thaliana landsberg
tcaaacacttagtctcataagttatatcttctccttttcctattagaactataattagatggctcgtgacatacctctagataactcctagaattattagtcgtaatctcattatttaaatatcttataattcaagatattatcaaactttatttaaatatcttatgactcacgatattatccaaaaatttgaacatgggtgggaatactgctagcactctggttaggattaagattttcattcccaatatctgacatatgacgctggttattcgtattcttttattcatcatttgacgcaccatcttttctcttcctcatcctacaatatagtatacaaaaaggaaagtgtgttaataatgaaaaacaataagatcttttaaaaaaaatcaccaagaatggagtatcttattataaattacttgtgaattcttaatttgcaatgattcacgtaagaaatgggaagataatgtattcttgaacaaagatcaaaagttttgtgtgaatgtggctgaggtctttgtgatgttttgagaatctataataggtccctaaaatatattgttaagatattttaattttttaccgtaaatataggtcacaaatatagttggtaactaacatatgaatatttagtgtatacactcttatgtttaacaaagtaattattgtcgagatagaatatctgaataccataaatataggtaccaaaatatgacgatcacaactctctaaaatttctttataccaataaagaacatatacggtctataaacattgtttattgcctgcatattagtgactttatttcaaactttgagataaatttatggagctaaactgacaatttgtgttaacaataagtatatgtttttaacagcttagatcaagtcacatttaactacttagtttagagagttgttttctcctaatcataaatactatctattttgtatatatatttttactgtaaaatataatcgttttctcatttatcggttgataaacaaacaataggagatgaaaaagatgggcagtgttctcagggaaagaaaaatgtcagttaatttttcctatagcatatctcaaaaattaaagttacagagaatctttttaaatagaagatcttattgatgaaagtggtgaaaaaacatgaaacgaacctagattaac

SEQ ID NO: 21746 - DNA, 294 bp, Arabidopsis thaliana landsberg
gactctctgatccttcaactttgcttaaccggttttaaccactccactaaccagcaataaccagactcaattctcaaagatccaattgaaccattaaaccaatgagaaattgaatcataaccattacaggttttaacactccaccttgattcaaatttccttctcttcagtgaatctgcactacatggatttaaccttcagcagagacaagtcatgtcttttacctgagcaactttagaaactctaaagctgcttcaaacttctgcactggaatgcatttagtaagcatatcag

SEQ ID NO: 21747 - DNA, 601 bp, Arabidopsis thaliana landsberg
gccctatgaagcaagtccaacatcaacccatccacccaacgagctttttctggatttatgaagaccccatcgacaagagaacaacatcagctacagaatctcattctcccacgaccaaatacttcaaccaaataataacatttcagagaacttacaaacttctatcttaccttccatgacattgacgaagcaacatcatgtactttgatcaacaatttgacaaattttatagaagcagctcttctctcatttggaataggcaatccacaaccactcaaagtcatttttataatcgaagataacaatccaaatgcaacgacaagacttgatgtggaagtcactatacaacacctatcaattttacaaaggcaaaccacaaaagaagaaaaagctgaatgctcaatctgtcttgaagagctacatggtcttcaaaacattaacactatcttgcaatcacatatttcaccatgaatgtatttcaacttggttacgtcattagaactacatgtgctaattgtagaatccatatagtataacccttcatattattttcttattattcatgattaataaaaaaataatgctcttttataaatcatgc

SEQ ID NO: 21748 - DNA, 620 bp, Arabidopsis thaliana landsberg
tctcaaacatttctcctttagagataccatttacggtcgactcatctatttcactggccgcctattcctccgtcgtagcgtcttcttctctttacaagcgtcttgtttgttctactctatcgatagatgtcgattgaagaaagtaagtgaatgaaacgaatttggttgtttaggtatttgcaatgggagttagtacaatgtagtaattgaatcgtgttgctctccggaatcaatccatagttgcagaataaaatggtaccgacaactggtacacatatatattttgactggtagaattgtaacatatttttaaattggtaggaagcattcaaaatgggtcaactgatctagttctaatggttcaattgatctagttcatctggttcaactggatgagttcaaatggttcaagtcatatagttcaaatggtttaattgaacgagttccaatcgatttttccggcgtatgtaccaaaacatcagttgtattgagtaaatttagaattgctcttttcatgagtgtttatttgaagagtaccttcttctaatttttctgtaaaaattatttttaatatacaaagttactaaaataccccatttagtgtataatattaaaaatta

SEQ ID NO: 21749 - DNA, 767 bp, Arabidopsis thaliana landsberg
tctcccgctagttcttccccgtccgcttcaactctctcagcactcaaactcaaaatgcctcaaaccaaaaagaaattaaatttttagctgaaattaactctatttttaagattttgtaactattataccattttaattggtttattttttaaaaaaatatattaatcaatgtaatattaattatatttctataattaattggttaatttccattgtaatattaattatatttaaagttaggctgattttcaatggttgacaaagaaaaaaagaaaaaaaggaaaagtagttacgtttctattaaggggattggattataggtgtgaatatagctattttttcatttttttaaaaattaattagcgtgtgcttttactgaacgttgcgacaacggcaacaacggagtaagacgaattgtcatgagaagtagcaggtaagtaaaacgacattagaacttaaaataacaactttggatgagtcgccgattgagttgcaactgcattcgatgaatcgctgaaattaaccagcgacacttcaatcttcatcgtagttcatcttttgtgatagttctctcttatcactatattttcttctcaccgtagaactgtttttcttctttgctattgttgagcctgcgtttactaaaagaacacgctaaatataaatttaattcttactagaagaaatgaaatgatttttttttttaaagaaagagcttgaatttgcagagaaaaaaggatttatggtaaattcatctcttaaacatg

SEQ ID NO: 21750 - DNA, 557 bp, Arabidopsis thaliana landsberg
  unsure (1)..(557): unsure at all n locations
aaagcaatccaatatgcaatgcacatgcaatcctaatgtttaatcgtcctaagtatgcaaaacatactaagagaactactaatgagataaaatatggatgaaacaatggcaaagaggtgaagaatgaaagcctaaattatgcaaattatagagatatcaattatatattttcatagaaaaattaaaaaagttactaaattagaaaaatctttctataaattaatacttctctaaattaataaattttacagtcctagtattattactttatataaagtttttatagtaactagccaaataaaatgtcttcgtttctgtggacattgaactttccaaaagtaggcttgagaaggcttggtannnnnnnnnnnnnnnnnnnnntggtttccaccttacttcatcattttttgtataatagtcagactttacggtatattttctggattttgtaaaatgtcaacccatgacatcaagtctatttggtgagcccaaatgtcatgcacataccaaagggactgagcannnnnnnnnnnnnnnnnnnnnnnnnnnnnnnnnnc

SEQ ID NO: 21751 - DNA, 1253 bp, Arabidopsis thaliana landsberg
aagagaccttgaccaactgttcccttcaagtagtagattattttgtagaccgcttgtaaatgtggagctctaggggcagatgtgaactgacagagtttatgaaccgcatatgtgatatcaggtcttgtgaatgtgagatacatgagcttaccaaccagctttctataatgttctgcatcatcgatcaactcaccatcttcttgagagaatttctgatttggttccataggaacaaaacttggcttgcatccaaggagaccagtttcagccaacaattcaagcgtgtattttctttggcagattgagataccatcagcatttctagcaatctctaggcctagaaaatatttgagagttcccaaatcccttagcttaaaggagcgctgcaaaccatttctcaacagttctgtctctctatcgcagctactagcaacgatatgctgatgctttctctctataaccgaattctgttctggtgtttcaggacatgagtggtatgctacaatcccttttctcctgtatagttcctcaaatttaagctctggagcattatcagatcggacgtctttgacttttgtttgatattgtgtctctaccatcgtgataaaacaagggaaaatggtgagaacatcacttttaaatttcatgagatagacccatgtcacacgtgtgtaatcatctactatggttaagaagtaatgatatctttcctgtgttggttcagaaaagggtccccagacatctatgtgcagcaaatcaaaaggtgctaagcaaatattatgacgactagggtaagttaacttcttttgtttagcacgctgacaaatatcacaatgtaacaatcctttattcttggttttaaaaattccaagtacatctgtgagcaagtctatgagatcaaaagatgtatgaccaagtcgttgatgccaaacagatgcatcaacaacagagtttgcaacaaaagaagtagatacaacgtcttcagacactgaatcttcaacatccagcaagtatagatttccaactcttctaccgcttccaatcgttgaccccttggtaagaccatgtaccacacaacaagtcggatcaaacacaactctggcaccaatatctgtggtcaaagcactaacactaagtagattcagtctgaactcaggaatatacagaacattcttcaacatcagatcatcatttacagcaatgttcccaaaacctccaactctaatggtagtgccagtgggcaggttcacata

SEQ ID NO: 21752 - DNA, 909 bp, Arabidopsis thaliana landsberg
cgaaaagtcaggttcgtgcatttagtcattttgattatttctttattattctttcttagtgtaacaagcactttaagactctacgtaaaattaaatgtctttttcacaattgaaaaaggttatgacttataggctatcaaactctttcatattcttcttttaattcaggctattcatggtaaaaaaaaaactcgctacaagatggaactttgactaaggtatgtatactcttgaactctaatgacaaagaagttagaaacatgagctttaagttgatgttgatacacatgatcacaacgaatatggataaagttttatcattatgcttaaaaacgtgagtacttgatttgggttttatgactatcaccaaagtgtcatcattatcaccaaagccttactaaattctgcaaacttataattatcaataaattgaccttcatcgttgataagcaagagtgctaattgtcttaaaatgttcaatatgatattttgcaaaggatcaaaaagtgaaccagagaccagtaaattacatgaccttgacctgacactagacgaactacataaacaagatattctcaagaaattcatgtctgaggtaaactttgcattctcgtatagcacctctatattcaattcttatcactaagatacatcataatgtgatgtgactaagattattcacacagttttgatatatttcttgattaattgtttattgtcttcactttggtaatgagctttggtgttttgttccgttggagaccttaatcatctcatctctgcacgcctcatagatgtagctcttgggagagcttaaacaacttgagcattggaagaggaacaagagaacactagtaagactttcagaagtttgtctttgtctctatttttaatacttggccacactta

SEQ ID NO: 21753 - DNA, 598 bp, Arabidopsis thaliana landsberg
agcctgtagagcgaagactcggtctccatcgatgagatccttcgacgttggttcgtctacgtcggggacggctgacggaactgttcggggcgacccatgttttatttcttgtggggtcatggcctccgatccatatagaaggcgaaagggggtgaacccggtcgccctgcatccagtcgtatttagtgcccagactgcctcaggtagcaaatcggcccacttgcccttttttcgtcgaggagcatctttttgacagctgtgaagatttttccattggcccgttccacaactccattggactgcgggtgatagaccaaggcgaaggcaagcttggtgccgatggagaagcaaaaatccttgaagtcttggctgtcaaactgcttgccgttgtcgactgttagctcggacggtactccgaagcggcaaacgacattttgccaaaagaatttttgggcggtctttgatgttattgtggagacagcccttgccttgatccatttggtgaagtattcgacggcgacgaaggcgaacttaaggtttccctgggccgtgggcaggggccgacgatgtcaggccccagcgttggagagccatgtgt

SEQ ID NO: 21754 - DNA, 742 bp, Arabidopsis thaliana landsberg
agcaaattattaatattgtcatttaatataatttattaaataccaaactcttcaaaactgtctgtaaatgttcattcaattcaccaccggcaattttgtttttatgtagaaaaaaaggaccaacgtcttaatggagtgttttttttttaaaactaaaaaaggaatgaaagttatcaaaagtttgttttctttctttggtttttaccaataaatgatttactgaaacactaagcaaaatatgaattctttagcaaataatctatataaccagaattgtttttactacatctaacattggtatataatttcgaatccaatacctaatagtccttttgtttcttattacttgatcttttagaaaaaaaattatttcaaaaaggttgatttttaaggttttttattcaatatttattagttattattgatgaattttaaactttaagacaaataattgaatatcattagtttagaattataaaaaaatataaatcacaaaaattaatatatttataatcagttttaatatgctttattattatgtatgttttttctaaaaaatcaattaaaatggaagagagagaatactttcctaaaacctctcttatgttggtatagatctagagagtaaatatacaaacatatgatctactaataaaaattatatatatatatatatttttttttttttccggaaaaataattaattactttaaaacctttgggggcttggacccaaaaaaaa

SEQ ID NO: 21755 - DNA, 732 bp, Arabidopsis thaliana landsberg
attttctgagtggattagttaaataacttttccggttccttaccagctgagattgggagttgttcaaaactacagcaaatgtgagtctatctgtcaaatccataagtgcttatgttattgactagttataatttagatatgaaaccttaacgtctgaaactctttagtgttcgtcgaccacaaaagtcttgtgtatctgttattcttaaaaatttcttacatctattacaggtacatcgatagttctggactcagcggaggaatacctttatcatttgctaattttgtggagttggaagtcgcgtaagatatattttttataatctacttactactttacattttagttttttgcgttggggtgattgtttccttaatgttgtaccagttggattatggatgtggaacttacaggtcggataccagactttataggattctggaccaaacttactaccttgtaaggagatttcatttatacggagtaatatagtggaataattcttcattgtatctaaattgggaatatacgactggtacaatttactgcaggaggatcctcggaactggtttgaacggcccaataccgttgtcattttccaacttaattgctttgacagaactgtatgtggtaaaatgtgtcagaatcaataatggttactggttctccatccttccctttggccacataatcataatctaaaagtgaagaagcctggttataaaacccaa

SEQ ID NO: 21756 - DNA, 492 bp, Arabidopsis thaliana landsberg
tcggatttgcaatggcgaactttgcagaaggagtttggtggtggattcgtgaagtcaaaggcggagtttgcaccggatcgtagatcttgggtggcaccgaccttgtctctctctcctcctcgcgtatcaatatgtgttgtacacgcgacacgttagtttcttaatcttatcatatttgatttttttttgccgttaaggtttattatttattgcaaattatgagaattgttacatagacgattttacaacggacaattccttccaacccttattagatccacgacagcaacaactcctcttcttcttctctatgcctttgatggacaccttcaatgatcttctctgcttagaatcctgacgaacggctataattgtgcatcgtttgagatctcctgcacacttacctctattaatctgcaaatctgctaataaattgtattatttgggattcgaacccagaccgtcatctaggcacatatcgcatatgtcccc

SEQ ID NO: 21757 - DNA, 720 bp, Arabidopsis thaliana landsberg
gaacccaaaactcacaagtgttttacgaaactttaaaaatggttaggatttcttattttaaatctaaataaacaatttgtcgtttgcaataatagaatatttttgggtgaattttccacctaatttttccatcaataagatgatgttatataagtagacaaagaaattgacttttgagttgcaaagtggattcaatcgacaaaaggcatatccaacgaaatcaacaacaattatgagtgttgtaaacatttcgattccatatgattagtttaatttttttttttcaaaataataatttattttagactccagtctattaaccatctttaaatgtttgcgtcgctattttttttgttaaacaaaaatttataaatttataaaggtattaattttgggatctctataaattaataatgttgtgaccgtaaaattattaatttatcgataaattattatttataaatttatagagagatttctctaatttcttaacctttttaatttatatgaaaatataagatttttttcattatataaaatatttttctagaaacaaattccaagtaaaaatcaattatcatgtaaagaaaacaacaccaaacttttttgatacagtaaaaatattgaattaatttcaaacaagaactaatacgaattttaagaagaagaaaaaaaattttagaattattttttcattgaaggtttctttacatataaaca

SEQ ID NO: 21758 - DNA, 460 bp, Arabidopsis thaliana landsberg
ctgcaaacagtcagcgactcagcgtaacagtgaccgaactcatctccagttaaccagaaacccgagggcctctgtgcaaagtcaccagtgcgcgcgtgtttccctctgatgttgggctgtcgggctgaaaacggcccaggaactattcattctttatctttatctttttccagcagaactccaacaaatatagaaaattgtagaaaaatcctaaaattgtcaaactagttttcctagacttcttattttccctagaatttaataaaaatagttttatgatttttcgaggaaataaggaattttaaggcatttaaagtagtttaaggtattagttctagatttttagaaaataaatggtaattccaaaaatgtccaaactttttgcatgaattctatacattatttagaggccttgggtagaatttgggttgatttggaccttgtttgatacttagaacct

SEQ ID NO: 21759 - DNA, 496 bp, Arabidopsis thaliana landsberg
tatttatatattaaaatatcaaaattttgtgtctaaatctattaaattatttgaaaatttcaaaaattctctaaacaacacgagtagttttgcttgaatatatctaaaaacacaaaagtaactaaaatatccgaaaaatcataatattgtctatatgtaaatataaatataaatattttagttatattgatatttaagatattgtctatatgtaaatatgttcaggttcgggtttttcagattttgaaatttagattcggtcggatatttgaaaatttcgggttcgaatttggattaggttttttgggtcgggtttagatcggttttttcgggttcgggtattatgtctaaagtagaaatcggtaaacggtggttgttttgtttgtatttgtaaagcagaagagagagagacctagagccactgaaagcaaagaccagaaaaaaaaaactgaaagacagagagaggaaaatggagagcgacgaagcagcagcagtg

SEQ ID NO: 21760 - DNA, 598 bp, Arabidopsis thaliana landsberg
  unsure (1)..(598): unsure at all n locations
cataaagctgaccatgattaacccaaaaaggtaaacaaggataaggtaaatacagaatagtcaatccttaagtttcaaaaatgtaatacgagacagtgaattattaagtaaataggacatgataggtctgaggacatttgccttcaccagattgttgctcaggaagatcttcggcaacacactgcaggaaccacgggctgctcgttgtctaaataaagcgatcatacattcaataaatttggaaagtacaaatgaacaacacatcaaacatgtacaaacattggaaaacatctcaaaaggtatagtattaattaaagaaggagatcaaattataaaatgaactaatcttaattaggagttgattactctttaagtgttgtccatgattatataatctaatactattcattttattgagacctaaaagttaaaccagagattgattcttatattacacattattaaactcacaagattaaacatccatttacccctagggttttcctttttatctattttattaagggaatacatcaacatatacactaacttatattctaggtanaaattaaagtgcacagactatagacgaacaggg

SEQ ID NO: 21761 - DNA, 245 bp, Arabidopsis thaliana landsberg
tatccagctccgtatacgaagcggcggtcatgactatgaaggcctttcttacatgtcgtctgtgccatttgttattctcgatatgtacaatttgaggtctattactgttgacgtgtcaagcaagaaagcctggattcaagctggtgcgaccttgggagagctctacacaaacgacaatgacgtaagccaaacactagctttcccggctggcgtttgcgctactgtaggagctgatgggcacataa

SEQ ID NO: 21762 - DNA, 640 bp, Arabidopsis thaliana landsberg
  unsure (1)..(640): unsure at all n locations
aattacatatgaatttatagtttagtcatgttttgaataggagcaagcacctttttagcctattatgaataggaagagttacaaattatgtccaacttgacgttatttgtatttaattttcttgaatttccattcttgtatcatcttctaccatcttctagaaggagatatcttgctcttaaaggaattatccaacatcacttgtcgatggacttgctactgaagctacaagaacatggcatgatcagttatgtcatattggagttgattcacagagaagatgttggagaagtacatgaagaagatgatgtcatggagaatatcactaaaaaaaccacgagaatgaggttggtgaagtaatccaaggagtaccacaactgagaaggtcgggtcgacaagtaagtcagtcgcggtaccttgaagactatgttatgcagtcccaaacaacttatagattgttcaaacaagcttatgttaaaagtaagagacgtcaactttcgacaagtaatgagccaagaggctaaagacgtgctttaatggtggaaagcatgtgaagaggagtttgaatcagtcaacaagaacgagatggntctttgttgacatattgattcaagtttctgatcggttcaaaagcttttca

SEQ ID NO: 21763 - DNA, 442 bp, Arabidopsis thaliana landsberg
tgatgtcgtacttagtcagagcgatgtgccaggatgtattgacttctgcgtactcagttgaaccttttgagtatgtgcgttgtcctaccgttgctcaaaacccaactacaggagattgcgggccttacacgatgaagttcttggagttgcttaagtttggaaaccctttttcggacttgacaaccattcgagaagcacacatggtcttctaacgtcggaaatactcggttggcatctacgagcacggcaacgcgaaccggttctgtgcaattgcgttaatcgtgcaaggaccatattccggatccttgcaactaattattttggacaaacctatcttagatatttgattgcaactacatttaattttggagattgtaagaagttaatttagtttcctcgatcactctcttctcgtacacatcgttcacttctaaaacaggat

SEQ ID NO: 21764 - DNA, 863 bp, Arabidopsis thaliana landsberg
cagaaaataacgagtaaaagatactaacaaaaaaaagtgtctgttaatattttaacgaaaagttgcgatgaaaagactcaacaaaaaaaataaccatcaatattataaccgaaagttgcaatgaagagacacaaccgaggaaaaataaccatcaatatttttacaaaaagttgtgataacaacacaaacaaaagttaaccgataatattaacgaaacattatgatgataaacacgaaaaaaaacaaaccccatcaatattttaatggaaatttgcgataaaaagataaaaaaaacaaaaataatcgttaatattataacgtaaagttgcaataaagagacaaccgaggaaagtaatcatcaatatttttatgaatatttgtgatcaaaagatactaacagaaaaaaataaccatagatgttaacgaaaagttattatgaaaatagaaaaatgaaaagttacgataaaaaacactaacaaaaaataaccgtaaatgtttacagaaagttacgatgaaaagacatgaatgaaaaaaataaccgtcaatattttttacggaaaattgcgattaaatacacaacctttcagagtacaaaatgcatttattgagattgttatttattatatttttttgtaaactagcgagattgttattattagtcgaatcaatattgtaggaagaagacctaaagacaaattcggaggtcaattaataacgcgttaaagtatgtgaggcccgttcgagtggaatagcgcgttggacagcccaacatgaatgaatgatcgacttttattgaaaaagcaaaactagggcaagaaaacgaaacgtccacattagcctattaaatcactaaacctaagagc

SEQ ID NO: 21765 - DNA, 539 bp, Arabidopsis thaliana landsberg
cttttgttcttatattttcctttacgatgcctctattcttaacttcgtttaactcatcatcttcttttttaacgaccttccctttaaatcttgaacccccataacgtgatttcatgctcacccatcattatttctacatccttccttttagtcttgaaccattcatgtccttttgactctttcactcgattttcttcccacattcctccgataacgatattccttttatcaaacttcatcttctcggtttttgattcacctcaccttgtcttactacgcctcctttttccctctataatgatcccaaaaatatactccatctcctttctcgaactccattgttactcatcatatatttatttgtgatcaccacctacatctcttaaattgttttgctcccccaatactcaatctcttcttcacccacttctttgttgtgctccttactcttcatttaagtgatctccaataactttccttctaatcacttacttcttctcagcttcatcacttccctcatgccatactccgattaataa

SEQ ID NO: 21766 - DNA, 968 bp, Arabidopsis thaliana landsberg
gatatgatcagtataagaatcataacataatttattatttttatatacaaagtagtgtattaaccattatataataactataaatatcatatttatagtcagaacagaaccaaatttgaacacaaatagtttttgattcatatttcaatcaatacataagtatgaagtctaatactttgaaaatatcacaattcaagtattcaacgaagcaaatttaaacaacaaagtattaaatccaaagcaaatttaaacaacaaagtattaaatctaaagcaagtttaaacacaattcaagtattcaacaaagtatcaaatccaaaagcaaattgaaagcaaatttaaacttcttcttcttctcccttgccatctttgtcttcattaacgaactcaataagatcacttaagtagaacagaaaacacatttgcgttaagactcaaatggattgaaattgaggagtccttgcatattgtcatttgatgatgcattatcgactgtgatagttaacactctcttttctatcccccattcttttaacaatgccaagacatttgtggctataacaaaaccagtatgtggaatagggaatgcacaaaatgacagaatcttcgtcttcaaattcgatataatgtgcagtcaaacacatgtagccctatattgtaaatgatctccaaagatcttttgttaaacagaacctaccaggaacttcatctatgatcttaaacaaaagaaaatggatctctttcaaaatcgtaggatcttaaattgaaatcgaaaaaaccttaaattgcaaaacctagttatcgaacactagttattgcaaacttgaatcgaactaactggattaggaatcttcggagaagccatgatgtgatggagacaagatgttgaagggaattcgccggagaaagaagtaatcgcccaagtaatcgcccgacttgttgaagaaccaaagaaatattttcgacgat

SEQ ID NO: 21767 - DNA, 1607 bp, Arabidopsis thaliana landsberg
aggcgagcttaagcacgagcttgctcggaataagacgagggtcaagtaacaagaacaaggcagaagataagaccaaaaacgcagtgttttgcaagaagcatccaaagcatagacaatcacctggtgtttgttctctttgtcttaacgagaggctctctctttttatcaaagcagcttcttcacgtagaccaagatctcgtcaaatcttgtctacttcttcctcaactacttcctctctttcatctgacggttcttcttctgtctcttcttgtccttctcctattgttgatcgccgacgatacttgttaatgtccggaggcagcggtagaggagagaaagtgatttcgtggatgacgaaaagccgatccgtagcttataaagtggatgatgagaaaagaaggaagaagaagacaaagacgaatagtggtttcttttttggtttggtaatgggcacaaagaagagacaataagatagtcagtcttgtagatttgttagattagattgttcttgattgtgtattttcttgattctttcattttagattgattgctacatatagatgactagatcagtttggtgggtacgtgcaagtgagagagattctttatacgtattcttgtgattgattccctaagtttgtagtttagtgtggtaacataaaatgtgataatccagatttaatatgcgttgaacatataattatatgcgctaaatcaagagatttgcgaacatgtttttcgttgtttattttcttgaaaaaaaatattttcgttgttgattttagttgacccccccaaaaaatgttgtcgttgtagttattaatgttcgcacacttacttgaaagaaaacttagacttttctttgatgaaactcgtgagaatataaaatccatataacttaacattgtattaagaaacttttctccaatttgattaaaaaaacttcttctaatttttctctctctcttccctatctacaatgaatacataacaaaaaccctacatttattttttggggaaaatgtcaagttatcgcaaacttttaaatttagtacgaaaaagtatgaatttttgaaatgtcattaaaatctcaaaagtttggtttgaatttttaataacagagttaaaattcgataactgggtcattttaggcatatcgataaatttcctttaacaaaaaaataacggagttaacttttcgtagcgtttgaaaaataaataaatcttctacatacatataaggtatcgttaaagagaaaaatcagcacaacgtagggtatcagaaagcttataaggtatatttttaaatacatataaggtatcgttctaaactcaaacgttagggaaaatcaactccatcaaaagttaacaaaaaacctgcctaaaatgactcattcaacaaaacttaaccattttattattaagtcaaactaaaatttgagatttaaatgacatttcgaaagttcataatttgttcgtctcaaatttgaaagttcgtaattttttcgatatttttccctttagtttttttgtagataaccatgttcgggccaaaatgcaagatatcaattttttcaattctcgtagatgcaaattactgtttaaaa

SEQ ID NO: 21768 - DNA, 463 bp, Arabidopsis thaliana landsberg
  unsure (1)..(463): unsure at all n locations
ctcacatgctaaatactaccaaaaaataaaaaacaggatctttcaaacaaagttgtataactgctaataaaaaccaagttgtacacagtttcactttcttacaaaattaagagatgaataatgaaatcacatacctccaaggcagaacaatactaggaaacaccttttgtggactaacttttccattgcatttgtccatcaaatagaaaatatttttcagattttcagcaaatgcatattttccccacggaaatgttttgcacaactgtagatcggccacggccctaaggaaaaacttctccaccttggtgccctttctcatgtcttacactttccaatgattacactacttaagaaatagagcacaactattctcagacaagcctcagttgngtttttcattaacagtaactttgcctccactattggatattgaattgttgctccaagtccaaaatgcttg

SEQ ID NO: 21769 - DNA, 527 bp, Arabidopsis thaliana landsberg
aagcaaagaaagcttggtgacatctttaggtcatgaggacccggacgagagtgcatgaacctctgtagagtgccgccttcaacgagttcggtaactatcatcaattgtggttctatgcaagctccaacaaactatatatacatcatcaataatcatgtttatttattttactttacttttcaaaaaaaaaaaacatgtttaatatgtcattattataacattaatattgaaaccaccaatataaatatatatttctcaattttcaccttcacaatgttgtcatgtttcatcttggatagtaacagaacttccttttgaaacgtttttttgtgcgctttggttacagcggaaggtgtactcggatccatgatcttcaccgtcacgggaaattggtttcttagcctataaatcatgatagagaacatatcaaaacttagtgatgattaaactgattaaacgcatttgaattcatcaatataatatagcgagagatgaaacacacaatccttttgtagacaatggagaaa

SEQ ID NO: 21770 - DNA, 723 bp, Arabidopsis thaliana landsberg
tacattcactcaaattaaaccataaccaaataattctcttaaaagagctaagaaaatgcattcctctttgataaaattgggatttcttcttcttcttattcaggtatcattgtctcatgctcaactaagcccttccttttacgataaaacatgtccgcaagtctttgacattgcaaccactaccattgtcaatgctctaagatcggaccctcgcatcgctgcaagcatccttcgtcttcatttccacgactgctttgttaatgtaagataccattagaatcaatatattcatgtatattttaactcttttggttccctatagtgtagccctaataaagagcgcgagggaatgctttatggatattataaacttgaaattaggatataaaaatgtgatagactttttgttttgttgttcgactcaaatagtttgtttcatggtttattcatttcaaactgtgaaattattttggtagttttgttattgaaattttggctttcttttagttagttaaaaaattgaaaaaaacaggaatgaaagaaatttacaaaaacaatagaaatttacttttacatacaaaatttatgtctttttagttaaattattttttttgggaagtttgaattataccttaattttgactaggttttgggttgcaacttatggaagacctggagaagggcctatttttataaaaatgggacccaaccaacccttttttc

SEQ ID NO: 21771 - DNA, 366 bp, Arabidopsis thaliana landsberg
tcgcagacgggccggcgccactgcccgcgcggaggcatcgtgctggagtgaggacaagacaatccaagaacacgaacgccgccctcacgacgtacgacgtcttgtacgatcccccggtgcagtcggtggcgcgggaagggccgctgacatgccggacctgcgcgcggcggacacatcgcccgtgcggaggacgaacagccacgcccggaccaagtggcaggaggcagcgtcggaggcggcgcagaaccagctgagccagcttgccaggcacgctgcagctgacgacgcttgcggccgaccgggcccacgttgtcgaagttcgccccctccgcaacgccggtgacaacagccacccgcgcacggcac

SEQ ID NO: 21772 - DNA, 571 bp, Arabidopsis thaliana landsberg
tttttgtagcttcggtgaaacttgcactgcgatttttagctctgcattcccttaggaacgtcttttgagctttaccgatttttgagcttcgtaagtctatgaagaagatatatttcattctgacaggatcgaagctattacaagaaattaaaactaggtttacattgattgttccttattaaaaacaaaatgacaatgaatcgtaaaaatgtttcagaggtcggatatctctcaatagatgtgctttgattctggcacattactgttgactgtgcgagcttcggattcctccctgaattcccgttgctgttgagagtgatggcgcccttcttgctgctggcttctggaataggtcggttgtagtggtggcggaggcgggagttgtggctaggaagcctgtgaatggctagccgaagcgacagaagctgcaggatgattgttcacttactgtggtatgtaaggagagtgacacgaagcagtgtgtaagcctgctttggctgattctacgagcttcagcttctgcgtactctttttgcttctgaatggtgaagtggcacattcttgtagtatg

SEQ ID NO: 21773 - DNA, 556 bp, Arabidopsis thaliana landsberg
  unsure (1)..(556): unsure at all n locations
tccaacctcctccccacgggcttcttcccttaagtgatatctgccttgttcctcgagaattctcttgcagaagacttactcgactttcgggatcgagtatttccagctggagagctgaaggtttcttcttcttgcatcacttcctcctcttcgctcgattcactatgattgatctcgaaacttgtttgatctctcctactcgaccccaagggtgatggttaagaaggtcctggagctgctgcatgcgaagaaagtgttgggtactctttgatggggagagagctttgttccgaatctttgacaaaagcgagcgcctgttcatcgtcaagaacaaaggttggagaaattcaaaaccanaattcagtagattaggagattgaatgatggaagaaacaaataaatttgtgaaaagtttctgataagaacgggaagtgaaggagataaagagaggattgtagggattcgagatgaggatgctttggtatgggagatggagagatgaggttgttgagttagggaattgcaattgggggacanagtgggtatgggggggggg

SEQ ID NO: 21774 - DNA, 1256 bp, Arabidopsis thaliana landsberg
aaagctgtgaatatgcactattggaaccatttctatgaactgcaatatcaaacggtgacaaacaactaaaaattatcaaacattatgtagtacgtgaatatttctatttggctatttctaacaaaaatggttccggatataaataaaatcgcatatgaactttaatatcgaatgtttggaattcaatgcaaagatccatcgaggctatctagagtcaatatattagactaagatgaaaatgtatgtggtgatgatgatgatgattcattgccatggccatgaactcttttcttgttttgtatgatactatatatctatcttttatctttaataatactatgaatgtttcttattatcataaccaacttgaaactattaaattaaacttaaagtacccagaagtgttgcacgctgtgtctgtctctttattgcctttaacaaaagagaatccatattgatttccatcttacattatcctctgtatataaaaatggtgtatgtgaataacttagcccactaaaactaaagcaaactctcttttttttttctttgcaggatttcaagttcgattcagaaactataagacttttaagataagtattttttgcagttatttaattattcatcttggccttcaaaatgcacctttatgttccatctcacaaattcttttaagcaaagtaagttcatcatttttctcctctatatatgtgtgccaccattcctcttatactcgtacctttccccaaattcttgaccaaaaatatccgcgcgctttctctctggtttcatgttttcccctcaatgaaatacatacacattttgattttatttaaatcaagatcgacgtataagctatccaccaatcatatttaagggttttgtatacatatatactatatatatatatatatatatatggaataatagtcgtgcctggctccctgtatgccacaagaaaacatcgatttagtttcaaaatcgatcactagtggcgtacagagtagtcaagcatgaccaaagcttatcttaatatctactatatatgagtactttgtctccatagcacagcatacatgtgcaaggatgatatctaattgtctataagcgttttgttatatgcatgaatgtgtgtaaagggtactattttctgatactcttatcttcattgtttttcgaacattctttccttcaataatatttgaactgtagttagcacttactactatataactaagatgtcaacgaggtggttc

SEQ ID NO: 21775 - DNA, 341 bp, Arabidopsis thaliana landsberg
cttaagggatttgtgattactactgtttcaggatccaaagtttcatccagagttatctactagttaccaagctttaaagtgtaatcctgattgtaattgtgatgatgaggggaaattatgtgtttacgaaagaaggtatgcggagatgagttcgagtagcggggttttgagtgaggatttgatatcttttggtaatgagagtcaactttctccgcaacgagctgttttcggatgtgagaatgaggagactggtgatctttttagccaacgtgctgatggtataatggggttaggtcgtggtaagcttagtgttgtagatcagcttgtcgataagggtgtta

SEQ ID NO: 21776 - DNA, 568 bp, Arabidopsis thaliana landsberg
  unsure (1)..(568): unsure at all n locations
cgtaccaagagttgaatctgaaacggtagccttattaaaggaagagaacttgcaacgctcttcacaaggggtgcaaaaagggggagtcataccatcgttggcaactagttcagctttgccgtatttgtttcctggcttgaagtgatacatgtcttcaagtacacatttgatatggagagtggacacacaatcatcacaaccataaaaccatacgctcggatctgtctcttcctcacaaatatcacaccacaatggaccgtcggtgtttccagctccatgatgcaacgataagtcatgaccgtcgcatgtatgtttcacttttgttggtaaagtggcacaatccatgcctaaatgaaactcacacacagtacaacttaagacatactgtgtaggtctatcacatgctccacaaatatgagacttctcttctggtgaaaagatgtggtataaaggatggggatgcagttcatggtgaaaaggctcagaaatggatccacaccgcacatcaaatttatcaaacgttgtcttgtacctgaagccatcgaataattnttgacaactttacact

SEQ ID NO: 21777 - DNA, 631 bp, Arabidopsis thaliana landsberg
  unsure (1)..(631): unsure at all n locations
tacaatggttgaggtggtgttacctcagttgtcagaggtgggttcctgctcgttgatgccatggtaagcatcccaattcattcccgagtactgcccatcttgatcccactgattttgcccgatgctctgctcgttctgaacccacggatcctgctcgacactctgctcgttctgaaccgacggatccagctcgacactctgctcgatatcacgtcaagtatcttggtcgagtgatcttctgctggacataagaaggtccttgctccttggccgaacaattcttgtttttctccttctcttctgctcgcggtgctcatgagatgaatgtcttgcaggagcttgagggcgacttacctctcgttgctcataggcagattgccttgaaggtgaaactctctgccttcttgaaaccacttcttcagggcggttttctctcaccatggtggcgcctgaagatgaacaacnnnnnnnnnnnnnnnnnnnnnnnnnnnnnnnnnnnnnnnnnnnnnnnncctgtcttgaaacttattccaagcactcatcgaaccaatgttcttatgcgcaacagtcagactcttactcactcttggtggtggtttgtgtcttcaaaatggaccntactagcatgtag

SEQ ID NO: 21778 - DNA, 492 bp, Arabidopsis thaliana landsberg
  unsure (1)..(492): unsure at all n locations
taggatctttgaaacgataattgcccttggcttgatctgcagattaatgtgggaacagcttaacctgtgggaaggttgttaaagggtgaggtctttggttcgaggaacgccaagcgcaccaatgacctacctggtggatttggtggcccaaggagagaggttagggtcgatgcgctgcagctccaataggatgccacgtggcagagtaacaacccgtcccgtggtacccgcccatgtggccacactctgccacgtggcatcctgttggcgggtcccacgggacaggttgttacacaatgtctctttattgttttagatcaatgtgtgacataatggaaacaagttatggattacaacctacgttgaatgttagcattgaagagtgtgttgccgtgtttttaccggtatgtggatacaatgcaggtcaaagagatgttgggttgcgatttttgnnnnnnnnnnnnnnnnnnnnnnnnnnnnnnnnnnnnnnnn

SEQ ID NO: 21779 - DNA, 550 bp, Arabidopsis thaliana landsberg
gcacaaaaagcccttatcatatagacaaaaaaagtaataataagaaaattctaagttttaattctaaactaataaaagttagcggacaactaagttgcaatacccgaaaatttctactcgttatcaagtaatgactattaaaaaatagcaaaataagaaaagtaaaatgaaagtagtgtttaatacattaacatgatttttcatattttttctttttgatgaagatatttagttaagaatgggattaatgggtgattcaatgcaatgtgaatttttttttttatcactaagttttgttattttttttatgatattaatttagaatgacatgtggcactcattggtgtgatgatgtgttactcatatggagagtgttggccaactttcatatatatgattttatcagagatcatttctaaactagacattttaaagttgtgtattatctacctaaattatccatataaaagatggaatagcacattgcaagtattatatcgcatttattctttttagatgtttcctaaagcatcaatctatatgttgcatg

SEQ ID NO: 21780 - DNA, 589 bp, Arabidopsis thaliana landsberg
  unsure (1)..(589): unsure at all n locations
ggctgtcaatggcaatttttgttgaacaacctagaccaaatagagtagtaggatgactactcattatgttcttctctaatctaatagtagatgagacttgagccaaagtttttgtttgtcaatgtcttatattctccaacaatgtgaataatcgttctcattgaagagcacaactgtaatagttttttttgccttatcagcacgtacattgtttaaaaaataaagtaaaacgagaaaagttagactttaaaatactaaaatcttctaactctgaaaaaataacggactactcataaagagtctgtaaaagttgtgtcaactccttacaatctatttcaaaagtaatgaaataacgttaaaaatggataagaatatgagnggatcacatcagctagaggagaacctcaaaattactgttaattaaaactctaccattttttttatagaaaatacacaacatattactacataatctttagattataatgataacttccgtaaattataatttttttatggntatatactntatacaatgcaattccccacctttctttttctttgcacaattaaaataactaaaataaat

SEQ ID NO: 21781 - DNA, 584 bp, Arabidopsis thaliana landsberg
aaagcgcctcagggacttcacaaaattaagatcttttgtttctcaaaagattcacataactttatacctagggagaactacgaatgtcttgattccttcacagggtacgtaggcaatccatcatggatgcagctataccttctaaaaaccttaattctttctctgttcttgatcaaaactctaatctgtttcacaagggattagaatcccctttataattgagtcttgtatgaaatacctaatgaagagaaattactagatttgttttcctcttttaaacaaatctattgtgtgaatccttggttcaacaattttcctgagaaaaaaatgactagatgtttgcgaagtaatggattgagcacaactacaatgggagtttcgttttttcagcgagaaaaattcaagctttgttaatggcaatgtgagtgttttgaaggtgaatgcaaaacatctggtggatctagtcaacaacaaagtgatggattttggaatttataactggattcgagaagcacgttactacaaagtccttttgacttgttattattgatacagctccaaaaaaacatgatacctgataatat

SEQ ID NO: 21782 - DNA, 512 bp, Arabidopsis thaliana landsberg
tgcgaccgataaatattctccactctataagttagtttagtgtcgaagttcttaactagaagtgactattaatgccagccaaccaaattatgttgtcacccatttcagttccaaattatcatccatggacattcttagttatgaaactcctcgatttatttagttataactaagaagtttaattaaggatgatttgagatcttatactgaactccaaaacacttttcctaaacatgaaggtgcgggtgatttgggctcggacttgggcttttccaatccaaaatcaagtttcacttttagttttcaatatcttattatataaaatatggtttttaaagttgttaattcataggattgtgccacgtgtcaagtcaaacgatcagatgtttacatgtgtcattccaaatttaacttttttattctctaaaaaaatagaaaatcttaaaaagtaaacaaatttacatatactaattcatatgtttatatagttataaacaattaacatttattca

SEQ ID NO: 21783 - DNA, 732 bp, Arabidopsis thaliana landsberg
gaatagctttctagttgacgaaaaaaattaggtttctagttaataaaaattagaaaaaactatcaaagttaaaatgtaaaatcaaaataatagttttttactactaaattttcattagttaggtcaaaatcaaatttaggattgggtgatttaatcccggttaattctgactacaaaatggttaattaatatatataattcagtagttgatatgtttctgcatacattgaaataaattaaactatcacaatcgaaagtcgtaaaatacgattgatggatgcgattattctctctcgttaatcacgaagataaatctatttgtttcacttttacggaaagggcaacgagttaatttgtacatggttgtgttagtcatatttaatatgggctggttttactctttttgtttgtcaatgagctagttttccatttgttacaattatttttttttttatttttttttgctaagaatgtaaatatttcattgaaaaatgaaaaaggtttaggagatacaattaagtaaatcctacaattttggtctcatggcaaaaaaaggataaaaaacatggaagcaaagaacaatcagtccaatcgacatcaacaaaagaaattactcttttggaatcaatgaagtgataaaccgattttaaatattaacttaaaagacaccttaaggaacaagaaacgagcttccaaaacgcaaagaccgaatcaacaaaaaacctagcggat

SEQ ID NO: 21784 - DNA, 341 bp, Arabidopsis thaliana landsberg
cctttggaaggatccctgagttcgcagtatggagatgtcgagaaagagataacagtatttggagagaagaagagtgtttcacctttcttggaggattacttcggctacaaacatgactccttggctgttgtagcgtttgtcctcattgcttttcctatcatcgttgcttctctttttgccttcttcatgagcaaactcaattttcaaaagaaatagttctttttatttttgtcagttaggcttttctttctcttatgatatcatcataaacgttttacattttctctatctggtctcaaaaatgggcaattgtgaagcacacaaagaaccagtttttgaga

SEQ ID NO: 21785 - DNA, 481 bp, Arabidopsis thaliana landsberg
atctgttcttgaacaggcacttcaagtaatctcatcccagcagtcgccattaacctaatgtcactcctcctgaacattctcttgggaatcctctgcttggcgaattccacaagcttcgtcactgacacgcttgctccctccggattatcagcatacgaagacaaaccaggagtcaacttcagattagcgtaatgtttctctccgaaatcgaaaacgggttcccggactcaaaccagtacccgaacacatgaacccgggtccctgaactccctgcgtcgataaggacgctgtaccggagcttacatctccgactaagcaaacttccggaagatataacagaatttgagttgaaaacatataataataaccctaacgtgatagtcacggaaacgacaactagcaggatcaatgatttcgacttggccttcgtgactgtgtagggcaatgactggtgcttaggtaggacttgaactttgagagc

SEQ ID NO: 21786 - DNA, 529 bp, Arabidopsis thaliana landsberg
  unsure (1)..(529): unsure at all n locations
atttcgacataattgcacctatattataactcactaataccatttgtacctttctgtcctattgtatctcaataaaacatttgtaccgcttatactattatatctcagttttaccatttgtcctagttcgtcaattctgggtttcacaaatcgttaatttcgattgaacactcactaaactctttgtttcaaaacaatacaacagcccagaatgaacaatacaacaattttatgttattaacaactaactccaataagaaattcacattaatctacaaatcaaaaggagatcggatttacttttgccgttgaggaggaagctcactttgggagcagattatcggcttggaagctacggcgatctcggaagctaactcgccggtgaaattggagctcanatcgctggcgaaatcggagctcaagtcgccgacggcgaaataaaaaaaaatcacgtcggagagtaggttcgcgattttgggggatgaacgtaagtaaccgtgattctttttttttttactagatcatttac

SEQ ID NO: 21787 - DNA, 881 bp, Arabidopsis thaliana landsberg
  unsure (1)..(881): unsure at all n locations
atacgacctgtgaaaccgttgtttgacgtattgagcacaatcagttccttaagtaaaccgatggtttcaggattacgtccttcgaatctgtttccagagacatccatggttttgtaaatcgtgaaaacactcccaaccaactctattatcgatcctttgaccgtcatagtcactgagttataatagtttcctgagtcacgtcccgcatacctnnnnnnnnnnnnnnnnnnnnngtctacggctgatgacattgcactccaacccgcaaagtaatctgatcgaatgactccattgaagcgattttccgaaatgtcaaagattcgcagttttgggaagctcaaagaatctccaagagaagatattggaccatggaactcgttagaacgaaggacaagaatctgaagtttgggcaacattctcaaccagaatggaaacttgtcattgattatgttgtcttccacgttcagaaactcgagacgagtgcagttgatcaaagacttggggagttctcctgataactggttgcgaccaacgtcaagtgatcttaagtgatcactgatagattcctctggaaactcaccggagaagttgttattccgaagatgcaagaccgaaagagtagtattaaacttctcgaaacaccgaggaatggagccgttgaagttgttgttggataaatcaagtgtatcaagagaaaccaatttgcatatagtcctaggaatctctcccgaaaaccgattatcagagcctaaaaagattgttgtcgagtttggtaacaaaggccacggatcttggaatgtgtttgaacttatgtcaagcataaaaaattctccacatctttgaataacatttgctggtccttgtaaagccagtgaaaaact

SEQ ID NO: 21788 - DNA, 469 bp, Arabidopsis thaliana landsberg
tttcgatttgttcagggttgcttctcggcgaaggcagggcctggggcgagctggaaatatgttcgccgttggaggggagcctcgggcgagacggacatcctccggggtcggctgcccttgtccgaggctaggctcgggcgaggcgtgattgcgtccttcgaatggaccgatccctgacttaatcgcacccatcaggcctttgcagctttatgctgatgggggttaccagctgagaattaggagccttgagggtacccctaattatggtccccgacaatagtctaattacaaaactaattacacagatgagaactaaatgattagacgaacctattaaacctaattagcatatggcttgctcatgtgatactaccgcgaatatttgctaatcacggattaattatgcttaataaatttgtctcaacatttagcttttagctatgtatttcattttataattagaatatgg

SEQ ID NO: 21789 - DNA, 1524 bp, Arabidopsis thaliana landsberg
aattatatataattttaattaacaaaatatttttaaaatgactaataacttaaaatagataaactgtttgattatatatgtaaattatatatttacatatacttagcttaagtaatttttgaaaatcttgtaactattacatttcaataagtagtaaaatcatttaaaacacacaaaaatgatatgatataaaaatcagtattcttgtcaaatttggttagcgcacacatgccattacttgatagtcatatgggaatgtattaattaaattgtaaatattgatcaagaatcctttttattaataaacaaaacacctactgtcttttgacaaacatcttatagtgttggatcatgtgcctaacaataatctattgcatttcgtattaaacgactttaattcacacaagatacatatatatatatatatataaatatacactgatatatatacacatatatatatactacataaattgtaccaatccaagccaataatcagaaaaatatttgtagtcctagatttatcttacgttggttattactattagtgcaaaaccaaaaataaaaaaaccaaagaaaaaaacaaacacaatcaaattagaaatgaaagttgaattaaacaccttatttactatataaacacacatatatacttacttatatagatacatacctcagcaaggagtttcttgttataggcaagtagagaatcattgtcggatttaagagactcaaactgtttcttgagtgaatcataatctctctcgagctgtctagtcttccacctagctctcctgttttgaaaccaaatcgcgatctgtcttggttgcatccctaatgctttagctagttgtatcttcctctctggctccagcttgttaccaagctcaaagctcttctctaatgccttaacttgctctaattgcagcctcttcttcttctctcccagcatagtatgtgccccatcgtctgatagattctcttcatccattgtttgattatgatcttcttgcacgttcattaaagacatagatctgttcatcatgtagtttcctcctcctatatacaccaacagaattcatgactcaaatctatttatgtggagaaatagtgagagaaagagagagtatagtaccattgaagagatgaggaggacaagaagggagctgatcttgactgttgtcttcatgaagttgttggaacataaaaccatgttgaggaaacgccatctctaatctcaatccagcttctgttgttggatcaaacacatacatgtatgtattccaccaaaaacctatcagtgattaatggattgtgaaatcagtatagtgatgatcaaatatactttgttgtttgcagatttggaaatcactatcaaatgagttaggtgtttcttgtggatctcatcaacctctcatataagagaaagagagagaaagaatgaggaaaggatcaagctagggaggtttctaggacccatccttaatattttaaaagctttaggcttatattatatttcatata

SEQ ID NO: 21790 - DNA, 502 bp, Arabidopsis thaliana landsberg
cttaacgtaccttgagggcaacatttttttgttatttaattaaatttgaaataaacaaattaacatgacatacaaaaacttagcgggacaatcaatactaaatagtgcttaaactaaacgaatggtagcgacgtgcccactagttgtcaacgttaacgtcagatatgataatataaatgaacaactatattgatccattattattacacaaaaccaaagtgattttattccaacaataaatttgcattctctccatctctgctaaccgcaacagccatgacttatgagctagaaggacacgagcatcgtgtatccgacgttaacgaaggttttgaatgcgatgcttgcaatcgatcctacggtgatggctactcatgtggtgaatgcaagtttacggtacacaagaaatgtgtattcgtgttcaacatacaagcgagaatcaaccacccttctcatgatgggcattgtcttgagtttctgactaccggaagctctgatcaca

SEQ ID NO: 21791 - DNA, 381 bp, Arabidopsis thaliana landsberg
gaatcttcatacttaagcacatccaggcaataaactcgaaagagagatcatctttcctaacaattttttgactcaataaaatgactcaaaaaataaaataagagtaagaataagacaaaaaaaaaaacgtagatagtaacaacctccccaagacttaaaagtcactatcctcagtggcatttaaatctatagtaagcgagaaaaataaaagaaaaatgaaaaaaaagaaaaaaaaataaggaaaatcataccagtgggttgcctcccactaagcgtttttttatagtcaatagcttgatttggcggagttcaggacttggatggataaacatgggacttatgctgcaatctcgccttccaaggcggagtgtaaacagatct

SEQ ID NO: 21792 - DNA, 640 bp, Arabidopsis thaliana landsberg
tgaagtaaagcttcacggacgacgcgggtcaagaacaagaccccggcacctgtgcaaatcactgcagagcaaattctaagagaagctcgagagaggcaagaagctgagatccgtccacctaagcagaaaatcactgattctactgagctttccgattacagactccgacgtcggaaagagtttgaggaccagatccgtcgagcgagatggaacatccaagtttgggtcaaatatgcgaagtgggaagagtcgcaaatggactacgcacgtgctcgaagcgtgtgggaacgagctttagaaggagagtacaggaaccatacgctttgggtcaagtacgcagagtttgagatgaagaacaagtttgtcaacaatgcaaggaacgtttgggatcgttctgttacgcttctccctcgagttgatcagctttgggagaagtatatttacatggaagagaagcttgggaatgttactggagctagacagatcttcgagcggtggatgaactggtcaccagatcaaaaagcttggctctgttttattaagtttgaacttaggtataacgaaatcgaacgtgcgagatcgatatacgagagatttgttctttgtcatccgaaagtatctgccttcttattccgatact

SEQ ID NO: 21793 - DNA, 441 bp, Arabidopsis thaliana landsberg
cacctaatcaacgatgatcttaacgaaactgctctgttattttttttcaagcaaaactctgtaaaatctgatcctaataacgttcttggtaactggaaatacgagtcgggtcgtggttcatgctcttggcgaggggtttcttgctctgacgatggtcgaatcgtcggattagatctccgaaacagtggactcaccggaaccctaaacctagttaacctcacggcgttgcctaatctccagaatctttacttgcaaggaaattacttctcctcttcctctggaggagattcctctggttctgattgttatcttcaagttctggatttgtcttcgaactctatctcagactattcaatggtggattacgttttctcaaaatgttcgaatctggtttcggttaatttcttcaacaacaagcttcgtcgggaaattaggttttgc

SEQ ID NO: 21794 - DNA, 2692 bp, Arabidopsis thaliana landsberg
gccttcgtagcacttggcttatggcacttattcaacaacataaaactcttttgtctccatccaaacacattcagttcatcaacatggttcccaatttcaaagctcagacacttagagctctacttaatcatgctatcttcaacagcctccatatccatggagctcttcattggacctagaagacaccatccctttgacgtcgatggtaccatcccatcgaaccacctccacaacttcgaacattcttccatctccatgtccttcttagtctatgccgttttggcattagtcctggatcgagcacggcctagagccgccgcttctgaggggctaaccatgctagctgcagccgctgccttcagtcaacagctacttctctttcattttcactctaccgaccacatgggcgttgagggacaatatcatgtgattctacaagtcgttatcttcgtctctctccttaccacaatcatgggtattgttctaagactctaataaatctagtatcttaaatttacttatatttgtgtatatatatatatatcataatatatataaagggatatatatgttgttgcttgttggttttgccaattctataaacggtccaaaaaaatcctgaattttgaatttatgtgttctaaattttgtgttgttttcctttctttctcaaatcaactaataactactttaattcttaacatcaaaaggtattttcttgcccaagagttttctggtgagccttgtgagatcttcaagcatagcctttcaaggcgtgtggctcattgtgattggttgcatgctttacagaccgagtttgatccccaagggatgttatattcacgatgaaggaagacacataatagttaagtgttccaccgaagaagctcttcacagagctaagtcgttggtcaacctcgaattcagttggctatttgttacaaacacactatttgttgtcacactatatttgattctcgatcgtgtttacggtgaaaacgtagagtactctagtctaaccaccaataatcaaacataccaagatgatgaagaacaacacttcgaatcgaagtcgactcagaaaacaagttttgtccaaatgggtaaactcgttggacatgggcagaaaatgtgagaaaagtggtgatggttaatgttatttgttatgtgtgtcagtgtgtgataaacaaaatatgggttgattctactaaagccatggaccttcgtaattactgtgtaatcttaccaactcaacttggttattactggttcatataattgcttaattttaatttttttgtaattgttgccttgttggatgtaaaatagtttcgggttccaattttaacatagaagtaaactaccactacgattaccaaataattaacatatatatatatatatatatatatatatgttcataagaaaaccatgtgtacattgctcattgggaactgaacgtttaagttatgatagtatatagtaagcaataaatattcaacagctgtactataattaactaattaaccttttgcatgaaacatgttggttttttagtcgaagacgttatgtaaatccacacttgagaaaaatgttctcctaatgattctgctatttcagcatatcttatgcgtgacgtgtactttgtttctaatccaaaaggtacgctagtcattacaacaatacaacttcttaaacatgataagatttaataagattttcttttcattacgtcgagattgaaccaaaaacaaacaaagagaattgcacttgcgtctcaatttgtcgataatttcctacgatataaaatacttaattcgttattgggctttttaactctatttatatttatgtagattaggcccaatacgccttataacatattaacgatgtcgtttaagggttttctatctgttacataaaaataaaaatcagtcgtctagagaaatctcggaagattctccggcgatacctcctccgcctctggactcccgtaaaactcaaattagcgattctctgtcgacgagacaaatattgtgttcacaagttttcgactttagagttcctgcctgaaccaacgatcatcttgatttagggttttctgtttctcttcgagtattaatggagaatcaggaatcggacgagccgatgcagaagaagcctcatcttttagactccgtttctccgaattccatggctcgtaactcttcaccttctcaccctatagctaaaagtgtaagctttttcgactgtgacttctcgcttctctgtttaaggctcgttgattatgaaattgatgtttttggaatctgtgaatgagttgtctctgtctggcgtttgtaatatagtgtgcaatgtctcagaatgatacaaataaggaactatgcaagagtgagtttttttggtacatgtggtttactttggagttccttttttcaggttgatgccactgttctacagttacagaatcagaaactggttcagcaattagacctgcagaagaaacagctgtacgatgttgaaagcaagatccaagagttgcagctcaaccaaacgtcttatgatgatgaacttatatcagtgaaccagctttggaatcaggtcagcagttactttctgtctttatagaacgactaattgcatcgtttaatgtttaactcagagggtctgttgtttaacttgtgcattatga

SEQ ID NO: 21795 - DNA, 107 bp, Arabidopsis thaliana landsberg
aaaaaaaatgggattgaatcccataaaggaaatggtcacttaaacttattggaccgcctactccaacatgaactggtccgacctgggaattgagaattacaaactta

SEQ ID NO: 21796 - DNA, 1581 bp, Arabidopsis thaliana landsberg
  unsure (1)..(1581): unsure at all n locations
aatgaacagacacactggcatccaaggcgccatcgcaaacgggactccggttccgtccccgagggtacgagcgacctcgggcctgcggggcgacgaacgccggaaggctcgccagcgacctctgcagcggcagccatggccccaggtgaacgcggtcaccggaaggctcttgttcgcggtcccactcaagggatgcgaacaagccatcaaagccaaagagcgggccgctcccaagcgctccggtagatcctcgctgccgtcctcgccccgaatgcgaggggggagacagaatgttgcatcctagctggacagcaacagttcgccttccccggcatgactggaggacgactccgtcgtagcgcgggaggacgattgccaccaccagaagctggaagaagngggtgcctccggcccgcgcgggaagtagagccccgactcgcctcgctccccgccctagcgaggatgacgaacaccctcgacgctgagggcgggaccgagatcacagcccggcttgcctctccccatccgggggctagaggtcaccgtcttgggtgaccgccggtggagggatgcagccgggctgcatgatgaaaatccttgaagccgaacgatggctgaaaggtaccaactcccacggagttgcgttcctccaacgatgagacggaaagacggcgggtatccccatccgggggcttggaaggtggaaagacacgatgcataagggagcgcgaagacatggtcgccttccaaaaggggtcaccctccttttaaaggcgactctccctacttgcgtccccagccgtcgtgggctgagtcttctccaacacgctccaaggtcctccccctacggcgcgggggctgggtcccacgcatcatgcaagctggcccagagcagaagaagccagaccgccgcgcgtggtgcatgcaactgcccagcggtcacgagcattcctccaccttcgcccagaccagcgggcaaaggggcgggcagcatgcaggcggcatgcaaccgcgccaagtgggccgcccctccgacttccaacgcacccagagtgggggcccacgcccacacgtcacgcaaccggcgcgccggtcgctacgtgcaagcaaccgcaccgccactcgcaccactgccacgcctcctcgactgcggaaccagtaccgcgactcgaggcgacccagcgcacgacccagcagcgccagcctggcgcgacggtcaatacgaccaaaaatgggcgacagtaatggcggtggcaggcgggcaggagcagcggtcacgtcgtcagccaagcctacgtcccatccaggggcgacgagagaaccctctctcacggcgtgaagacaacgcgcccgtgttccgttcctcgaacggctcgcgcacgcgcaacggctgcctcgcgaaccactcgccccgtcgcattaactccgcggcgggacaggcggcgcctctggcaggagaagcgggcgacgcttcgccttcgccataatgaccgcgtcaaaaaaggtacgtcgcgtcgttcgatttcgtatccttttcctttttcctctttctctctcttgccccagggaccggaaagggga

SEQ ID NO: 21797 - DNA, 525 bp, Arabidopsis thaliana landsberg
  unsure (1)..(525): unsure at all n locations
ttcttgtggccaagacaatcacaaagaaatcaacacaagagacacatgattttatcccgtggttcagccaagtaacacttgcctactttcacgttgtggtgtcccaatggacgagggttgcaccaacccctttcaagtgctccaatgatcaacttgaataccacgacttttctttgcttatctctttttcccgtttgcgaggaatctccatgttgggggccttcgtcttccgaaggtcctcaaaaacatgacttaacaatgtcttctaagtgtgacatacatgaacaggtaccttcagactcgggtcagaaccatagtgtgagaagcacgaacaatacgaaggttgacgcagcgccgaagctacgcgcaaggaagcttcggtatgacagcaggaaagggaannnnnnnnnnnnnnnnnnnnnnnttagaccttgatggattaccttagggtcattagcaaatatatagggcatggatgtaatttcacatgggttgcgtccagtgcctataaatagtgaacagtac

SEQ ID NO: 21798 - DNA, 291 bp, Arabidopsis thaliana landsberg
gtgcccttctggctgctggcttcgggtatgagtaggtggcaatggtggtggcagtgggagcttaggccaggaagcttgtgaatgacttgccgaagcaaaagaagctgcaggttgattgcccacatattctggtatgtagggagagtagcacgaagcagtatgtaaaacctgcttcggctgattctgtcgtgcttccgcttcggcaatctctttttccttctgaatggtgacctggcatgctcctgtagtgtggcccttatcttcaccacagaataagcaatagagttttct

SEQ ID NO: 21799 - DNA, 742 bp, Arabidopsis thaliana landsberg
cccctgcattagaaattttacgcttacgtaacgttttggactattgcttgatagagaatatttcttgccttcatatagcaaaactcggctatgttcataaccccgatcacaagtttctgagatctctttcttctgtcatacatatgtacttgtatttgaccaagccaatggtaccgattacatatctccgatcctcttcttttccttgttgcttagccaactaatgttatatttttttttaatcacaggttgcgtggtgtaacaccatcaagttctctcggctcttggagttttattttgttccaagcaatttggtagattggttggaaccacttatgtatttgcttcaaaattctcctaaactacaaattcttacgattgacactgtaagtataccatcctcctccccttaaacacaagtgcatctagtttatagatgaacttaacattatagcaaatgtattgatatcaggattctacgtgtctcccaccttcatggaaccagccgagttcttctactattcccgaatgcttgttgtctcatttacagatctttaggtggggaggctatggaggaagagaagatgagaaacaactaatgacatacattctcgctaactcaaagtgtttaaagagagtggcgatctttctcttagcaacctgcaatcttgaagagacacaaatggagttagaatctatgcctaggaactcaacatcatctcaacttctaacctcctcccat

SEQ ID NO: 21800 - DNA, 402 bp, Arabidopsis thaliana landsberg
aaaatctgaaaatttgaatgagataagatgtaaggatacgtttttgtgtgcgatagatattacagggggaattggtaaggatgtaaacttttgagagtcgtttttaactaaaatgaaagattgttttttagttttgagatttataaactaaaatgcaaggaaacaaaagacaaaaagtttacggtaataaccattgggtcattacgtaattgagagattaattatatatatgaaagttagccaactttctccgtatgggtgacacatcattacacaaaaaatgacatgtgtcatttaatattgattaaattaaaaatcagcaatcattaacacatgcatgaatctcctgctagcccatatcaaaagaatttcaaaacttttttacctcatacagtgatgagt

SEQ ID NO: 21801 - DNA, 603 bp, Arabidopsis thaliana landsberg
gacagcccatggaagaactgacccaaaccagaaaactggaatctccatcattaattgtactattggagctgccccggacctcgcggctgaccccaagtcgaccatgacattccttgggcggccatggaagccttactcgaggacggtctacatacaatcgtacatcagcgatgttgtccaaccggtagggtggctggaatggaatggtacaaccgggctagacacgatctcctatggtgaatttgacaactttggaccgggggctgatacaagtaaaagggtccaatggtcagggtatagcctattgaacttggcacaagccatgaacttcaccgtatataatttcactttgggagacacttggttgcctcagactgacattcccttctacggcggtttgcttcacaccgaatgaaaatttcttaaaatatcatagatacttggtcttgcctcaatttcaaatgcaataaaacattattcatttttgttattcgaaatctacatatggttttaattaattacttgctacgataaaagattgaacggttcatgtattagataggtatatcgatgttaaatctattatcagcaatgagaaaaaaa

SEQ ID NO: 21802 - DNA, 784 bp, Arabidopsis thaliana landsberg
attacaattggatttcgtggatattattgtaagctgcagggaaaaaagagtgagactgccccaccgtagtctaaaatgatttagcttaccactctgcatccactgtttccctttaatattttaatcattattttagtagaccaaaactgtttagtgttgaaacttgtgcatccacatgagtgttggttaaaggttgagaacatcgatttgccaaccatatctcacagccacagccatttttattctctctcggtctctcttctcagtctctcactaacacagcctttagttcgagaagaccgaagtggacttcattttcttgtacgggaattaaaatattgcagattgacgacatatactaacatgaatcatcggaggagtatatttgccaggtacttcttcgaagttttgattaactattatttcatatttggttgtgtagtgatcatatcttgttgatacaggcttgatagtacgggagttgatggaaaattcaaaagtgttagagggcgcttgaagaaggtttacgggaagatgaaaacactcgaaaactggaggaagaccgtcttgttagcttgcgtggttgctttggctattgatcctttgtatctgtttatccctttgattgattctcagagattttgcttcactttcgacaagacacttgtagcagtagtttgtgtcattcgtacttttattgacacgttctatgtgatcacatcatttactatcttataaccgagccattgctctcgttctcaagatctttgagaggcgagattgc

SEQ ID NO: 21803 - DNA, 555 bp, Arabidopsis thaliana landsberg
  unsure (1)..(555): unsure at all n locations
atgatagtgcagaaatgccgattcagcgagggcaaagtagaatgagagctcaattaacggatacgcaagcgacaacattggaagaatggtttgggaaggactgtcaaagttgtttgaacaacgtgcgtggacaaagcctgccaggggtaggtatagtggacattgaggttacaacaatcgcagacgctgatgtagaaggtgagaatgatgaggaaaatacgagaatgtctatacaactggggcagaggatagggccaactatgaggacaaattcaataacagagacgctggatacgtgtgatttggtccctgaatctggaggataagtaggactagtggacgttgtagtgactgcgttggaagcaagtgcagctgaagaggaaggacaatgtgatgtagaggttcgtaatacatacagtgcgagatatgataatacatcaagggcactggcagaggacatgtcgagaagagtatcagacggagagactatatttagtgaattagcggnggacgagatgttgatgtgtagggatgccgttccgttcaaggacaaca

SEQ ID NO: 21804 - DNA, 1745 bp, Arabidopsis thaliana landsberg
tactatttttgaaaaatgtatcgtagcgtgcattagtagaagtagacactctcgcttccgcaacagatgcgggaacaaccgttatttagcccataccagaaagttatatcataacacctaatatccccccccatagaagtagttgacttcttatatagcattacggcaggaggctttgttgtggcctgtgccacaacaacatgaacacctcctctgtgaagcggtcttcttgcgctgaaaattagaagtatagcagctgttagcttttaaaaaacagaatggacaacaatctgtgttacttttatgaacttgccttgaattcaccacgaaacaaaattcttatcttccttggtcttcctggtggccggtgcacaaatggtggatgcacctcccctgtagttcctgaagcaattccgggtgcgaccttgccaccaacagagtgaattggatagatttttccctcgtaacttagtttaactagctcattaaaatattcgtttgctgctaaagaatctgttggaactccaagccgagcagcagctgctattgcgtgagcacaaggtatccctaatcccagaaattccaaacaagaacacgtagactcgtccaatttgacaataaaacattcaccagtcctaacttggacctggaactcaaagttgcaaatcggcttcacagacattgacatcgcggcttgatagtttttctcaactcgctcttgaactctcggagctaaagttgtagggcagtcttcagcttgagcccttttagaagcaaaccaatccatcaaggttgttcttatgtactcaagcatgcaaataagaggatactcgcgtgcctctcttataacgttgtttcacgactcacatatgttactatccatgatattgaaacgccgaccttttgaatgcactctggtctattctgaaaaccctatacacgttacaacatacatggttatgtaatttacaatcatgtcaaccactttactataactatatggaagctgaacaatataataatagagagtaaaacaaacgtacccaaatcaactaaataggcagcacatcctgggtttaatatttgtatcttgagaaaaatccaattgaaatcagtgacatgaaacgcttgtgcagcttcagacattagtcagagagggttttttggcttgtagagatgtctgacattccgccaaaggtgaacagtacaagcagcgtggttggcttacgtatagacctgatgccaaagacaaaaaatcaaactgtacttgtcaattgtgaaccagattctatatgtaaaataagtacatctctatcggtatactatttgccacaatgcttcaaagcaatgttgtttcttaccttactcaaccccgtgtatatgctagcatgtctgttagatataaacattaaatcaagattgtcaggagctataacgttgagccgctgaaaaaaccattcaaaagcgctatcattctcactgttaacgataccaatagcaattgggaagatttgaaaattcccatcttggcaacacgctgatataaaacaaccaccatatctcccgttcatagatgttccatcaactacaatgaccttccgcatgtattcatagcctttaatagaagttgcgaaggcgatgaattggtatttgaaacggcgtggaccattttgaacatcgtcatattctgtaaagcacagactccctaggtttgcttgctagagtagcctagcgtagcgaagact

SEQ ID NO: 21805 - DNA, 430 bp, Arabidopsis thaliana landsberg
tcaaaggcataagattatatcaaaaaaacacttaagtgaaatcacttaagcaaaccactagtaggtcatcagattacgatttattttctatctttaagttcaattatcatgtgagggtccaggttgctcttaaccatgagcacgattgacatattagttttacactctgcagaggtggcataactttacccacaagccatgtatcccatctagcccgggattgatcggacccataaacactgcctaggtgaatggcgtagggatccgctaaagtttccacagccagtactgtgatggccctcagcgtgaggtagcttaaccacgacgaccactccaagttagaatgagatgctaccagactaatgtcgacattcatgtcaatgtttgaggtagagctgccatgaataagtcttaaaagacaagtactaga

SEQ ID NO: 21806 - DNA, 1464 bp, Arabidopsis thaliana landsberg
  unsure (1)..(1464): unsure at all n locations
ctgagcaaagcctttgtttcatctcacaggtatcagattcaaccaatgtcgtggtttggttatcttatgaatcaatattatttttattaacacgtattgttcttactagatttcgtgttccagatcaggtcttgtttgtagaagaatatatattgaatttgtaatcaaaatcatggattcattataatgtatgaccgtaatcgttgctaccaattttgataatgattcggatatcctctagatctagctgagattttggagtgatttctacaagatatagctgagaatgtagtagatgtgaacatttttgtgaatatctgattcgtttaatcttcagacttcacttgctaagcttagctctttgttctaatattctctccaatggttattgtgttacagatgtttgacgatcaagatctgggattctttgccaatttcctgggaatcttcattttcatactggtgattgcctaccatttcgtcatggctgaccctaaattcgaatagaaatgaggttcagaatcattgttggtttctacaatgttatgtcagactcaacatgtcattcagattcgatacttgaagatgtttttttgtagctcttaaggaagatgtttaagcttttgtaatacttggttttagctgcagaaatcttttttttttgtagtgctgttattcatatactttgataattcgctataaaaggcttgtttctatagcaatttccgggtcttgcatgttaaattatgagcggatttgttatctgataggttggtgaaagctttgctgtatatgtttgtttggatttacatgttcattgatacaagaccaatcacgagtccgtgtatctgttagagctagagctagatgaactccagttaataatgagaattgttctgtttgcagcgtttctatgttttgttgctctagagaaacaatttgcttcgtttttgctcttttttagattaattttgtacaccaaacgtttcttacaaaatggtttgtgctataggtactaacatcctctagaattcttccaaaatcaagttgtatgggttatttctgtcataatacatattgtttcctgcattaatctgctaatgcagaaccctagactgctcagacatagggcagtttcactcttgaacgcatcgtctgctgtgttacaacttatcttgtctgttgcttccttcagtagcatgacgaaagaaaccgaaaacctctccacatcagcctggcttggacccagctccatgtatgagtagttgtcgtttgatgttgttcctgcttcaacatcatggcagatctttctcttctgcaactccttttggagtcttgcttgagacttggtttgagaaatctcttttaagcatttcaccgaagggtgaagcttttcttggaaggctcntagctcatgagtgatgttgtcccaaggaaatgcaagtgttggttgaactccagatc

SEQ ID NO: 21807 - DNA, 770 bp, Arabidopsis thaliana landsberg
agctccttggatcggtcatgagcttagagcagccattagagaatctaagatctcagtagtcttgttctcagagaactatgcttcttcaagctggtgtttggacgagctggttgagatcatgaagtgtaaagatgaacaaggactgaaagtgatgccggttttctacaaagtggatccatctgatataagaaaacagaccggaaagtttggaatgagttttttggaaacttgttgtggtaagacggaggagcgacaacataactggaggcgggcgttgactgatgctgccaatattcttggagatcatcctcaagattggtgagtttttatatattttattttcgtttggttagattctgtatgataaaccaaaccaagatagatctgtggtcaaatgggctcaatgagtttttttgtgcaaaaaaaaaagtaaaagaggaaaatatttagattgttaccaaaaacacaatggttttagatttgattttctaaaagagctatattaatctatatgctcagatgaatcaaagattaagaatatacgattgttttttgtattattagttttctctctatatttatgtaagttagacgaaaatgccctcatcacatatatcaaattatttagcaatgtattaaattgttatcgatattcttatcatcaaatacttcaggaataacatattataaattgatgattatctattaggttaacgtgataataatatatatacatgtaagtaaacaaatatattatgttaaaacatatg

SEQ ID NO: 21808 - DNA, 230 bp, Arabidopsis thaliana landsberg
tcgggagccttcgtccaacgaatatcaactaaataaataattaacttccccacttaaactttgattggttgcagcggacaaagcggtttaatttttctgcagtttaatccattttatttttgggcagacaataaatcgatgcgtaccaaatttatttgtatataaaaacgggtcgctgcggttttttttttttttggtacggactcctgcggattataattggtgaatgg

SEQ ID NO: 21809 - DNA, 1842 bp, Arabidopsis thaliana landsberg
gcacatccccgaaaacaccaatattcttaaagattccacattatttcctgaataaagaagaacttaaaggatcatggggttcccttacctcgccaacaaaagtcaagtaagtaccaatattaagagcacgcccatgacaatttttgctatctttttatttttttgtacgaatactcttcagatctttttcagttgatgtcaatccaaactttaatcatgagtctatcacaatgttgttgaagtacataaaacaaggatttataaacgagttaggagaattttaaaccacaaaagtaacatagtttcacagaattgtatcaaaatatcattattgttgttatatgtattcatgaagtgaaaaaatattaaaatcttataaataatcagctttatacacaaaatatataaattaatatatataatctcaaatgaatctaaccataaaaattgtaactacatattatggatctaattttattaacaatacaaaaataaataaatagtaaatataattagcataaataacaatcaatgtaattttttctttaataattttcacaacaaatccacgcgtagcgtgggtacccatctagtttctagtaaaaaaagaaatagataacactcttgcccaacacaatcaataacagttcaactgaacaacatatgaggaaacaaatcatacttgccgttttgctatcgactacaaacttcatgtcgtttttcatttagctagtgaactaaccaagattctagagtgtaataaaatattaaaatctataggcaaactcacatgaccaattaaacaagttaacgattactgtccaattaaacgtcacaagttaattttctaccgttaaaatattgccacgtaggacgcgtacgttaattaactcgtaaaatccgcgcagacaaaatcacattgaccgttagatatagatttggcggctagttcttcaatcaatataaaccgtccgtcaaaaatcagaggtaggcttttgacggtgtagttttattttaaaaacataaaataaattagtgtaagaaacttttttctctctctctgagtcttcgacttcgtttttatctccagctttttttttctcacgcgaaaagctcctgttctttaaaggatttgattacgagagtttcaggtttggatttcgtagtcaatttccagattctagggttttggttggtcaaaatcttctacttcgtcccgtgtttgtggattggttcacggatctttggagattccgaaattggaggcgatctttattctagggtttcggtgaaatttgtaccgttttttggattaattcttacgttgatcgcttctctcctggcgagctcgcttttaaaggtttagatttcaagctccgtggggggtattttgaagctaatttatctggtggaggttgaattttggtttgtgaagaatttgtgtggattcagctgttggagattcaaatggtaagattcgatctatttttgatttgtgggtttttcttaattcgaatgattagaaaaaatagagattcatttgaatttggcatcaagctagggtttgagttttggggtccaaaaacgaaattggacagctaaaggtttaatttttacggtcatatctctcacgtttttgagaatcggaaattcttatttcacattgtttagatctggggttcttgtgtcacaacaagtttcttggcccaatgttatctatcgaaatagggaaaagaatcgtcttagtggttttgaatgggactgtattagtttttgttgatttaagtgaaattatatatgattcaggtgtcttgcaaatgagttgtagaagctagtgagaat

SEQ ID NO: 21810 - DNA, 684 bp, Arabidopsis thaliana landsberg
cctgcatgattacactttcttatctaatttaaaaccaaactcatgattctaaccaaaatacctaattcattaatattgtaaccaaaatacaagattcaaacactaaacattacataatacactcgggagatgaagagggagaagtacaaaacacaagattcaaacactaaactacaagttcatgctagttttaaagagggacaagtaacttaagaagtagttggagatgagataggctctgtagttgattcaggtgaatgagactcgatgaagtggagaaaggctggatcagtttggcgcaaatacttctcaaccaaggacaagtgtgccaacttgtccttctgctcagctacagccttggtttgctcttcctcacgttttgcattatgagcagcttgctcttcaattttttgttgagcttccttcagttgcacttgcaatgccacgaaagaaaaagattctcctaagtgtttgcgttttcctgtgactagatccggaagatgctccttaagactgcccactccataataatttcctcgattatctttctctgtggactgaaaagaaagagacaaacaattactaaagaccatgagaatatgcagaccataattatgaaaatgttagtttacctgtaggaagatgaaagtacggtcatctgctgtgagctccggaggtggtgat

SEQ ID NO: 21811 - DNA, 593 bp, Arabidopsis thaliana landsberg
  unsure (1)..(593): unsure at all n locations
aatgctatctaagttactgaaaagatatctcaagggaaattatataactcaataaaagcactatgtagttgtgtaacttacagtccttgtgctcgtttagatttttatagcagctgcaaaatctgcagaagagaaggaaacaggtagatatattgaacaaaacgcataatcttaaacaaacaagttacaaaagagacaaataaatctaggaatcaaacttaaaacaaagcgttaaacaaccaaaaagaaaatattaatgttccatctctcaatccataaccagaaaaagaagcctagacataaaacaacaaaaaagcttaatgaagacaatcgattgaccataaaattagcaccaaagaacataaatttccagcaaaaatagataacannnnnnnnnnnnnnnnnnnnnnnnctattatcatgcaaacaaacaaaccctaactcttattgttcaacaaaacccattgatcggcaaacacctttagagaagaagagacagactgtgagcttgaaaatctctagaaagaaagaaaaaagatgagaagccaattgattgaacgaagcaggcgacgatgatgctttcacgacagaag

SEQ ID NO: 21812 - DNA, 1561 bp, Arabidopsis thaliana landsberg
cttattgcagcatatattgaaactttttcaacaaaagacgggcacgatgctcacgaaaatccagcttaagaatcattgggataaaatagtcaggcagtggaagatatggtgtagacttgttcaatgcagtcatatcacatatgaaatgggatcctcagacaaagacgtttggtgccagtattcgagactgggccaactatttacaggtacaaagaatggtttatgtttagtgttgattttggtggttttttaaaaggctatacgtaataaaacttgattggatttgtcacaggtgaatccataggctaagcagtatcggttgaatcctccatcgtttctcaggacctagagtttatctttgaaggtacttccggcagcaaaaagaagcgcagatgcaatcatcctgatgaagatacgcaaagcgcgtctaaagcatattggtcatcgtcttcacatgagatttttgtggatttgttgttcacagagtctttaaaagaaaacagacctaagccagccagacgtaacggatactatgcaaaggaaacttggaatatgatggttgagtcgttcaaccagaagacaggactacgctacacaagaaagcagctcaaaaaccactggaatattaccagggatgcttggaggcgctggtgtcaagctgttggctctccgctgttgaagtgggatgccaacaccaaaacctttggcgctacgtcggaggactgggaaaactactccaaggttaaaaaaacgtattcaatgtttttatcaattggtataattttgcagcttgggaataacattgaatatgttttctttggtttgtcttataggaaaataagagagctgaacaattcagattgaaacatattcctcacgctgataaactagcaatcatcttcaaaggacatgtagaacctggaaagaccgctttgcgtccttatcgcaagagagtgaatcatcattccgaagcaccacaacacccagctccttcatcagcactcaacattaacgagtctgtcccaggaagtgaaggtggagctgatgatgaccaccacatagtgatggatcatcacttcgaatcaccacatgacccagctccatcatcagaaatcgacctaaacgagccagtcacaggaagtgaaggtggagctgatgatgaccactacatagtgttgaatcatcttgtcgaatcaccacatgaccgagctccatcatcagaactcgacatcaacaaaccagtcgcaggaattgaaggtatagctgatgataatgacaatcatgagcctactccgcatcactgggcatttaacggtgttggtgttgaagagtcacaagatgtggaaactgtaactcctgcgccatgtgaaaggatcaatattgagctggtggagaagattacatcaagtgcattggttaaggagtacaaatataccattggggaatgcatgaagtgtttgaacgccatggaagaggttgagaaaggtagtgaactttacatgcttgcgttggatttgtttatgaacaaagagtgcagagagatgttcttattgttggagac

SEQ ID NO: 21813 - DNA, 646 bp, Arabidopsis thaliana landsberg
  unsure (1)..(646): unsure at all n locations
atcgacctataatgtggataacaccgataaatttttattataacacatccagtaatgattatctctttataccaagcagatcaagaattaaagcattcaaaatttacagtaactagttgggtgcgaaaaagtacttacaagaaatgtcttgacatgtaaaaggcttgtcttctttaacagtaacaagcttgcttactccaaagtctgcaactttcagatgccctgaatcatcccgcagaatgtttctgcaaatatagttttaccaatgtcagaacgaaaacagaaagagtttgctgtcagtaactgcacatataagagacagaaaccactgatatggacagtgtgactcacgaaggttcaagatcgcggtggattatagggtctcctttgatctcatgaagatagctcattcccctaggataattcgaacgggtaagatttacaagagaatcttatagaacatatataaacaacgaagaagagacatatatagcttcaacttgcatacctatgcatatcaagggcatatctaacagcagtagctggttttcaattgtccttttcgtttgagcaattcacgcatatccccctgaagatatatcanatgagatcttggttcgtgaactaaatgcaaaataatttaaat

SEQ ID NO: 21814 - DNA, 676 bp, Arabidopsis thaliana landsberg
  unsure (1)..(676): unsure at all n locations
ctgaatccaacacatctcaatgcaagattaacaaatgcttccattttctgttttgaatgatcaggaatgtcgtggtcgggactgtttaacatcgatgggtctatcactttagctaacggtcctcgccccaaacacttctcaacataatcaggcaacagaatcatgttataactgtcaccattagccggttcttgatagaatccatgttttcctgtcaaaagacttagcatgatgaatccaaagctatagatgtcaacattctcagtgacaaaacctgttaccatatagtggggctctccaaagccttgtgtcccgcaaacgatatcttctacccccaactctccctctggaattggtatgctgaggctgaaagaagagagcttagcggtccaattctcgtccaagaaaatatttgtaagctttaaatccctatggattatagtcctagggaattcagtatgcagatacgttacagcatcggcaatnnnnnnnnnnnnnnnnnnnnnnnnnnnnnnnnnnnnnnnnnnnnnnncctcccccgcacctcctatataggcaagagctcccttttctgggtattcacacacgagatccgaacgaggaaactctaaacaaaaacccaagagcttgagaacattcttatggctgctcatcatcgatgaaaccgcaatatcct

SEQ ID NO: 21815 - DNA, 595 bp, Arabidopsis thaliana landsberg
gtcttggcgaggtcgagtggctgtgaaaggcaggtgaggagtggtcgagtgacgaatgtgagcttgaaaggcggatgtgctcttgccgtgaagtcgagtgaattgagtaaagcggtgaagttgttgatgatttgaaatcgagtacttggtgagaattggagtgagcaatgatgagagagatgcagtgaatcgagtgaagtggctatgaatgagaggtggtgaagtgggattgtggtcgagtgaagtatgggctggagagatgaagcggctgagtggtgcggcttggacggaggagaaggtggtgaagcggtcgagtgcgtttgttgaatcgagtgactcggttatgaagatggtggtgaagagatcgagtgaagcttgtgagaatgacaatggtgatgagaactcgagtgatgttgaactctcggaagaagagaagacggtggtggctttggtgaagaagtgagctgcggcggtcgagtgatggtcttggggtagaggtcgagtgattgtgacgaacacttgaggacttgaattgcaatgagcaacgatgggagatgagagagttgcgaaaagtttggtgtatggagaaagatga

SEQ ID NO: 21816 - DNA, 387 bp, Arabidopsis thaliana landsberg
ttttgctcaccaggttaccttatctttaagacacttactccctaagtttttccctcctatatatatttacgttgtttcattgtgaaatgtagaagaagagaaaaataataagaatcttaccttactctctatttctcttacgtgtctctttcatatacatatcaaatagaataatattatttgttttgtatggtatggcaataaaaaattttgaccccactttttattttgctctaacccaattattctcagggccggtcttgctcatccatctgttccatttcagacaaagtttcttctgctgctcttgttgtggttgatctgataagctctacaaggcttgcacttaagctggatagtgcctatactgagtactcggctcaatac

SEQ ID NO: 21817 - DNA, 618 bp, Arabidopsis thaliana landsberg
  unsure (1)..(618): unsure at all n locations
atcaaaaaaccacgaactgatgatggctatgatgaagcttattgggtctgatgatttgggtattaataataaactccttagatttagtcaaactatgatcctacaggacctcctcatctcttagcaacaatgtaatctattactagggaagaacaaaaacaataatctattttatggtgattgatgcttgattggaacaattaggcaatgatgctttcagatttagaaagtcttgattttggatttagtcttggtggacgtaatatggtcggcgttaggagcagtggagactttgaatttcatgtgattaaattgtgattatgcaacatttccctatgctcttaagactgtgattaaacaaaactttactatagtagcgaaaagcaacggtcagtttcatacatgatagttgatgataactgtgtgtgtgannnnnnnnnnnnnnnnnnnnnnnnnnnnnnnnnnnnnnnnnnnctaccaccattcaagatttagcaaatacagacactaactacgaaatgagattcattggatataaccaaattccaagcactcctagtccttttggccttggacacttttaagctctgtccatctttactttctgtttgaactgaa

SEQ ID NO: 21818 - DNA, 558 bp, Arabidopsis thaliana landsberg
aaccattcaaaccctaaattttcgaaatcgacaaagttcctaaatatttacctttatttgggattttatagtaattggggaagaaaaaaaaatgtgtgtgagagtagagttaacccatacgctctcattggtgcaatataaacaacttattataaaacaaaattaatgtttcttataaacttatttgcattggatacaatttctgttggatacaactgttgaagatataatagattacagtatacaacaatacccaaaatcaatacaacaagcagctagagatttgctttgagaaaaaaatatgtatgtgagacattcacacctagttcttaaagaacacacattggtcatttattcgtgagcgtctctaaatataaaactaatacaaattaaaaaaaataaaaaacaatgggtgtctttagttttagattcgcgtgttcagaaaagacatttgagtcttgagacacaaaacagaagaatgtcttttaactgtattactaattaatattaaagacatcttttaaaaactgtctaatgaggatgttttattggcgtatc

SEQ ID NO: 21819 - DNA, 691 bp, Arabidopsis thaliana landsberg
  unsure (1)..(691): unsure at all n locations
gtgtcggtggcattcactctcgtcgttatgatgaccatttcctacgacctcttccctggtatgtttctttagataatacaattattacaatatttacttattcatagtgttttttttttgcatttttaattacttcttatatatgatgatatcgcagaaataggaataagtgcggcaacgcttgtgattccaacatgctttgaaaattgtaacgcgacatttcaagatccagaatgtaacaaatggtgtgtattattggcttataaagatggtagctgcctatatcctccttctgaggttgatgatcttccccctattaaacgaccttacattcctcgttgttgttgtaatcctattactctttcacctgcttctccttgattaatatatattttattttaagtacctacaatgaataaagagataaataatcttcttttgaatagaaaaaccaaatattcaattcggtttaattcagaaacattatgaagtttataaccagatcgaaccaaaatttattttatgttttaattcacaccaaagttaatcatccacttaagttatcaaaaatttaaaacataaaataacttggaagatctagattttaagttgcaaacacaaaaaattgaatctctcccgggcactattatcaaagtcttcctcctaaccatgaatctctncttacctttag

SEQ ID NO: 21820 - DNA, 969 bp, Arabidopsis thaliana landsberg
aactcgtaggcactggattcgcattccgaaagtctgtcccgggaagttgagagttcttcttggatcttgtcgtacctttggtactgctcctgcagctcgccgttggacttcatgagtttggtggagaggttgtccaactgaccctccaatttcagcctggcatcctttgaagagtggagatcggactcaagggatgaagacttatccttccacgccataacatctttttccctgtcaagcagtagcctttcatagtactcaatcatgtcgttgagttcactgttcgcctggatcagataataacaagaaggggttagcgacagggtaaagaagcaaagattaaaaggtttattacggtaaaaaggaactaacccgagatgagtgatgggcgtggagtaggaatcgctcgcggattgcaggacgccatctatcgaaggttggaaggatggtgtcttttcggattctcaaacatcgaaagacgttcctctccgtttccatcgctgttttaaaaaaaaggggtcagaccggtcgaaggacgctgagtcaataagcaaaaatggcaaaaaatatgataaaaaatatgaagaaatttctaacccgtgagcgacttggtctgaggaaccaaaacagctttagttccggcatctcggacctcagtttcatcccgccgagggatagcacttcgctccgcctttttccctcctgatccggacgagggagatatggtgactggaggaggaggacccatagatcggggtggcgacgacggtcgaggagagcggtcagttcgggccctcgccttgtctcttttgggggaggagctgttgtgggatggtctatatctcttcttccgaatcaggtcggcaattggctcgctgctgagtccagatcgggaagtgggtcgaggtgagtcgcggcacggtgatcgctccttgtgggatgatcggctgctatgaccttcatggtgag

SEQ ID NO: 21821 - DNA, 432 bp, Arabidopsis thaliana landsberg
taatgtagtagtaattagtgtagtttagtagtagtagtaatgtagagtagaagtagggaagcaccaactcgcgatgtgttggtttgtaaactcattaacttccctttaatgaagaactgtcgttgaccccctccttttcgatgactcgttgttgctttttctgaatgttgaactgattcttttgatatagtagaaacaacgccgagcgatgtgaaggttgacatcagcgttttagaaataacaccaagcaatcgaacacaagaccagcgttttagaggcaatgccggacgatagaaggtcggcatcggcattttagaagtaatgccgagcgacagaatacaagcctggcgttatagaggcaacgccgagtgtttaaaggtcgacatcgacattttagaagtaatgccgagcgatttggacacgaggtcggca

SEQ ID NO: 21822 - DNA, 1227 bp, Arabidopsis thaliana landsberg
  unsure (1)..(1227): unsure at all n locations
tctgaaaacggtatttggcctgggaaaaccccatatgtactgcattgttgcgcgcctctgctttctgtgccctagttcttgcttttctgcatccaagccttctttgcgcttgtgcgatactgcttccactccgctcgccagcaagattgagatggcgcccaagcggaaagcatcaagttcatccgttgctgtcattcctcccatcgatcctaacagccagttgcctttcgcaggtaaccatatgtctgttgtttctgagtctgatcttctccatctcgtgtccatcggagttcttcctccgaannnnnnnnnnnnnnnnnnnnnnnnnnnggggtcactgttccaacagaggatacctacgaatccgtgatttatgttccttttcttctccgcagtctcgctcttcctatttctccctttttccgcggtctccttgatttctatcgccttaatttgacccatctgaatcccaattccattctgcaaatttctatttacgttcatttatgcgaacttgttcttggcgtcctgccacattttggactatggaagtacttgtatcactgtcgccctgggatggccggggggtagcatcagctggtggggggtgcgagtttggagatgcgccgtgggaggaagactgactatcttgaaatcccgctcaaggatagtatcaagggatggcgcttggagtggtttattgttgagaacacggaaattctctcccccacggtcagggagacagccggatgttcgtactccgagttggaccgagtccccacggaccaggaggtggctgaggcaggggttttgttagcagaagttggattgttgaaagaaaggggtctgactgcagaagttgtggtcgctgactttgttttcaagaacattcagccactgaaagatagagcatatccggcttatctgtaccgaggcttggctgactcaacccgggtaaccaacagaagagttcctgctgtggacttggtgagccggctcgagatgatactcagaggcaaggtgtcgaacgtcggcgctcctgtcgcatactcggcctgaaatttgcctccctcccagacttttactagtttcgtgtcaaatcctcctgctggtgataagggtttgggtcttagagtgcgaccctctcccgaagaagttagtactttggttgcctcgctcggagaaattcttgacgacgagaggcgggttcattttgaggtgcctttg

SEQ ID NO: 21823 - DNA, 538 bp, Arabidopsis thaliana landsberg
actctaggatttcgccgtattataaaatttaaatatttataatatttaaaacttcataaattattttatttttgaaacaattataatattcactttaataaaggttaaatattataaaattttgaaagtttttaaaagtttccattctttgaaatagagaagcgcactaaaccaaacacttttaatttttggacatctgataactcaagtttcttgttcattcgtattcaaaatcattttagtcttttttttttatataatatgctcttaaccattgctcaattcttttaatgtggacattgctcaatgtccacattatttcttcatcgattaaataatatatgtttatttcaaacttttaatatcacaatatatacagaaaaatataacttttattaattatatgtattttacataaatttaaaataaatgaaatataagatcaaataaaagggaaagaacaatcatattttcatgttttaattggagaaagagggttttaaaaaattagtttaaggtaataaaatatatggttagt

SEQ ID NO: 21824 - DNA, 574 bp, Arabidopsis thaliana landsberg
tcctggaggtatgcaacacgatacaacttatcccagaaacgttcacttgtatattcaatgttttcagataatggtacacaagaaacgtggtcttccattgtcgctaccacagttgcatcactcaacgccttgatgacacctctacagtctgtaaagtcggcgagcttaagtcttgtaagtctgaaaatgtttggggagatggttttcaacctctggcaacaatacatcagtagtacagtgagcctcgtgaaatcctcaatgcagcagggaacttcttcaatggcggtgttttccagatagagacattcgattctagtcgaaatcagaggaaaagttctcagacttgagcaaccactgagatcgaggatcataagagatgacaagttgacatcggtcggaagaacctccagccctgtgcattctttcatttcaaacctcaccaatctatgaagattcccaattgtagaaggaagtgtcaccaaacttttgcagttgttgagtatcaaagactcgagcttggtggcccttgaaagatctggaatttctgtcaggttttcagattctgacagatcca

SEQ ID NO: 21825 - DNA, 677 bp, Arabidopsis thaliana landsberg
  unsure (1)..(677): unsure at all n locations
gaaaattattttcaattattaaaatattgtccttagataaaaaacccggttcaggatagttacctgtcacacaattatattgatcatctgtagcatatttcacttcatcgagagccacaaagtcaaagaagtttctaattgacctaagaggaaccgaccacatttgtgtttggaacatacatttgatatgaatagatttgagggcgtatttgacttcactatgagacaaaatcactttaaagtcagacatgtagtaccacaaaatgctctaagtacatcccgaaacttgtagagggatgagccttttggaagtttggcatccatacagttgcactaaagaaaaaaacaactaatagatcatcactctggttaacacaaatatacagactttataataacagaaaactaagaataacattaggatataagagcaccttttaatcaaccaatagcatagttttttcattaccgttaagggttggagtatggttatataccgcttgtatcttaacataaacccttcaattagtagagtgaacatgtaaatcagaaagttggtgcataaactccattgataaagcaagaacttctgcagttttattactaatagagaaaattatagaacaacgcanacaaagtaaggaaacaccgcgttaaccttgtataaaaaataaaaa

SEQ ID NO: 21826 - DNA, 1086 bp, Arabidopsis thaliana landsberg
  unsure (1)..(1086): unsure at all n locations
ggtctaattgatatttttatcaatattttatactgacatctactaaaatcaagtgggtatatttttatttcttaatatctagtagctacgtgttaataaaatatgtctaataatagcaaaaaaaaggaccaataaatattatgatgttgggaaaaaatattacaaaataatacagtggctttttttcctccactgatctatgcactatgtgaccacttttcttgacggacctaaatcatcttatttttcaattttctagtactgctcatattctatattaggggctttttaataaagtggattatataaaaattgaaagtaattattgatactgatgatataatagaattagcgtagttgtatatttaactatactaaaataatttcatttactatacatatatatcattccattaacgacagttttatattttatattgatattagtatttaatcataaatgaaaacacaactaatatgtaatatttgtgttcatgttaacctatgtcttacggctaccaggaagctgatattacaaaaattagtaatatttgttatttgatttattttaatcaaataatttattttgtgatttgttttaattcgaaaattttcaaaaatttaaaaatttgaatatgtaaaatttttgagtaatatttgcagatatccgatttcattaaactaattccaacaactaaaaccttatcgtttaagatgccactaaaataaataaaaaatgattaaactaacttcttaacataaaaacacaaggtattgagaggataaactgaagttacaaatacaagcccaaaatataaaaacacggattgagcgaatatccgacttaaaacatcaatatttgttattttctttggtttttacgaatactatatttttctatttgctttgctccaaaattttacggatattcagatattttgaatcaaatcaaatcgaatacgagtcaaagtagatctaacgaatattttgcccatacctagtaagtcttgatccatattnttttaaatcgcattactggtcagcctaaaatataagttatattaaatattcaatatactcattttt

SEQ ID NO: 21827 - DNA, 571 bp, Arabidopsis thaliana landsberg
  unsure (1)..(571): unsure at all n locations
ccattacgtataaacatatccatttttcttaaaatgctgaaattctttacttcatacagaaaaatacattactaaaatacgaaagaaaagccacccacaatcttaaacaaacggtgagaaacactaatcaagttcaacagtctctccatcaaacagactccaaagttgctcaacgtcaaacgccaaagtggccccatgttcagctgtcgtcgcttcaggaacaatcgcatcagcttcttggttttcctccagtaaattctccaaccacatattatctccattcattagattattcacaaaatcatctttctcatcatctttgttacatgtgatactattttcacaaacattatttttcttgagtccaaggcatgaaggaattaaatcaacttctggcagaccattgagatggctgcaaccattgttaacagagaaggatcgaggtcgaggcttaaaaacaccgattttttggaccggtgttgtaggaggggnaaaaaggtttttttttttcatttaaaactaacaccacgaagcctcaggttttttactcaaaggggggttccagtaattt

SEQ ID NO: 21828 - DNA, 354 bp, Arabidopsis thaliana landsberg
tgatgttctgcatttgttcacgctgatcttctacataatttctaagagattgcagaccgttggtattacttacattggggatatctggcgtgggttggagcgaacgcggatccgtcgcccgatgtcggacgaccttgttgttcctgtccactttgaagttggccaagaattttgctttcgcctcctggatcatctgctccttgtgctcctcgaactggagctgctcgtcagccggcaaggtttcccaagtcggctctatgatgttacttggagaaacatcagagctatcccttgaaccggccatttgaggcgatttgatgagcttagatgcgctaacccaaccgagtcgcaaaa

SEQ ID NO: 21829 - DNA, 538 bp, Arabidopsis thaliana landsberg
  unsure (1)..(538): unsure at all n locations
ctaaacttgatgtatactaaaggatctgattttaaagtgcagggttattgcgattcagatcatgctgcataccttgataagaacatgnnnnnnnnnnnnnnnnnnnnnacagtgggaggcaacattgtgagctggaagtcatgtctgcaaccagttgttgcgctgtcaaccactgaagcagaatacatagctcttactaaggctgtaaaggaggctatgtggataagaaacttgttggatgatatgatgcttggaactgagactgctgaagtgtgaagtgactcacagtctgcattatgtttatcaaaaaacaatgcttttcatgaaagaacanagcacattggtaagaagtatcatttcatcagagacattattgaagctggtgaagtccgagtttcatagattcacacgactaggaatccagctgatatgctcacaaaggtataccagtttcgaagttgaagcagcattgagttcctgaagctgctcaagtaaacagcgagaattcgccaaaacagaggtacatnncagtatgcat

SEQ ID NO: 21830 - DNA, 1729 bp, Arabidopsis thaliana landsberg
tctttctctttacctctcttttctttctctctccctctcttttctttttctctccatctcctctctctctctcttctctctctctctctctctgtatgaaaccttttaacgggtttttcaggttgagacatctacaagagaagagttgaatgagttacaaccaatttgtgatcttccttctaagcttcaatgtcgtgttattgctattcatcttaaggtatatctctattatgttttagcgaatacgcatgatatgtatatttaatttcattgtaaaaagacgtaattgggtaattgtttgatgtttgattttaggtggaaaacaataatgatgagacttatgctgagatcactttgatgccagatacaactgtaagtgaaaatttagtatttctcttttattattagttaattctattttcctcctattataatacactgattttctgattttgttaaatccttagcaagttgtaatccctactcagagtgaaaatcaatttaggccattagttaattcctttacgaaggttttaacggcctctgatacaagtgcttatggtggattctttgttccgaaaaaacatgccattgaatgtctccctccgctggtatttcacgtgataatttttttaaatgaatttgaattttaagatttcattagacattacatattaaattttggtttaggatatggctcagtctctaccgacacaagaacttcttgctatagatctccatggtaatcaatggagattcagacacagctatagaggtaataattcattttattcaaatcattcaaacacagctattgaggtaataaatcctagagaagtaaataataatcttctttttccatgcaggtacaccgcaaagacatttattaacaactggttggaatgaatttacaacatcaaaaaaattggttaaaggagatgttattgtattcgttaggtataatattggttcttgttatatattttttggttcttgagttttggactttaaactatttacttgtggttttaggggagagactggagagttacgagttggtatcagacgagcaagacatcaacaagggaatataccttcatcaatagtatcaatagattgtatgagacatggggtaattgcttccgcaaagcatgcttttgataaccaatgtatgttcattgtggtttacaaggcaaggtaattcaaagaaccatttgaactcacattttagattatattgatttatcaatagattagttccttcaacatataggtttatattttgtgtttttataagtatcaggtcaagtcaatttattgtcagttacgacaaattcttagacgctgtgaacaataagttcaatgtcggttcaagatttacaatgcggtttgagggtgatgatttatatgaaagaaggtaacattagatgaaaaagaatttctgcataaatatatttataatgtctaatattatctatgataacacattttgttcaattaattaagatattttgggacaattattggagttagtaatttctctcctcattggaagtgttcagactggcgcagcttagaagtaaattttcattcacactttataacattcttttaggaatacgtttttgagtgcaataaataacatatcactaattaactttaattttgcaagtgcagggggatgaatttgcatcatttttgagacctaataaagtgtcacccctgggag

SEQ ID NO: 21831 - DNA, 835 bp, Arabidopsis thaliana landsberg
aatatgaaaaacagatcaatacaaaattgaccaggcatatgcacttaaatattctgatttctttatagtgtaatctcattcaagaaaagttttggaaaaatttcaacaaaaaaagaactattttatatcttgtaagaatcaaacccctgaattgtttttattctaattggaaaatcaactgacctatttgtgtatttttcttcttgaatttaattgagaaatcaactaatatgttgctattcgattgtatttatcttatataattcaacatttaacattttatttttatttctactggtacattgtatgattgtttgtttgttactgaattgcagttgtttttcttaaattaaaaatttgagtttgtaaataaattttgcaacagttgttgatgatgattccaagtcatatttttattcttttaaattcaaggccaaatatttgatatatatgttggtcgaaagacctaatatatagccaatgtatgtatttgggttgatctagctagtctggttaaattgaaatactttctagaccaatgttttgttgacataaacgcttgttttcatatgcatcaaaaattaaaggaagaaattattttataagaataatgaattgatcacgtacttacatattcttatattcttatgttatagtcatgaaaaaacaaatcattagggagttttcataattcagaattggcaatacttaggcgcccatctacagattcgggagctttcctttggagcaagaacataccacttttcattaccgataattgattgttgcagattttcttgcaagcttcaatacaattttaggagtagggtttttc

SEQ ID NO: 21832 - DNA, 830 bp, Arabidopsis thaliana landsberg
gtggtaactacgaacatggggtggttttacttcaaattcattcaaatgcatcatagaactaataactcatttagtaaatcatcgggcggacaaggttatctcctcattgtcccctatgcatatgaaacaatcctaaatgaaacactctacactcgattctaaatgtaatacaactacatgaacactctgtttttgtgaaatcattttctctaatttttcaatttttttatttattttttctatgccttagatgaatgctgactcaactcaagagtatatacaatgcaacacacacttcctgagccctcccccaaacttaaatcacacagtccactgtgtgaccaaatttggaagagagtactcaggacaaaacacataacaaaaacacaatataaacaagagattatatagtacaatggtgaagtgaggcgcttacctcaatcgaagaatgaacggagttggtcgtcaatggctgccggtgattgctcccatgccattgacgagtcgccctgttctgtataagctccagcatgtgggtactcgacctcatcggctatgtggcggccagcaccactctgaggatactcgacctctctccttctgttgcggccagcaccgcggtcgtgtaaacttcgagactgcagaagtcttctactcctactgctagatcgagtgagcacagtccttctctttctcccatactcacgaggctcgaatgatgaatgccttgtaggcacatgcgggacctcttgctcactaggctaaggccagagccgacttggctcaggctcgtcatatctcctcgagggtatgtcctgagggatctgtct

SEQ ID NO: 21833 - DNA, 1312 bp, Arabidopsis thaliana landsberg
atatcatactatacatgtattttatacattgcatttattagattgcaacctcgctgacggagagtacgtgctcatcccggagcaaggagttgcccaggaagaagtccaggagccaacttccgaatctaccatagaggatctccatgcggcgccaaaatttgaatgcaagccccagttttatgcataaccattgtatatgctattttactgcacttaatgtttgtaggcttgtattgtgcacttaagtataggagttgcttgaaactttagatgcatgaactcaggttccttatgagatgaatactagtaagctaggttgagtagttgttatcctaatagaggatctcggtagaagtcgggtgatttttctagcactcgcgcgaggtcaagaattgattctattcatcttaataacgggatctatgatggtctatagacttggatccagggaggatgccttgtccatgagacgggaaaaggaattaaggattaatgtgtggatacctgagtcaagcgtttgaacgtactaaacacatgtcgggaaataatggtaaccggtaaacctagtacctgagtgaagccgggcgtggacttttcccctcactcgtcctgagactgggtctcccatgctagctatggtgggtacaagtgtggtcactgcacggcagcagcctggggtctgtggagcattgtatgccaaggcggtgagccctggccgcgaacagggaatcgatggggacggttgacatgtgtggggacggagtgccctgacatgtcgtgtgtttaggttaccttgcaaggataaaaactcgattcgaatcgtctgcttctcgcagctaatgagactgcttgacccttgtactacattgagtaagaagtgaaatgaggttacatgagataacttgatgattgtactaaatgcttgctaccatgtatgcttagaaggagcaaacttagctaagaaaatgatgctagaaattgaaaagctaaaaattgattttggactcagctagtgcttttggcaaaccaaacccctcagccaaacagctgcatggtctagaggtagaggagtagtttcttcacaccgggtaagtctagctgagtattagtatactcagccttgcttgtggcataatttttgcaggtatgcttcaggataaggttgatggtgtgacttggcctaccaccctgccaccgagttggatggtcgagtgggatgctgctccaacaggagaggagtaggagttgtgggctagctttgcccaattcctcgctaccgacgatatcaattatctgctacatcttattttat

SEQ ID NO: 21834 - DNA, 505 bp, Arabidopsis thaliana landsberg
accaacagaattggtgtcaacacttggccggtattgtcggttgagctaagatgataaggagacatcaaagctccttcaccacctgaacttccgacgatgagtttcccggagctctttgtgtatttatcttcagttccagtcatgcttgattcacaatctggatttttgtaatatttcaataatcaaagcaatcttcacaggctaaaggtaggctctgatatcatgtaaagtcaaagattgctctgaatatattcagttgtgttattcatattgaaggtggcgatacaaatatatatgtgtacatatcgattttaaacctaatacacaaactaataaggcttcgtacaaaccaatattctaatcatcattgttttcctctaagcccatctctaatacttagcccatgcttttcctcttactaactgcctcgttctacacatacacaagtttcctcaaaatatttccatcatcagacatcggtgattgtgagacccaactccatatt

SEQ ID NO: 21835 - DNA, 646 bp, Arabidopsis thaliana landsberg
gtcagtgattttacctctttttaacacaatggatttggatctgaaaatgggaaattgattcagagtttgctggaatgagtctagctagagagatacgctcattcccggatttcttggaattctaaaaccgaatatatttttttgagtgttttcagaaaaaaaatggaggataagttaaaaatgaaaaatgaaggaattgtgaatgggagaatgaagaaggatttgaagagtaaagaggaaacacttgtgctgaggagataagccaagccacattatgttttgttcttatgtgtgcaaagctatatatatagcccacaagttaaagctgtgtttggctcgtttcaaaacacccgacgtttgcgttttcttatttttgtttactggattttgctattttaccctctatgtttaaaacaatacacattaatcctacaatatcgaaaaaccctgccctttttaataaaaaaattgaaggtaaaagtgcaaaaaaactggcgacttgttgggattattaatgaaaaacttccattgggcctattgtttaatctaccaccaatactatttttggttcaggttggtttatcttccaccattacaccatagttaagttattctaaaccttgtttatcattttgaagtctgattt

SEQ ID NO: 21836 - DNA, 576 bp, Arabidopsis thaliana landsberg
  unsure (1)..(576): unsure at all n locations
ttaagcccgtgtgtcaggatacggcgtcaggcatcccctgcatttaatgcgcctgcgaacggattggttggtgaggcggtatggccaaggttgcttcacaacgaagcctgcccgagccggcctcgggagagccgagggggcgcccgctgtctgaggaggccctcgggcgaggcgtgaattcgtctgggaccactgttccaacccgaggctgggctcgggtgagatcacgtccttcgggtagacgaagtcttggcttgaacctgtacccgtcagttggtctgagggtgttaacagtcatgattaggagcgttgggggtaccctaattatggtaccgacaccaatatatgtccttacacaacttggagtttcttacggccttacaaaagatcggaatctgaaaataaatttaggatagaagagagtacaagcatgagagatcaaaagccaacaatacaacacaaagagagaacacacaggcgcacacaacacacaaaacgaagaataacactatgtagttgcctagatatcgcttgnatcgctcgaataagttgtgacagagctctagagtgttggga

SEQ ID NO: 21837 - DNA, 868 bp, Arabidopsis thaliana landsberg
ttttgatactccaaatctgctttcctttgtctacactgattttgtgcggaggactatccattagttaatatgaaaaacttgtctctggctcgactcgcccttagagcaaatgacgatcaaatcaagcgagtaagagggccaaataatgatttgttagagtatgatgtcgttcgccactttggcaatgtggtgaagctcatgaatggcatacaaaatgttcaggaacttcacttgtgtcctgatactctcgaggtcagattttctgttttattctttctgctctgctgagtgctgatattaattgtaatatgtctggttgcggtattgtcttacttgtttgttttcagttgctttctgtatgctgtgagtcgatgccagtgttcaacaacgttaaaaagttacttatttacagtgacgaggatcgaggatggcaagcagtgccagttcttctacggaattgtccacgtttagaaactctaatatttgaggtgggaatacaaaccatgaaactacttggacaaagcatgcagttcatacttaaccctgctgtcttgtttctgctttcagggtatcgtgcaccatgtgacagataaatgcggggatgcttgtgactgcattttccgaaaggacaaaggccgttcgctcaaatcttgtccagtgaaagtggtagagattaatgggtttggagtaacaatgaaagagaagtacctgatagagcatttcttggattacttttcgtgtttaaaggagatgaagatctatattaattgtgaagaggatggcgttacacaacaggttatgaagaaccgcgaagtgtctaaacttgtcttggatgagatggaagagtacaacgagttcttatattgca

SEQ ID NO: 21838 - DNA, 423 bp, Arabidopsis thaliana landsberg
ccctcagagcaattttcagagaacatatggtaattcagcttactatgcccccccccccccctccaacctcattagagggtagaatggaatctatgcttgagcggattcttgaaagccagaccaagcttcttgttgagtttaatggcaagtttgatgctatcgaaacagatattaatgggaagatcgacaatctgagctctcacatgaagaagctagatgtataggtagctcaaaccgtacaatccgttaagcgagaagaaggctttcttcttggaacccttgatgttaaccctatgaggagctataatgccatcttggtcagagaaggagacgatgtgtcaaaagagttggatactgaagatgagttggagctagcagtctagagctggtgcttatctacactaccagttaagtcattacacc

SEQ ID NO: 21839 - DNA, 503 bp, Arabidopsis thaliana landsberg
  unsure (1)..(503): unsure at all n locations
cctcccttcgaggcagtcggaagaggtttctccgccgacgagatagccagagtcacccgcggactgacctccgactccacggccttggtagcttgtcctcgcccctcgagtggggtcgtgggcgagggccttgtcgcagcagcgtctaccctgaggtcatcgctgctgctgtttggccgcccagagcggaggtcgttgtcgctgctaccggagcgggcggcggtgagcacctgtcggcgttttgttgtcccgcaggctcctccagtgtgggggttgttcatacctgcggggtggaatcggagttccgtttnnnnnnnnnnnnnnnnnnnnnnnntttgttcattgtggctgtcggggcctgaacatgtaggtatttttgggtgtaataccatgttttttccnnnnnnnnnnnnnnnnnnnntcgcctgtcggcnnnnnnnnnnnnnnnnnnnnnnnnnnnnnnnnnnnnnnnnnnnnnnnnnnnnnnnnnnnnnnnnnnnnng

SEQ ID NO: 21840 - DNA, 633 bp, Arabidopsis thaliana landsberg
  unsure (1)..(633): unsure at all n locations
ccgcgacctggtgagcaagctgggccgcaagacccccaccagggcgagcgagctgatggacaacgccaccaagttcgcctccggacaagaggcggtcgaggctatcttccgaaaggacaagcagccccagggtcgcccttcggaagatgcccccgaggcgtcaactcagcgcggcgccaagaagaagggcaagaagaagtcgcaagcaaaacgcgacgccgccgacgcggaccttgtcgccgccgccgagtacaagaaccctcggaagccccccggaggtgccaacctcttcgacaagatgctcaaggagccgtgcccctatcaccaggggcccgtcaagcacacccttgaggagtgcgtcatgcttcggcgccacttccacagggccgggccacccgcggagggtgcgaaggccgcgacgatgacaagaaggaagaccaccaggcaggagagttcccgaggtccgcgactgcttcatgatctatggtgggcaagcggnnnnnnnnnnnnnnnnnnnnnnnnnnnnnnnnnnnnnnnnnnnnnnnnnnnnnnnnnngtggcgcagtctacttagactggtcaacaagccatcacttcgacaagtcgacacccggccatgtgcgagccggggaa

SEQ ID NO: 21841 - DNA, 708 bp, Arabidopsis thaliana landsberg
aacacatgagtagagaatctttcttgtgtattagctacggccacttcaaagtttgaaagtagataccatttaccttctcttagtgtggtaatcaacacttctttgtttgcatgtagaggagaaaatgcatcatttcggtgtccctgagataatgttttaaaatctgatcaaaacttacttgaatgtatttattgaatattataaacaggataataagtatacaaatatgaaatttaatcatcaatttcataccttctcatcaaccaaaatcattgtaggttcttctacaaagtaattaggaggccaattccacaacctcagtagcttaacaatcatataccattttgtatttctcagatgcaaatctgaaaagtatttagctgttgacatttcatggaaactcttcttcctctctgattgtttattttcttgtgaggaagatgaatgagataagaatgaaaatattgatatttccaatattacttaacgttactaatttttttccaatatatttaaatttaaattgaagttcagagcataaaaaaaatgattacggttttgaaatcagactttcgtcttttgaggttttcaagttcattggcattggtttggagttttcaaatcagctttcaaacttatattttcgatatatcacacccaacctttacaaaattatgatatatataacttggaaatatatttttaaag

SEQ ID NO: 21842 - DNA, 864 bp, Arabidopsis thaliana landsberg
gttgtatatcctctgattgcgttcgagccataagtcgaaatatagtccatattgttacttggaatgcaagccgaaggagaatgtatgtgttccctggccctcatatggctgcgaaatcaagcagaagagtgtctcgtgatagagagagcgagattggtgatatattgagctaatgggaaaggaacagttaattcatggtgaaggagaacaaggagctaactcatgcattggctaggctacaaaaggattatgataatgaaaccaagattgacgataagtttgtctgcaaagttggtcagctaagctatgcctttgcgcaagttgagctcaagagagagaagaagctgataaggcacttgatgaggagaagaggcatgtagagtatcttaaggcagaggtttttaaatcagggaagatggttacaaaaactatgatatgaaataatataatctttcaccctaaaaaaaacaaagaattttatatcattgatccgtcatctttcttttttggtcgacatcgaaccttcatctctagatataatattctttttattaattgagttgttgccaaacaaaattgaattgaatctatacggggaaaaaaagaaagaacgaaaaagccaatgagaagctgacgaaaaaccgcgttggttaaattacatataaatgggttttgtgaattcaaataaagacgaagacaaaaagtttgagactttatctctactttgacccgaccagcgaaagtgtaaattgaaagatagatagaaagaaagagccaactttaaaagcttagcggttgatttcgaaatctcgtcgccggcgcgtggagtcttttcgtcggacaacaaccagagaaaagagattt

SEQ ID NO: 21843 - DNA, 528 bp, Arabidopsis thaliana landsberg
  unsure (1)..(528): unsure at all n locations
acatatgattttgtagaatatgcattgaccagatcgacattggagagtttctgaggggactggcacttatctctagtcaagtgtataaggctattcatgtatggagttctcagaagtgggttttccagacggaagtttgatgcaatgtctgggtgatcttcaaacagactgttgacagattctacctgcctgtgaaacatgaacgaattagtagtaaaacctcattagatagcagtttttggagatccgaaaacatacccacataacatttatgcaggttttatagtgagatgtaatatgtattaaaaagtacttttcttacctgtgaaggaagaacttgtaacccattgatatcaatgctttcatgaactaataaagtttccactaacacatcnnnnnnnnnnnnnnnnnnnnnnnnnnnnnnnnnnnnnnnnnncttgacttgttcatttaccataaacccaccatttacgtcaagaagttcgttaaggggatgcattgattgaaacccaagctgggaagttttga

SEQ ID NO: 21844 - DNA, 497 bp, Arabidopsis thaliana landsberg
taagttcaaaaccaaccctctttcaaagatcacacatgttcatctttttccctacctcaaaaccttatgtcccaattgacaaaatggcgcctagagacctctagaacaccctggaaaagtttgaacccatccctaagtcgtttgacacgacttgacatggtttttgtctcggtgtggacagctcggacagagccaacttcccacccctatatctctcaaacccgaccatatctttgcttggaactcacatggaaaagataggatttggtgcagagaagagatcgtacacgggatttttgctgagatctgcacgctaaggcgaccaaacaagctgttgaacactggcagaagtaaaccaccacgtgttcgacgtgggcagacactcgggaacgcgacagagcacgcccgcacgcgcacccccgtgccggcctttggccgccccgtgcccacgccacgttgccgtgccgcgagtggctataaagcccgcctcatgcacg

SEQ ID NO: 21845 - DNA, 509 bp, Arabidopsis thaliana landsberg
ggtcaccgtcattggtaagaattctccgaaccatttcacatgtcataccagtcccttgactaacacggttcttgcagacgcccccggtcaccgtgacttcatcaagaacatgatcactggtacctcccaggctgactgcgctatcctcatcattgcctccggtactggtgagttcgaggctggtatctccaaggatggccagactcgtgagcacgctctgctcgctttcaccctcggtgtccgtcagctcattgttgccctcaacaagatggacacctgcaagtggtccgaggaccgctacaacgagatcgtcaaggagacctccaacttcatcaagaaggtcggctacaaccccaagagcgtccccttcgtccccatctccggcttcaacggtgacaacatgctcgagccctcccccaactgcccctggtacaagggttgggagaaggagaccaaggccggcttgtccaccggtaagacccttctcgaggccatcgacgccattgagc

SEQ ID NO: 21846 - DNA, 511 bp, Arabidopsis thaliana landsberg
gggggggatgacaaaggtattaccagatgtttttgcattttgctctgcttcttcatcctctgggggcacgggatcttcagcttccccatcttcactatcctcgccattaccagcaaccattagctcttccaatttcctctgcaaagctcatataccagattcagaacaataaaagaaaagataggctcaagtccaagaatcaaaatctacataatacaaatgattgatctgatcatcaacaatctctctgacatatcatccactattaatcactcatacatcacagacactatcaaaggacatataaaatttcgattaacaattgcggtcacaacaaaagaagcactcaaatttgtatagaaacaaatcagaacaagctcattgcacaacctcttaccaaaatgtttaagctccagacaaatctaaatttagctaaacaaagaatttgagactaatctataacgcatatcagaataagaaggaacagttagatgcttacattcttacgggc

SEQ ID NO: 21847 - DNA, 846 bp, Arabidopsis thaliana landsberg
caggtcgactctagaggatccccgaacgtcttttgaacttcttcgccttatatttttcagcggtatcaccgttgactttttggtgtaagttctgcattcccttaggaacgtcttttgaacttcttcaccttatatttcggtggtatttggctctgcattccctttggaacgacttttgagcagaaaatttacactgcgctcccttaggaatgacttttttgtagcttcagcaaaacttacgctgcgctcccttaggagcgtcttttttgtagctacaacatttatgtagctctacatttccttaggaacgattttgagcttcgacaatttttgagcttcataaatctgtgaaggaaatatatttcatttaaatagaagcaaaactattacaaggaattaaaactaaattcactttacttgttccttattaaaaaacaaaaagacataaaaagtttttcggaggtaggatatctcttaatagatgtgttttgattccggcacagtactgttgactgtgcgggctttggattcctccctgaaatctcgctgctgatgggtctgctggctcccttctggttgctgacctcgttaataagtaggttgtagtagtggtggaggtggaagttgtggccaagaagcctgtggctgactagccgaagcaaccgaagctgcaggatgattacccacatattctggtatgtagggtgaatgacacgaagcagtgtgcaggacctgcttcggttgactttgcttagcttcggcttctgcgatttccttctgcatttggatggtgatttggcacattcttatagtatggcgcttgtcttcccacaaaataggtagtag

SEQ ID NO: 21848 - DNA, 645 bp, Arabidopsis thaliana landsberg
gatgatgtactaataaatttagagagactaataatattttatttattttcttttataaattcaatttaatataaatttctattttgatactttttatattgttttgtgacaagatatttagaaaactttccatatttctaaatattcctttattttcatatattgtttttttttttcattttacacaaatctaagaaaaattgttaataagaagaatttcataaatgttaattagcgagatggctacttccgattggttgtttaagatcctatgtgaaccgtctaagaagcaaatagcttcaatatttctatattatagactaggttatgaacccacgctaagcgttggtcagtttttagaactttgaataaaattttgtgtgactaaaactatttactgaaattttggagaaatatgttttaatatgtcttattattggtaataatttaaatttattgagttttaaaattaccataagaaataattcaatgtaatacaattactacagattagtctaaatacaacttttaagtttttacaacatttataaagaaaccttttttttcgggcttaatatttttggataaaaatgtttgtaaaaaccattttttggaataatttctgggaatggaatccaccaattc

SEQ ID NO: 21849 - DNA, 515 bp, Arabidopsis thaliana landsberg
gaaggtcggtcattgatcagcttggttactgtattaacagctacagagaggcagctatgtctactgatccgaagttttatcacattgaattggcagagaagcaaaaggtaatcattcggctcaatctaggaagcacaaaaaaaatcttaaatttcacaggcttggagaaaatggtttgatgttttgttgtggctcaatctaggaagcacaaaaaaaatcttaaatttcacaggcttggagaaaatggtttgatgttttgttgttgtgcaatgattaaggttttgaacgagtgtgtggaagcagaagcatggctgcgggggaagcagcagcagcaggacacgcttcccaagtatgccacaccggctctcttgtcagctgacgttaaaagcaaggcagaggcattggacaaagtagcaaggcttcctgtgtctgtgtctcctaatagaaatgctatatatgataatagagagtgaacccagcttggatgttttacaggttttgcaggcctataatga

SEQ ID NO: 21850 - DNA, 363 bp, Arabidopsis thaliana landsberg
cgctggaagagcacctcacggctgatctacggtatggtgcgactgaatcaagaaaaaatggctgagttatgagaaaacggcagacttatagtacaactctctctcgagtcatggctgacttaatgaaaattttctgagttatgaaataattcagcttacgttatgactgacttaatgagatttgctgagttatgagaattttgagcataacccaacctaagttacggctgagtttttaccctatggttgattggtcaaaattttggctaagttattccctcgacacagctgagtcaactttctatggctggccgagctttcaaagacgattgagatctgggatatcgatacggactcatgatc

SEQ ID NO: 21851 - DNA, 555 bp, Arabidopsis thaliana landsberg
atgttattctagtattgtctcacatttcaagtatttgttttatttcttgcatgtgtggtggttgggaggaggtccctgtgagacacaacttacatgttatgcatgttgagagaaatgtagctgtcagtattgtatcgacattgttgtattgtgggaaatcgaaggatgaactaaatgctcgcaaagatcttgaggatcttggtattagaaaggatttgcatcctaaaaaccaaaggaaaaagaacatagcttcatgtagcactttggtccctaaatcaaagacatggaagaagttattttgttagtagttttatgacttcaaaggtccagatgggtacttttcatatatatcaagaggtatctcattagatggttgtaaggtcacaagtcttaagtcacacgattatcacgttttaatgcaacaacttctacctattgctcttaaagggttgctacctaaaggtcatatggtagcaattgtgcggttatgcacattcttcaaccacttgtgtcagcaagtaattgatatggagcactttttggcacttgaagctg

SEQ ID NO: 21852 - DNA, 195 bp, Arabidopsis thaliana landsberg
aacacttgagaaaaaaccccctatctttttttttacgcaactcattccttttttcttatatgaattcttttttcatatagggcctgatcctaagcaacgcgttaagagcgcaaaagagcgccgaagatgaaagttatgaaattgcgtctaataatttacgctccgaagttatcaaactgagaaacgaagctttgg

SEQ ID NO: 21853 - DNA, 1416 bp, Arabidopsis thaliana landsberg
aatctcttcaaaatgaacacaatttatgatcattcttatctaaattgtcaacaatagttcaaaagacaggaacaaaatcaacttaagaatgaatagtttgatttttgaaagcaaggtaaatagattaaacaaatccttcttccgacgaatctgactctaggattattcctcaacaacatactcaatcctcccatcaacatttccaactggttcagctgcaaaaaaattgctgtaacaaaaacataaaaagatgtcaaagttcttgaataacttagtatctaataaacaaactatcaccagtatctaatgtctttcacatacatgtaacatgatacatcaaagtctagaaactctttttcaatgaagacccttgaacacccatactcgctgattaaggccttagatcctataatatttgttatcattcaattgattagttatatatcacatgatttaacattctaaggtaagagtataacatattaacatatataaactagcctttaaacatagaagttctaaagaaccggagcactgtagtgagtggctcatagttgtaagtttttgaaccaataagtcgataaaactttgacagaaaagactcacacgcactccctctagcaacacaagttatgatcctctcactacaaccaaggagaatacaaatttatcatactacacatgtatgtatgttcctaactaatttcaataccaatataagtccatgattgttaacttactgattatctcggatggtaaatgtcacatatctggcatcatagtctgtttcaccttcaggacaacaatatggaaatcttgacactgttgagacacttgatatgactccaatagcatctaataataacagtataacaatcaaatattataaatcttagtactaaggaaataaaatagagagaaagcataaactatatagataagtcttagattaccagttacataatccttatattcagattcgacttcatcagcatggatgaattggagagaagtttcatcagatctatcacttacaggccacattttggtgtgctacataaactcgatttcataaacataatctgagtacttaggtattgaagttgctctcttcaatcggaagtcctgaatgtaataccactttccttcaaataaggtaggcttgaaattgtataaataatcacgccaaggcactctagcgtcgattctattcccctgaataaaaatacaaaaatatcaagttctttggaatacaatagaaaccaagaacaaaaaataggaaaccaataagatttacataaagaacaaaccttcacatcatagaggattatggtagcacgagtttcaaagatcatagactgatgatcccagatgcttaagatttcaggtataggacatgattgtcctgtgcaacat

SEQ ID NO: 21854 - DNA, 546 bp, Arabidopsis thaliana landsberg
gtttatgttactgttcgttgaaaagtccttgtttgtgttcttggaacagttgagtacatgcccagaagagaatacagaggtggaagcattcaattcatcattggcttctcttatcacatcaggtattgtacttgtacttgtacttaactttttcattcacaagaatcaaaattgtcattaaaacattgcagtgatctctttgaaatgtggttttgattccttttttcgcagtgaacaagaacgatatagagtcatcgaagctcgctttcgtttcatcagctggtgcatttgagaaatggactactttgacaggtcttttggaacagcttaagggactgtgataggctggctacaaattctttactctttttttgtattttccaacagatttgtcaaagagggtcttttttttctccaaataatcctttgaataatcatcattcactttcttaacttctttggttattatttacctttatacattttgtttatacttactatgcatcaatatcaacaaggttgatttttccatcgaattccaccaca

SEQ ID NO: 21855 - DNA, 590 bp, Arabidopsis thaliana landsberg
tataccgcgggttaaaatctagtacctctttgaaaagtcatcttactatccgaccactaccacttgagaaatgtttttaaaaatacttttattttagttaagttttataattttctttctttattcaaatttaatatattagctttttgccaaataatttaataactttaaatagaaaaagtcatacataaacaaaagaattgttagtggttctcttatgcttatgcttgggggcgtaggttcatattattttagaagaaaaaatatttgaaattatttctcttgtctagtggttcaagtttaaccaaaaaacacaacgcacttaggtaaacgactagatcgtaaagagtcacttttttttcttttcttttttatctgcaacgaatgaattaaaaaaaggagaagtaaatatgtacaaagatgtacaaagtttattcttaaacattttttgtgactcgatcaaccacatcagtttcaaatacaacgctcattttttttctcttttttcatacatgatatggaataggcaacaaaaaccgaagatgttatgcatgttacaattgtacacattttgatattcttattttaaa

SEQ ID NO: 21856 - DNA, 750 bp, Arabidopsis thaliana landsberg
tatagaaaaccacgtgtcgttagctcaattggtaaagaccctaggcgaaacttagaggttgccttttcgagtgacgtttgagacgaaattaatattaaatgatgtggctttgggcctgagaagattataggcttcggcccagaacctcatggatttcagaaaaaaaaaaaaaatccatataaaaaaggtgaagattatagataaaaagcttgcaattaattttaataactatttttatcaataattatttttatgcaaatgtttttgcaatatctaatctgaaaaagtaaaaagtaagatatatatattgaatggaatacaagtaccctaacactagatctcaccaaaaaaacactaacactacatatccatacaatacttaaaaatacctaaaacacacagagttatgtctttaatagtttttggaaaaaaactgaccttaattatggagagttcgaaatcgttgtgcttggtcagtaaacgaggagtaacttcatgactgactagtattattccggatccgaccggacataagggattataacacccatgtcctcctgactgaatccagccatataacatttgagtataaatcattgatttatcaatcatgtataattcatatatatggtattaaaatattaaaacgatatccaacatgctcacattagtatatataaacagccgtgagttgaagtcgtgatataattgggggtgtacctgaaattgataggaaatatagttcatata

SEQ ID NO: 21857 - DNA, 568 bp, Arabidopsis thaliana landsberg
  unsure (1)..(568): unsure at all n locations
ttatttgtatgtaaaaatggtccgcaaatggtccgctttttttttcttctatttcttttggtccggaccactgcaaactataattgatgaatggtaaataaaaagcggtctgatccgttgacggttttgtccgtcccaaccgccgtaaccagtcacaccctaagccttacatttttagtccttaaataaaatccaattcgggatatgaaacttaacaaggtgatatttttcgtatcgattcttaatacaaaagaaattattgatagaaagggtttaagaaaaaataaaccacttcatttggttacatttatgaagtctggagttctatcattcacttgtcaattctcaaaattgaagtggcaaaacaactcttgcccatatagcttaagtcttttgagagtatgaggagccaataggcccaaagattactagtaaacacannnnnnnnnnnnnnnnnnnnnnnnnnnggacgaaacaaaaaagacggacacgtggatcgaccctattggtcatgttccanacgcataatttactcagaagaacagtccataacatgacaaaactaaca

SEQ ID NO: 21858 - DNA, 526 bp, Arabidopsis thaliana landsberg
  unsure (1)..(526): unsure at all n locations
cggctagggcgcctcggcgagtactgataggtttcgggacatccaaggttgcatcaacctctggaaggggcaccactgccaatgtaccatcaggagcagcatcagatgaatcctcagctagcagatcaagcatgtcatttatgtctgcatcactagggttcaggggcacttcaaaataaatctgccgttcatcatcaggtatctccccgagcgaatcaaccaaagtacggacttcttcagcggagggtcgcactctaagacccaaattgctatcagtcacgggcggattggacacaaaaagggtggaagctttgggagaaggtaggttccaagctgagtatgccactggagcaccaacgtttgaaactttacccctgaggatcatctcaagtcggcttaccaagtcaacagaaggaattcnnnnnnnnnnnnnnnnnnnnnnnnnnnnnnnnnnnnnnnnnnnnnnnnnnnnnnnnnnnnnnnnnnnnnnnnnnnnngtttttgaaaacaaaatctgtgaccacag

SEQ ID NO: 21859 - DNA, 562 bp, Arabidopsis thaliana landsberg
  unsure (1)..(562): unsure at all n locations
aaggagaagtccatggaagaaaaaaaaacttaactggaggacaaagacgagaaggaaggtaattattttaccctcgcttcaaacccgtcaatgaagccctccaagttaaaagagaaagtggaactcacgaacagagtttccaaggaaccaannnnnnnnnnnnnnnnnnnnnnnnnnnnnnnnnnnnnnnnnnnnnnnnnnnnnnnnnntatgtgaaccaaggatgctcaactcagatcgaatcaaaatgacttgatccgcgagagtggttttcaaagcattgagaagtaagaagaaatccgattagaaagaaaataatcagatggagatgggagattcaatgatcgaaagattgagttgaattacccgattaagtttctaaggtcaagagcttaagaatcggaagaagtttctaaggaaagggaacttgagaattttcgagaggaaagatgaataaaatttgtctaagtgtttgggagttgagaagtgaaggagttagagttacgattaatatagaagtgaagaaaggcgagccatgcaagccaaatngagagacctggtg

SEQ ID NO: 21860 - DNA, 673 bp, Arabidopsis thaliana landsberg
atacttgctcgaacttaccagccgaaaacacaaaaaaagtaattctttctcaactctatatttgtctcaacaagaagaggaatataagcaaatcttttacctttcctcgaccatctaaacgccaagactccttcttcttcttcttctcagaagaggcattaggactaatgcctatatcaagatcgtcttcatcagtctcactttcttcatgtttttcccaactttcgacaatccctttcttcacaccttcacaaacaaacacacatcttagcaagtctaaaatcaatatgaaaactctcaagtcttttcattgcagatgcagattcaaatcaatctcaacaagaaacacacaaaccttgcttagcattgatcttttgaaacgatttgatttttggtcaggtatttattttaagatatatctaaagtcgatgtggaaatgaatcttgaacctattgattgtttataccaaaaacaaattcgagaaaaatatttagaacattttaaaaaaattttacttagtttttagttattgatatatatatagacgatatcctttaaaaaatatccaaattttaaatatttgaatccacatatattcatttatctaatatcatgaaattatgagggaaaaaactgtaaaatcattccctaccaaaattgccatagataaaag

SEQ ID NO: 21861 - DNA, 1856 bp, Arabidopsis thaliana landsberg
acatggcataatcctatgtagtagtaattttaaaaccaacttacataattatatatacgcggcactattactcgatttttgtaagtcacttctagctattttatattcgagcaaccgataaactaagaacagaacaaagacagaagtgttagaattgagtggtgcagtgacgaacgtatggttaaattattgaatatcgtatcaaatagttaaaacaactaaataaaaatatatatatgcaccatgctttatgagttatgagatgaattgaatttatgttataaaaaggttattgtacgttagaacttttaggagtagtgtagaacccaaactgtacaaaatcagtaacattacacagctgtgttccattgaagtctctgttatatagatcacaagttgtttaactgctcaaagtaaccacacccatgatcacaatgaatctccttcttcatctctctatcttcttctccatcatctttatctctcccatcttcctacagttgcaacccaaatgacaataatgccctccttcaaatcaagaagtcccttaacaaccctccctacctctcctcctggaacccccgaaccggctgttgtactggctggatcggagtggaatgcactgacggccgcgtcacctacctctacctttccgccagtacaatctccggaaatatcccacccgcgatcaccatgctcaagagtctcaacctcctctttataaaacacaccaatttctccggtccgattcctgataacatcagcgacctcaagaacctcacgttcttggacctttcttttaaccaatttcccggtccaattcccggttcgctatctcagatgccgaagcttgaagccattcaaatcaacgataataagctaaccggttctataccaaactctttcggttcttttgttggcaacgtccctaatctctacttgtctaacaatcagctgtcaggtaattagccatcattttccatttctttaatagttaatactatgcttttggtcaaatgtttatttattagtttttggcttggcttgtgttcaaagtcaaatgtttatttatgtcggaatcgtagaactagccttttgccttaaagtgttaatgtaaccactaaccaatgaagattttatagtgggattacccttaactaaactagttacttacttatatttggtaattggtccccaacaaaacacaaagaaacttttatagttaagatctcgcaccaaataagattttgttgataaatttctaatcccggtttaatgaaatttttgcattgcaggaaaaataccggaatcgttgtctaaatacgacttcaacgcagtggatttgtcgggaaatggtttcgaaggagatgcctttatgttcttcggacggaacaaaacaacagtacgagtggatttgtcgagaaacatgtttaatttcgatctcgtcaaggttaagttcgctagaagcatagtttcgttggatctgagccagaaccatatctacgggaagataccaccagcactgactaaactacacctcgagcatttcaacgtgagcgacaaccatctctgcggaaaaatcccaagtggcggtctccttcagacctttgaaccatctgccttcgctcacaacatctgtctttgtggaactccccttaaggcttgttaatttggtttaatcttggcggaagaataaaaataatgttgaatatgttatgatgatgtgttcattatcaccgccaaaccaagtttattgtttctttgttatgaatttaatttaatggcaagaattggttacgtaagaatgttgtcccgtatatccacaagtctaatctttataacactaaataatcaaa

SEQ ID NO: 21862 - DNA, 574 bp, Arabidopsis thaliana landsberg
  unsure (1)..(574): unsure at all n locations
agaagactctctatgaagttcggtttttaattgccggttttcttaatgaaccgtctattcagaccggttttaatttcaaagcccaatttaagcccacatgtatttttttttccccctaacatagccctgggcatgtggtattcgggtcggggtcgggtcggatctttcgggttcgtatggtcatatcaacaatttcgggtcgagttcggttcggcttcacttcaggtgcggtaattcaggtattagtcaaaaaaaccataagtaaccaaannnnnnnnnnnnnnnnnnnnnnnnnacccaaactttgtccaaatatacccaaacatacataaaaatatccataaaacccgaaagatctgaaattagaacaagtttttccttaagccaataatataaaacaagaagtaaaccttgttttaagcttgttccataactcaaatcattaaacaagtcacattattagtgcatatatatcctcatatgtatatatagnnnnnnnnnnnnnnnnnnnnnnnnnnnntaacctggatcctgaaccgaaaaatcgggttggggtgggttagggttttaagaa

SEQ ID NO: 21863 - DNA, 528 bp, Arabidopsis thaliana landsberg
  unsure (1)..(528): unsure at all n locations
taagaaatcatagagtatttagaacagtctaaaaccttatttctggatttttagaaaatcaataataattccaaaaatccccaaactttttaggtgacccttatacattatctagaggccttgagtagagacctctatgatttgggccatgtttgatacctagaacctacaaccctaccccttgtcctgtgaacttcactgttgactccggaaaccctaagttctcggaggtccgtgaaggaaaattgcattcaagacttcagataataaccttttattatctttgcactctcatgagcattacatgggcattcattactatgtatggttatatttagaaaacaaagaagaagtagaagaagagaagactccaccaccaccnnnnnnnnnnnnnnnnnnnnnnnnnnnnnnnnnttgatatctgcggatccgagcctgattcaccagtaaaacaaggcaagcctcggtgcatttccacctccttattacttttaaaactttttctcacttacttgatggattaggtga

SEQ ID NO: 21864 - DNA, 523 bp, Arabidopsis thaliana landsberg
aaacttgtagcaagtaaagggtatagagatcaacacaacacagagaattgcttataactatattcttattaataacaagttgtttacaaatgttatattggagattacttgatctattctacctaaaagatcaaacccgactaaaaatatctaagtctaattctcttctctgtttcttatcactctcacgtgaagacaaagagaattacacactcaccttcaaacttttgcaatgctctgaagtttttcaatcgtatcgtaatattctagagtgctcaaaacacctcacgctaaactctagaatacttatacatactctccagaaccctaaacctaggatctccgagaatctcattttaagaaatctttcttgttttcttcaagcttattccttcctaaatcttcgagatgatatcttccatatcttcttggtaattcttgtctttgacaccacgccaagtcagcttccatcccttggctctccacatcatcccgccttagcttgccacgtttgctctcgcat

SEQ ID NO: 21865 - DNA, 547 bp, Arabidopsis thaliana landsberg
ctattgagctcggatctcctcgatggttggcatccggatcggttgaatctggttgagttctcatcagtagccgcggggggagaagaagcaccggttgatgtttcagcagcactcgaatcagccatttcaaaggttaagagagttggatccggcatgggacaatgtcatcaaaagcttaaacgaaggggattgtacgaatcatatcaagcctgttcgttctcgcgcctgtgagataaaattaatcagggtttatcccgaggctctagggtttaagctacagctagctaccactttaggcccattattctacattttggaactgtacactcgagccttactaaggtccaatatatgtatacaattaggttttgaggatattaagatgtgccacgtggcatattgcttttcgaaagaaaaaacgtctacctagttcctacatatgcatgccgcttcaaattcccccttcatatatgctggtctaatcttttttcaaaacaaccaacgacagagatcagtagcatgaaaaattaaagagcgaaaccagagc

SEQ ID NO: 21866 - DNA, 339 bp, Arabidopsis thaliana landsberg
  unsure (1)..(339): unsure at all n locations
tgaaatttttagcttgttccaaaaacaatacatagttattggtgattatgttgccaacaaggttagtaagtctgagatggtatatgaacataaagtatcttatcgtggtgtagcacaagagcatttggttaattatgatgttgcaaacgagacgatatgttgcagttgcatgaagtttagttttgccgggattttatgtcttcatgcattgaaaatgttggacaagaagaatgttagaagaatcccatctaactacattctaaatcgatggagtaaagaggcaaaagcacgaaaaatatcttattatcattcagagccacgtaatganacagtcaaaga

SEQ ID NO: 21867 - DNA, 1530 bp, Arabidopsis thaliana landsberg
caattttatgccaattcgtgcaacaaaacaaggagtaattgattagatggttttgcgccatttttcgttaaaaacgaatctccaacggacggttgcacacgaaaaaccgttggaaaacttatgaaacatttcatgaaaaggtaattaagaaatttacaatgaattaaacatgcatgatctctttttgctgccccaaaatatattatataccaatatattttaaaatggtcaacgtaacataatggcaagttggcattagataccctaatattaaagcaataaattaaaaaatggtcaaagttaaatgatctactatccatattatcttgcaataaattaaaaaatggtcaaaataaaatgatctactatccatattatcttggatagttaataatatcgatatttagaagattttggttgagatttaaaattatgttttttctataattttgtttgatttatttttaatttatttgaatcatatagtagagatttaataaaaacaaaaatcagcatatgttgtgattcaaaattttaaaagcggatatatattactcaattataaaggaaatatgtatgttctcacatcgactaaaatgtttacacaatggttgaaaatcatattataaataaaaccaattgaattcaaaatccgagtgaaaatgaagcttaacttaacaatcatccaaattttaaaagtttttgttagattagtttggttctttagtcagatcgttgattatactagatataataaaatttaaattcttaaaaaagttgaaaaaattattattgatatattttttaaaaatattacaagactcaggttatggtaaaacttgtttaattgacattaatatgatgtcataatatagataaataattattttattattttgttaacaccaccaattttaaaatattagatatgtagaattaagctgattctgttatggttgtgtaagaaattatatattgctctttttcataaccaaacatactttgtatctggttttttataaccaaccaatctaatatcagtttacaccgtgtagtgagaaactatatttccatcaggaatactactttcatgtgtactttgatatttgtaaaattatatattttaaatatattctttattagtggtaacatatataactgaatctaaatttgaatataattggaaaatagaaataataattaatctaaaacctaaaagtataaatatagttgtttaaaatttgttcccaaaccaaaaccaaagcctttaaaaggtttatataaaatattattcataaactttacgaaggaaaacccccaaaaatatgatgtttaaccaaaccaaaaatcgcattaaccttaaacatattaaccattttcaaccaataaaaatatataaataaagcaaaagactaaaattttgaattttgaattgattttctatatgattcggatagattagatcaatttgattattatctatatatagagagacaaaaaaatgtgcttacaaagtcacataaatatctt

SEQ ID NO: 21868 - DNA, 1616 bp, Arabidopsis thaliana landsberg
  unsure (1)..(1616): unsure at all n locations
aaaatatctttcaaggtaaaaaaaaatattttcactcttgtattgtttctttcaccactaaaattattgattaaaatattatttgaatggaaaatatataatatagcaataatttaaattatttgaatgaaaaatatatcacatagcaataactcttggtatatttatattgagaactaaaattaaaagtatttatcataaagttggcgaatgaaaccaaaatgtttttaaatcagacacattaaaaatatagatttttaaattagacacattaaaaatatagagttaagttttcaaaaacatatattgatttttcctgcctaaaatattcgggaaataaaatttccgccgaaacaaataaattaacgagaaatagatttgcagtgatttttaactgatttttaaaggatttctaagggttttaagaagatttttaaaggatttgcaaggatttaaaaacccttgtaaatcttttaaaacctttgtaagtgttcataagagttttaaaatggttcaaaaattattaaaaggtttttaaagatttttaaatggtttacaagggtttttaaaagatttttaaaagatttacaatagttttaaaaactcttgtaaatcttaataaaaatttttgtaaggtttaacaagagttttaaaatggttcaaaaagagttacaaaatgttttaaaatagtaacaaattttttttaagagtaaaaaatgatttaaagacttcataagatttttaaaatgatttttaaaagatttacataaaatcatttgtaaattcttgtaaaattttttatattttttgtaaaaaaagtttttttgtcatctaaaaataattagagttcaaaaaagctaaaataaatgattcaaaaaatataatccaaatttgcatagatataggcttatggaattattcctggcgtagaagagaatctaattataattaattagtgaatttgtcaagcatttgtgaaactatgccaaaatatccaaccaatatatagttcaataaaataaaatatagtttaatatattcagcttcggtcgctgttttggattcatgtacaagctcttcgttgacttgtcttcaagagatcgttcatctggaactctgttctgttgcaaggtaagaaaataaatcttgaactctgcttttagggagcttactagtctaactctggattcttctgcatcttcttttcgctttctaaagtctgttgcgatgaatgataaaagtcaattgttttctcaatcctgaaattatggccgaaaactagtgaacgaaggcgtgcacatgatcctatagctgactaggattttaatttgggaactatgctgagattctttagtaatttgatgtttnnnnnnnnnnnnnnnnnnnnnnnnnnnnnnnnctatctttaatgagaaacaggaacttattgacgaagaaagtcgatgatgatagctcaagaattgggaatatatgttgtggagagcaaaagaggagcaatattatgtctattgctttctctgctctgtttaggcacttggcctgctcttaggctctttcttgacggcgtggtcgtctcccacaacattactatctngattattccatcactaactttt

SEQ ID NO: 21869 - DNA, 649 bp, Arabidopsis thaliana landsberg
gaaagctgttgtggagagggcatgcccaagaaccgtttcatgcgcagatatgctcaccattgcagctcatcaatctgtcactttggtatgctccattgtcccatattcatttacaaacactgttttcaatatgaaaagtattcaatattaattgaaaaaagcgcgtggtcccgttaagaaaatttgacaaaattaggtctcatatcactagctttgatatcatattaacccaaaagaataattttcaacttttttctcaagaaatagtggagatataaaaatttactttgtgtatatatatctaatcaatgaatttatattacatgactgtctttttctctttacatgttaaaaataatctcaagaaaatattattgtaatataatggttattatactataggcaggaggtccttcttggagggttcctttgggaaggagagacagtttacaagcattcctggaactcgctaatgcaaatcttccagctccattctttacacttccacaacttaaagccagcttcagaaatgttggtctcgatcgtccttctgatctcgttgctctctccgtaattaacacaagaaattaaacaccattgatcaatatcaataagcgatagttattactatctaatatggatttgtttg

SEQ ID NO: 21870 - DNA, 1175 bp, Arabidopsis thaliana landsberg
  unsure (1)..(1175): unsure at all n locations
tccaaactcccaagacatcttatacagatagttactaaagatccataacctatttaaaccatggttacttgaaagtaaacacagttaaaccctactaacctaaaaacacttagtaaatatcataaactccttagacctctaaacccattgctcgaattacatttcttaatgcaaagttcctcatattcaattttgatgttacaggttgtccagcggttccaagagttatttgctcaaacaaagtacaaggaggctgctgagcttgctgctgaatctcctcagggcattctacggacacctgatacggtggccaaattccaggtatatgttccatattcaagcaaagaatcctctgtgaacatgttgtctataatgtatgtttgtaacaccagtctgaaactacaacatcacactttacaattttgcagagtgttcctgtacaagcagggcaaactcctccattgttacagtattttgggacccttttgactagagggaagctcaattcatatgagtctttggaactatctcggcttgttgtgaatcaaaacaaaaagaacctcttggaaaactggttggcagaggataagttagaatgcagtgaagaactcggagaccttgtcaaagtaatcttaaaatgaccattttcatttaaagtgtctcctatgggcttctttagtatgctgtaacggtaatattttctgattcagactgtggataatgaccttgctctaaaaatatacatcaaagctagagctactccaaaagtcgttgcagcttttgcagagcgaagggagtttgacaaaatactgatttactcaaagcaggtaagcaataagatctatagtataacctcttctattatttttaccctaaagttctgttgtctcatgaattaccattgtttcatattgtgacttcaggttgggtacacacctgattacctgtttcttctgcaaaccatactccgtacagatcctcaggttagtgtggtgcactcttgatacttgcaacatactaaactatgaaaggactttactgaatatntgtggcgtaagcactggaagagttatgaatcaactaacttgttcaataatttcccctgatgttatatagaatgaagaatctttaaccaccgtattaatatcaatagtcttttaattttgatttcaggg

SEQ ID NO: 21871 - DNA, 485 bp, Arabidopsis thaliana landsberg
tcgtgtcatttctcattcctaacacttagccaaaattttcttcgatctcgaactctcttcttcgtcttcttcctctcaaaccctaagatctctcgatctgttcatcttcttcttcaatcttcttcaaacttcttctatcttcttccatcttctccatctctcgatctctctatctctctcacttgtctcgatctctctatctctcaatctcttgatctctcgatctctcgatctctcaatctctcgatctctctatctctctatctctctcacttgtctcaatctctcgatctctctatctctcaatctctcaatctctcgatctccgtcgatcttccatgccgaacgccggtcaagaaggctcccgaaagaggaagacgatgcctaatgttactcagagagccggcggttcaacgacgcctagacctcgggatctgccggcgcagtacaacttcactccggcgccggcggttcatgttccagcg

SEQ ID NO: 21872 - DNA, 548 bp, Arabidopsis thaliana landsberg
tgctacgggaagacaaagatgtgtgtaaatatgttaccactttgttatttgcttcagagaagacaaaggtttggtaaatcacatgtcacaggtgagttatcatttagggaagacgaaaggttgtgtaaattatatgttacagctgatttacatcacgttacggcttagttacatcactttacagctgatttatattacagatctaagcaacatttttttggggaagacaatatgaaatttattggccaaacaacaacaatcaaattaagaaacgtaagaataagtttgagggattgatatgtctataatttgcatgatttaggcattcattcttcaccattttgtcattgtttcatccacatttcatctcattaggagtcgttttagtgtgttttgcatactcaggacgattttgcattcggattgcatgtgcattacatatttggttgttttcaggtactttggatgcttttggagttcacaacgaggagaaacagaacagaaagtcagaatgcccaatgacgcctttcacataagtaccctatcgc

SEQ ID NO: 21873 - DNA, 520 bp, Arabidopsis thaliana landsberg
tgtccggtgtgcccatcgatagaggagtcagccaacgactagaatagtggttggggctataaataccccctcccaaccaccaccattcaagccatccaagcatctcactctcttcattcaatacaagagcaaagaatacactccaaagacacattcaaagcctcaaatcctctccaagttccaaaatcaagtcaagtgatcaaaagtgtttagtgacttaagagagggttatttgtgtttcttttgttgctcttgttgctcttgttgcttggttgctttctttttcaccctctaatctttacaaatgttttgtaaagcaagcaagagacacctaattgtgtggtgatccttttggggtcttagtgacccgtgtgattaagaagaagcactcgaccaccctaggtgaccgattgagagagggaaagggttgaaatagatccgacctttgtggcctcctcaacggggagtaggttcattggaacaaaccttgggaaacaaatcactgtgtccacttatgttg

SEQ ID NO: 21874 - DNA, 1421 bp, Arabidopsis thaliana landsberg
  unsure (1)..(1421): unsure at all n locations
tatgcttataaactagcaagggaaacaatagtttctgaaatcagcatatctgtgaatcctcctcgccaacctaaggctactcgcaaaacaacttgcaaaatctgtttagatgatgatattaatgagaatcagatgttttgtgttggtaagtgtcgtcatcgattttgttccgactgtatgagaccacatatagaggtgaggctactcgagggaagtgtaatgagatgtcctcgttaccgctgcaagactacgctaaaatttggaggctgtgtaaatcttttgacacctaaaataagagagatgtggcaacaaaggattaaagaggacttaattcctgtaacagggagaatttactgcccannnnnnnnnnnnnnnnnnnnnnnnnnnnnnnnnnnnntctctatatcaactaaagaagatgaagttaggagatgttgcttcaaatgcggtcaaatcttttgcatcaactgtaaagtttcatggcatagtaacttgtcgtgcaacgattacaagaagttgaatccataccctacagaaaatgatggaaagattaaagctctggcaaatcagaaaaggtggcgtcaatgcggaaagtgtcaacacatgattgaactttctaaaggaagcgtacaagtaaagtgcaggtatcattatctctattaataacattttccttttgaaagttgattacatgtgttaatctgatttatcattgtcttttcttgatagatgtggttacaaatttcgctaccgatgtggagtccaggctggaggttgcaaacatggtcatggtcttcctccaaggccttcaccgtcgacaccgtcgcccccacccacgccagtaaagatttggtgtatattctttgtattatcaattgtgttcgctttatttgtgtacatctctttatcaattaatcgtaaacattaaattttcgtaacttacataatttataatggtttttttcttctgaatctttttgtataaattagaacgcaaaataataatttatcgtgttaacattagatttttgacatcaaatatttaatagatttctgtttcaatatttcacttttatcaatcttatatagatattatcaaatttaaatagttttctttgttatttgaaagtttccaattttaaaagttacttttaaaaatatttaaaaacaaaaagaggaatgacaatatctcatgtttatgaatagaagtatatcatatactacgaaaagtctcacgcgatacgtgagtaaaacgacgtcgttttatgttagtgatgtacatgtgtcatccacgtcaccacgatttcacggtggataaacgttgtgaaatattttgcacgttttagtagaaattagcacaaaaagttaacttcaggtttgaaattcaaatttttataaatttactatgttaaataattatg

SEQ ID NO: 21875 - DNA, 785 bp, Arabidopsis thaliana landsberg
cttttcgagcctggcctgcaccccgcggattggctcgagctgtgggtcatggccccccgcctgaacggggaccacagctggctcccgtgggatgtcaacgcggggcaccggcctagggagatcaccgtcctccggcatgccgagatgattgccttcggagggaccccctagatcgatgtggaaacattcgcggcttgggccgcagtcctcgtcgccgagactgcggctaccgtcggaacagtcggagaggcagtagtcacatgcggtcatgaagtcccgcatggcactggggttgccaagtccagagaaatcccagcagatgctgggctcgtcgtcttcctcggacccagagggcccgtaggtcgagacgtccgtcagccggtcccaaggcgaccgcatgcgaaaccccagagggtttggactcgcctttacgagagcgcccgccaaagcaaggtcgctaggcgggttgaggctgagtcctaatgatgtaggatgggaatcggtcggtacctttcggtcgacgagcagcgacatagtcacgtcggggactgattgcaccgtcgtctcaggtatgagggcgacgttctgcaagctctccacgagtgcactggcgtcgtccacttgctcgggattggcgtgtcgcggggagatggcgctagccttcgtttcaaacgcgaggtcgacgcccgacgcgccccccgttggagcgctggggacgtcgactctcgcgacagccgacgaggcgcggcctcccgcttggccttggttgccccgaaacctaaacc

SEQ ID NO: 21876 - DNA, 1075 bp, Arabidopsis thaliana landsberg
tatattatgattcttcactaatcactagaaatttatatttattagtttaagataacaaatttagtcaaatatggagtatacaaaccaaataaaccgattgcccgcggtaaaccgcgggttaaatcctagtttattattgaattaaaatgtcaaaagatataatgtaatttgtaacaagtttgatataaaatattcatgttttcagatctgacggtgacaagtaggtgtgggcataatacactacccaattacccgatccgaacccgatccaaaaaaccagatccaaatccgaacttctaaatctgaaacccaaacccaatccgaacccgaacggatatttgaaaatatccataatttaaatacatagtagtaatatatatatttgtaataagccacgtgttcaaataatacacgattggccaattttgaacaggaacatgaatttgatattaactcaaagataagcactatgcaagaagaaaggtcaaacataaacaaacccttgtgaccttgaagatgtgagcaaaaattcatgtggagaccacgcttgaggaaaattcaagtgatcgagatgttgctaattcttgttcttttgcaaccttgaggttaaaatgtacaaacacttaaaatgagtctagaatcagggacagagagacccataagacgtgcttctcaacatttctggcgcattaaacgctataacctttttttttttgttaatattgttgtttattaaccttggtaaacaatgcatgcatcaaaaaatggagttgatatttcagcttgatctgaagagtgttcttgactcaaggtgttgtaagaatcatcataaacttaatagttagaactagggttggtttagcttatctattgtgtgttattttattgagtatacttgtgaagaattatatccaacctatcaattggctacttatgtaaaaagtactcaaggtttatgaatgggttaaggaagctagatacttatgaggtctcttttttacaattttacgtggaaggttgattgcaacaaatttcataaattcttttgtttatcaacctgcaaatgaatattcac

SEQ ID NO: 21877 - DNA, 498 bp, Arabidopsis thaliana landsberg
caaactgagtcaacatcgtttccttgtttttctccttcggttacgtaaaaaatagaaaaaacaaaccgagtcaacgaccgtttccttgtttttctccttcggttagaaaaaaacagaaaaaaaacaaaccgagtcaacagtcgcctccttatttttctcctttggttactcaaaaaaaaacagaaacataaaaaaaaggaaaacaaaggagaaaggatacggttgtttcatcccggtcgtttttaaaacatcacttgaggtaccttccgtaaaacgggcataacttttcgctcgggtgtccaaaaattctgaaatttttacaggagcttgttgacaccattctgaggccggccaaacacacctaacaattttgtagactgttagctacgagcgaactttactatgaataagatggggcgtcatttaactggtactccacgtctccacgagcttcactgtatactagcgcgttgcaacggaaaatatataataccagta

SEQ ID NO: 21878 - DNA, 620 bp, Arabidopsis thaliana landsberg
cattttattaagatttaatttcaccggacgaggttaaaatgatgtttaatttcacgagacaaggttatatggtgggatgggtttggatcgatattgatacgggatgatatactatggacgaaatcctaaaattaacaatcaaaatacaattatactattttaaacgctattttttttttaattagttataaaaatcatatagaggtgtatcatagtatcatacataaaaaacaatagcatgtatctatagatcatctttaatacaaaaatattattttttatttaataaaaatatagggtctttgatgtacctcttgcatatgttatatatataaataatattaattaaaataaaaatatctaattttctaacaaaaatatcgactcctgtgtgctgcgggtcaatatctaaattatacaagttctagatctttattaactctaaaaaacccaaaccaaaaaaataaatactgaattttaatattaaactaacaaatatgagaaaacaaaacatgaattgtccaagatttacaaagataaaaattatgtgttaagaatatataatttatatagaaataataattcctataaaaaatgtctataacttcttaatgaacata

SEQ ID NO: 21879 - DNA, 530 bp, Arabidopsis thaliana landsberg
ttaagatggagcatagtaccttgctgcacataaatacagcattgtaccatgttccatctcggaatgagtaataggtgtggaagtcaaaaatatgagtcgtaatggaagcgacccaaaggtggaagaacatgaagatagtatactgcttgagctgcattatgcaaatgaagaatgtcaagagtggaatcaagaactacaaagacttatgggagttgtatcaattgtagctacaacagaagacgttgatgtcaagaggaagttgtttagtattaccacaatacaagagaacaagttgacgtcaagaagaagttttctaatactaccagagtaagaagaagagaaaggtctaagtttatttgataagaaaggtaattaccaagttctcgagaccaaaggaaccaggagaagaattgggaaggagtagggctacatcaagagatgaagacatgatgtagagactgaaccaaaaatgatattcagagaagatcagaaagcatcaaaagagaacggaaggattgagcgggtgtact

SEQ ID NO: 21880 - DNA, 597 bp, Arabidopsis thaliana landsberg
  unsure (1)..(597): unsure at all n locations
tgagcctcttttgtacgcagctcnnnnnnnnnnnnnnnnnnnnnnctgaagtctttaataggcttcttgagggctttcagctttttagaaaccctgaacatgtgagacccaaccacgttagttgaataccaattttccataacaacattcaaaaactcctcattattcaacagaaaattatagaacttgaagggacgcttaacactaataccatcagcctccaacacaaccccacaagacacatgatctgagaagtccaaattaccaaagacaccaaagacggaggcggcaccggaagacccatcccgaacaccagaagagacaaaggatgcagcacgagcacagactgctgcgaacttagaagagcttgtgaccaccccacgatgaagtttctttttctttttctttggcattagaacagaaatttttgaccaccgacgtgaggccggcgttggagataaagaagcgaaacgagaaaaagaaaggtttttacaagatattttgaatatagagatcgaatttgatgttgtttctgtcaccaacgctcagcgtaaatcgaagctctacctatctttaagatatctattatctaccatg

SEQ ID NO: 21881 - DNA, 1654 bp, Arabidopsis thaliana landsberg
atcccccgtcgccaagagctgccaactcgccactgcacctcatgagctcgaagatcagcatctctctctctttctctttcgtttggtataagactctctaaggtggaggtttgcctcttgtgttctgcattcaaagaagtaatctctaaaccctttttaagttttatttgtctttttattatagtttcctcaacccaacttttgattagctccttcgccatgagcgagtagatctctagttgggtttgagggggtttcaaaggggaattcatggggactttagatctgatttaggttggtggtttctatggttttgtttgatcgtttacactattctttctagttgagtttaatcttaatgcttgaatgtccggaacgccacctagtacatgatcttaggtattttatacttggcagaatcttgaataatcttgaactaactcaactgaataaagaactataatcgttgctcacccgtcgagtgatagggacttatggactagaatcaaacttgaacttaatgctttcatatgtattttgaaaccatgttagcacctactagccgatagggcaactgagtacgcaagatattagtgataatagtcgtctttcacctactaaccgttagggttagctggtcttgatagagtttcgtatgtccgagaatttggaagtaagcaaacctaaccatgttatcacctagattgagatctataccttatttattgaaccatgacatccggagaaacccccgatgacctaacgcttctctcttattgcttatcgtttagtttaattagtagtcttttagtttagttactcatagcatacaacaaccccctctctttattttggtcctagcttcactctcttcttaaggatttctctgaactacttctctcattgtggattcgatcctaaaatactactccgatatattgtgcacttgcagtagtcgtgtggtttttcaggtaaaaatctgaagcgaaataaaacacgcatcacatgtctccccatcaataacccgtcaaaactttccgacagattctaaataaaaaacaaaatgtcagtaatttccaacgcaactccgaccaagttaaattcgcccatatacttcgatggatttccgacccatcgaacatccgtcagaatattctgcatctttttgactgaattccaacaaaatatacctggtcatatagacgtgctgtttatagccgtttttttaattaattagaaattcgtcaaaaaatccttcgaatactcatcggaaacgttgataattctcatctttatattcttctaccctcattcacaaaatcatccaagcaacaaaatctaaccagatagaaatggcttctttgaatctgtttaattattttcgatcatggagaggccagcccatgcgtgatcccaagatggagttaattacgatggaatatgcagaaggtcttatacaattcatggcatttgcggcaaactaaccagtaaccattgaatcaaaacaaatgtattttccatgttgtacatgtcggaatcttagagtttttcatgtatctcaagtttggatgcacttaatgaggaagggtttatgccaaggtacaaagtttggttcatgcatggagagaatgagtcaatggtgaaatatggaagt

SEQ ID NO: 21882 - DNA, 623 bp, Arabidopsis thaliana landsberg
  unsure (1)..(623): unsure at all n locations
taacaaagttgaactagacacttgcttaattgctaagacaaatatgggctggctctggcatcatcggcttgccatgttgggatgaagaatcttcacaagcttctaaagggagaacacattttaggactaacaaatgttcattttgagaaagacaggatttgtagcgcatgccaagcagggaagcaaggttgagtccatcatccacacaagaacatcatgacaaccgacagaccacttgagttactccacatggatctattcggcctgatcgcttacataagcatcggcgggagtaagtactgtcttgttattgtggatgattattcttgcttcacttgggcattctttttgcaggaaaaatctcaaacccaagagaccctaaagagattcttgagacgagctcaaaatgagtttggatttgagaatcaaaaagattagaagcgataatggaatggagttcaagaactctcaaattgaaagattcttgaggagggcatcaagcatgagttctcttctccctatacacctcaataaaatggtgtagtggagaggaagagtagannnnnnnnnnnnnnnnnnnnnnnnnnnnnnnnnnnnnnnngacatcagatcggttttgggcg

SEQ ID NO: 21883 - DNA, 664 bp, Arabidopsis thaliana landsberg
cgttcttgacctagttggaccagcaagttacgcatgtttatggactcataatactcggaatcttcaagatcagtatgttcaatagatataagagatttcatctctaaaatgtgaaggctttgtctcaaatccttgaatctttggccaagaagttctttcactttcgttattttttccatgttgaaaaagcaagctatatgaaggaataaatctttatcttcatcacataaagcatcataactgaacttcaaaatgctctcaatatctccattacggtacgtccttaaccttgatacttccattggccactgctccttggacaatccacgaaagtgggatccaataacctttagtcctaacggaagttcaccgacatggtatgtaatttcacgagctagttcatcgaaaccatcttcaggggtcttttggttaaaagcatacttgcagaacatttgaagatcctcatcaaaacgaggttttggatagcttcctttgatatcctcgatgagtgcgctattctggaaacggctggaaatataggcggcgatgttttcaatcatgtctgtttcatcaaccctaacaaagaagcagatcaatttatacattcgtcttgttaaaaaataatcactaagagtatactttgatgtgttagaaatattaacag

SEQ ID NO: 21884 - DNA, 268 bp, Arabidopsis thaliana landsberg
agacgccaaaggattttttcgaagcttggatcagatgaaagtaaggtaaaattgcaaatgaggtacaatccactatttctgggactcgaggaagagatgaacatttgtgatgatgacgatctctttgtttatatagcatccgaagaaaataaccgcataagtgttttagttgtggagcgaattttcttaacctgaatttgccagagccattgtgtctttagtgctccaagttcccggagttcctaccctctgcgtctcttcacttccc

SEQ ID NO: 21885 - DNA, 621 bp, Arabidopsis thaliana landsberg
ggatccccgccaaagactagaaagttataaggatagaccatgttacaaattagcttaatcactacattaatctacctggttggctgtggtttcaacgacaagtctcttaagctctctgtctaatccaaaccactataaaacaaagaaaatataaacattggttttatatacacaaggaaatacaaaagttcctgtttattaacaaaaatgaaattatagatatttctaatactacactatacactaaccaaacttattgtcccgtttagatttttctttttaacaccttttttgaaattaatgtttttcaatttcatttcgaacagagtcctatatacatcacatatccaattcaaattgaaatgaattttgatattctgtcagaaatttttataaactttcatctgaaaaccaataattgtgtcccaacattgttaatgagattctgaaaaaacttacacccatcagatcctgtcagagcgcttcgcgtcatttttggacaacctctagtgatcgaatgagacgacgcgagccaagatcagggggttgcactcttctaatatcattgaccttagagagcataaccacagaatgccatggggcgcaaaacatttgtctgac

SEQ ID NO: 21886 - DNA, 468 bp, Arabidopsis thaliana landsberg
  unsure (1)..(468): unsure at all n locations
gttgtatggtccccgacagctgaggggagcagcacagtcttggtgggagtcttacctcgccacccatgccaaccctgaagccattacttgggaggagttcagggacaacttccatcactatcatgtgcccgagggactgatgatagtgaggaaggaggagtttctcgctctgaagcaaggtcccctgtccgtcagtgagtacagagataagtttttgcagctgtcacgttatgccccagaagacatcaacacggatgccaagagccagtgccgctttctgagaggattggttgatctctccattatcagctaatgaatcacactttccccaccttccaggatttgatagacagagcaatcatgactaaaaggaagtgtcgggagatggaggataggaagcgtaagattggtggacctcaggtcgggagtagcagtcgtccncgctactcaagcaactcaccacaacaa

SEQ ID NO: 21887 - DNA, 551 bp, Arabidopsis thaliana landsberg
ggtccagctcgtagtgcgaacatctggctgccttcctgaccgtggggggagagaattcccatgattctccacgatgaaccattctaggcgccatcccttgatgctgtccttgagtgggatgtcgaggtagtcagtctttctcccacagcgcatctccaaactcgcgcccccaccagctggtgctgccctccagccatcctaggccgacagtggtacaaatacttccaaaggccatagtgaggcaaaacaccacggtaggcttcacataaatgaacaaaaatggagacttgcagaatggaattgggattcagatgggtcagattcaagtgatagaaatcaaggagaccgcggaagacaggagaaatgggaagagcaagaccgtggataagacaaggaactgtacatgacagattcgtgggtgtcttttgtcggaacaatgagcccacgacagatccgtcgagaacgagagctccttcggaggaagaactccgatggctacgagatgagaacgtcggattcagatacaacagacatatgattacttgcgaagg

SEQ ID NO: 21888 - DNA, 1991 bp, Arabidopsis thaliana landsberg
atgtgcatacgccttcacatgatgagcatatatatatatatccaatatgtaaatttgaatttctgatccatcgagtcgaagatcaagggaaaggttaattaaacagtaaaactgaggtgaaaattatcttaccacacaaaacaaaaaaggcttgtctcatcatgttcatctcggagacaactttcatataatttacgtacccggccgagacaaaatctcttttcaacactgcccttctaaatatggtcgtctcataatcttttaatatactgaaaagtattttgttttcctaatttagttgcataatgagattttaagaaccggaaaaaatattaaagcaaacagtgaccccaagtgtgtcgttttatactaataacaatatattcccaatataaaaatagagtgggtctgtgagaaaaacaaaaataaatggagccactgggtccatttcctttattcaattagacttattgcattgtttttggtcccattccctctcttctaacccgtacccaaatatattaatgcatatataaatattttgagtgactgagaaatgatagccaaaattttaccaacatttttctcttctcatatcaaagtttctctctcagttcttcatcacacttcactgccctgtttttttttcctcattttgaatagttctcaaacttatatatttttccccctgaagcctagctatttctttttatttgcattaatctcgggatccgaatcgataaaagcaatcagaataatagacttgtacgatacttgtgcctaagctagcacaatggcagaggaatactacagcctccgctcggagagagtaactcagcatcttgtccctaactcggagtctgactcagtgagtgacaaaagcaaagcagagcaaagcgagaagaagactaaacgtgggagagactccggtaaacaccctgtttatcgcggagtaaggatgaggaactggggaaaatgggtgtcggagattcgtgagccgaggaagaaatcacgtatttggctcgtaactttcccgacgccggagatggcggcgcgtgcacacgacgtggcggctctgagcattaaaggaacggctgctatactaaacttccctgaactcgctgactcattccctcgacccgtttcattaagccctcgagacattcagacagcagctcttaaagcagctcacatggaaccgacgacatcgttttcatcttccacgtcttcgtcgtcgtctttgtcttctacgtcttcgcttgagtctcttgtgttggtgatggacctctcgaggactgagtcggaggagctcggtgagattgtggagcttccaagtctcggggcgagttacgacgttgactcggctaaccttgggaacgagtttgtgttctatgactcagttgactactgtttatatccgccgccgtggggacagtcgtccgaagataactatggtcacggaattagccctaattttggccatggcttgtcatgggatctctaacagtttattttgtatcattaccataattttttttttttttttttgggcaaataccataatgttttgtttaaaacagtttattttgtatcattgccataatgttttgtttaatcacgtttttaaaaccctttgctgttgttgtttttttcttgagttttttggtgttagctaagaaaggtttttttttttttggagcgggtgtgagctccataatgatacgtgtacaaaactctatttgtgtttttttttgaaatatataaatatcgggttttttttgtcggaaaagaagggaaaataaagtgatttttttgtaagtatcatcaaatgaataagcgataaataaaagtccactaactttatgatatttgaataatgcaaatcatcaaaaattttaaaaactggtgcatgtttttgtttttgttttttttgacaaaaaaagttttttttttaaataatagaaaatatctttaaccatcattgtaaaata

SEQ ID NO: 21889 - DNA, 621 bp, Arabidopsis thaliana landsberg
ctgtgaagaagatatatttcattctttgataggagcgactatttacaagaaattaaaactaggtttacatttgattattccttattaaaaacaaaatgacaatgagtgtgaaaatgtttcagaggtaggatatctctcaatagatgtgctttgactctggcacaatactgttgactgtgcgagcttcggattcctccctgaattcccgttgctgttgagagtgctggtgcccttctggctactggcttcgggaataggtcggttgtagtggtgcggaggtgggcgttgtggccaagaagcctgtgaatggctagccaaagcgacagaagctgcaggatgattgttcacatactctagtatgtaaggagagtggcacgaagcagtgtgtaagacctgcttcggctggttctgccgagcttcggcttctgctatttccttttgtttctgaatagtgacatggcacattcttgtagtatggcccttgtcctcaccacagaataagcagtaaatatttctaggctgatcccaaaccttcctccgaaccccatgggccgtctgcctcttagagctggtggcatgaaggagctttgctgctagcctaaagattgtgaggtatattgt

SEQ ID NO: 21890 - DNA, 517 bp, Arabidopsis thaliana landsberg
  unsure (1)..(517): unsure at all n locations
gagcggggctgacgcaagggtttcgaagcagcccgtctacttttgggagcattactactcgggtcgggaagtgggcataacctgcgacgcggagtcttgtgcggatctttttcgcaaaatcagctacgggctgattccttttcccgaggtcaaggaattaaaggagatgaaggcctttaccgacgttgcgaggaagacgttcgatgtatgtctttatttctttttgttttttttgatggccgagatgcttccttgactttttccctcttttctcgctttgttaggctgatggctagatgaaccgtctggcttatctgtacgagcgtcgcttacgcaacatggaagtgctgggctcgcaggatcttcgtggggagctgagnnnnnnnnnnnnnnnnnnnnnnnnnnnnnnnnnnnagatggagtcggggagcaaagaagccgcgcaccttatgagcgaggtagcgaccttggcttatcagccaacccgttgggggaagagagggatcgttgccccctg

SEQ ID NO: 21891 - DNA, 491 bp, Arabidopsis thaliana landsberg
gtgtgctactggtagtggtaagtccggtcactttattgctaaatgtccgtatacaagtgacagtgacagggacgacgacaagaaagggaagaagaagattgaaaagaagagatactacaagaagaagggtgaagaggcgcacatggggcgggaatgggactccgacgagagctccatcgactcctcctccgacgaggacgccgccaacatcgctatcaacaaaggacttcccttccccaacgtcggccacaaatgcctaatggcgaaggacgacaaaaagaagaaggtacattctagagataccccaaaatatactacatccgatgatgagggtagctctagtgataatgaagatgatttaacttctctttctgctaaccttactaaggatcaaaagaagagaataaatgaatcaatagaatccattaatgagaaggatgatatcttggaatgacaagaggccttcgtcggttaaaaaaaccaaaaaaatg

SEQ ID NO: 21892 - DNA, 933 bp, Arabidopsis thaliana landsberg
  unsure (1)..(933): unsure at all n locations
ttatccgtggatatngntttaatatatgggggtgtaaattatatacgatctgtttatactttttaaattatttctaaaataaaaatttcatttcaaatacatcatattagaaattataaaacttaatagtgtgtacgagtcaaattagatcaaaagaattataaataatcttatatcatatttaatgggatgccaatacctatcttcgtatttcttttcacattcatcgtttcttactttttatatttttttcgtcatctttattgtcgattttcttatgatcgttgttattattactttcattatccgtttcttcgttatactcttcatcttcctcttcctcgttatgttcctcactttttctcatttttttcatcttcttttctgtaaaaaaaataaatttaaacttaataaccttaaccaaacttaattccataagcatatgaattaaatatcgaaacgacttggtttatttgactctatgaactcgaaattcgatcccttatttccatgtctccggaatactctaccaaatgtcagacatttcgagtttattcggatgtgcggtttttttctccacatatctgataagatctaaaactttacaataaatcttctcgaaccaattgaaaaagcttagataaattacacacaaaaagacgtttaaatctatatcccaccattcaacctcaaaacagtaataccagacacctcgtcatcaagtctagctacatatgaaccaaacgttgccataaaaaagtcttgtcataactgttttctcacttttctttgtcatatttgagaatccaagtttgtgttatgctatcaaccgagtttctctttctacatcattttagatggaaatcaaccctctttctgacctaaattttggtatcaataattgttcataatacaagaaacttttcattaatt

SEQ ID NO: 21893 - DNA, 618 bp, Arabidopsis thaliana landsberg
acgatggagttcgagaaaggagatggagtatatttttgggatcattataaagggaaaaaggaggcgtagtaagacaaggtgaggtgaatcaaaaactgagaaggtgaagtttgatcaaaggaatatcgttatcggagggatgtgggaagaaaactgcgtctaaggatcaaatggtaatgttcgaagaaggatacatgatcagagagtaaacgggtgtaagcgggatgatcaagatagagataatgcaaaaagattatcgagcgagtaaaggtgcaaggtatgaaagatccaaaacttaaaggagaaagtcggtaaagaagagtgatgagttaagtagttcaactgaagccgctaaagggagaagtgtacaaaatatgaggaggttgtagatttaaagaagatgatcagttaaacgaagttaagattggaggtatcgtaaaggtaaatatgagaacgaaaggaagtcgtaccgaaaaggaaaacaatcgaatgtaagcattaaaggagtagagagaaaatgatccacggaatcaagtcttggagttaatatcggaggatgatatatgaagaatgatccaagtcattaaaggaaatggcaaagttaaaatgatggggaca

SEQ ID NO: 21894 - DNA, 604 bp, Arabidopsis thaliana landsberg
  unsure (1)..(604): unsure at all n locations
ttcacttcgctgatttgagtttcacatcatgcagcttccatttattatcgtgaatagtttgtgacgaccataagtcatcaatgcaaagtcaatgtaaacgatttttttttatgtcattcctttttattaacaacaaaagtcaaattattggaaaaggccttgttgaaataacctggtttgtttatgaataagattacaagcaactgatatctcgacaataatttagtgaaactaaactttttgagtaagaaaattaattagggctacaaactgaataaactagggttgtgaaattattgttttaacttataactgttcgtttgttacttgtctggtaaggaactttaactgtgctgtctttttgacccaaagtctcggcgccaagcggaataatcatcaacctcacttcaataatattcaattccaacccatatttttctcggaaatagattgatagacgtcaaaacatagaaaatttataaatctatnttctctggttgtcacttccacatgttntagtctaacatttgaataacaataaaagttgatgttcatcatataggtgactntgactttcaaaaattgattagttagtagtttatac

SEQ ID NO: 21895 - DNA, 927 bp, Arabidopsis thaliana landsberg
attccatctcattcaatgtccgagctacatcaacctttctagcactcgtggaagctatgtctcttacctctctatctcttctctactctctttcaagctgtagatgattcttttcgacatccgttcaaattccgatatttcttgcatccactaaaaggagttgaacaagatgaaaatggattcgttctaacaagatcctagcgtcactcttgaatttttggattcaatatttggtcatctagcaagacgttgcttgtttttgaacctttttttaagtctctgtacatttttacaaaagaacctccccaaaacccttcaagtaagtatgctaaagagcaaactccagtcgaggaacttattgcttcagcaggggcagtaggaaatgttgaatgcaacataaaaataaaaatctttcatatgtacgcaaattttactataattctagaaaccatttccttagaattatttaaatcgacgagtcgtctttgtttaaacatagttcgcgtaacttacgtcaagacaaacactatatatggaactctagaaaaacaacattcatttactaaaatatatgtggttactaatcatcatccaaatataaccaagtttgaaatccatatataaacaccaactagcgcttgttgataatcccatagagccaatttccgatacaatattagatatataaataacacaaagtgaactcctaatcagggttcattttataaatttattatttagttattgcggataaagaacaataataatatggggatgtttaaaaggatcaaggttatcttatctcttgctctcgtagagttcttggccccttgctgcaaccaaggttgagggcccaaagataccatacctttatcctcgctattcgattcgtgggagaatcatggcctggtaccatttggtgtacaa

SEQ ID NO: 21896 - DNA, 433 bp, Arabidopsis thaliana landsberg
tgatgtcaatgctcaccacaatatcagaacttccatcaccaaaacaacctacgtttacagtgcactctatagttgacgactctacatctaatgatttgatcaccgtcaatgagattacacaatctgtgattcaagggcgttaaagaaacagtgtgtgatcgaaatttgttcgaatttgaagtgtgggttctgctcaggtaaattaaagtgatcaacttttcttcattaccttttaaaaatattttctctacttgtaaaagagtttgtactctttattgttgtccatgtgctcatgaagctccaatgttttcgttgacttggtcacatactcaaacaaacaggtcatcatcatttttttattatattctttaacggatttataaatttaagataaacggtcgtaattaaaatcacactggtttagttcgagttt

SEQ ID NO: 21897 - DNA, 483 bp, Arabidopsis thaliana landsberg
  unsure (1)..(483): unsure at all n locations
ttctgagttacactaagagtggttctgtgccattctcaatgaaggactctatttgtgacaaaaccctaatataaacccttccttcgttaactttcctctatcttttattcacacacgcatctcttcttcaatgttcttttcttagaaaatcattattattcgtctttagttcttcacaaaagagtcccgtttttctagttgatattttgtccgggaaaatcagtttaaaactgaaaatatcagtaatgtcgtcgcttgtttctctttgccaagttatagcattattggtcttgttctatttcggggtgtctcttgccggtaaagacattccggcgaattttgtgttcggagattcattggtggaagtcggaaacaacaactacttagccacattggcaaaggctaataattttcctaatgggatcgattctggatcacctactggtagagtcaccaacggangaaacatagtcgatatcctat

SEQ ID NO: 21898 - DNA, 552 bp, Arabidopsis thaliana landsberg
  unsure (1)..(552): unsure at all n locations
aatccttctctgcggctctattcctcccgatatcggttatgtttcaaggatgctggttcttgaacatggggttnnnnnnnnnnnnnnnnnnnnnnnnnnnnnnnnnnnnnnnnnnnnnnnnnnnnnnnnnnnnnnnnnnnnnnnnnnnnnnnnnnnatcatagtggtgcggtggcttgtgagtcccctggtgctgagattagggcaaaagcattggcgaatctgcagtttagttggatgttgtctgctatacttatcattacatgtgccttgtgcctcaagtattccggtaaagttgtgttgcctaagattaggtcatcgttggagtacgagcgtctttgccggcaaggaagtgatcgttctgcaaccgtaacggtggaagcaccggccagttccgatcaacaatagattttccttactttaatttatcatctgaatatgatgtaatatgtacatatagtacactaataagtagccataataatagttacataatttataagagggggcagagtgtacgcactaatgatagtggacctttcgcatgctttgt

SEQ ID NO: 21899 - DNA, 405 bp, Arabidopsis thaliana landsberg
tggacaaaatgaacacattcctccgccaccgcctcctaccctgcaagaactgatggctcagcagaatgagattctgtgacagttggctcaacgacatccgctgcctcaacattatggtggtggtgatcatcagcgtcacccagcagcagccacttatcaagagttcctcagtacctagccgtcgttgttcattcaggcagaggatccgctggatgctgatgtatggcttagggtagtggaatccaaattcccactactcaacggagtttgtttagatgtgactaaggttaggttcgccacccagcagcttcgcggacccgcgcggacatggtgggaccacttccttgctatgcagccagttgaccatgatgtggaatggagagagttcaaggcatctttcagggg

SEQ ID NO: 21900 - DNA, 969 bp, Arabidopsis thaliana landsberg
ttttttgacttttacaagaatgagtcttgagtgttttttttttttttttgggtcggcatgtcgtgagacttcttgcacattgttttcaatgtttagaaaattagcagatgaaccatatataatgatataacataactataatagtttatttttgtggatagaaaataaaatcttattaaaaaaaaaattcattatttggtagtaaacagcatatgattgcaaacaataaatggtaatcatttacagcaaaataaatagaccttaagcaaatagtttatatgcattttagtctccaaccatatataatactgtcgttggtttcaacactaaaataacatcatcttagtctactacatccataataatgtcattagtatttcaaagttctcgtaaatggctagtgctattttatgtttttttgtggtcggctagtgctaattgttcttttgaaatgttaacattttgttgtaaccccaacattttctttccaaaatttcaataccttcaaaaaaatccgccatgttctcaattttttttggactaaaagtatttgattccacttgaaatctgatacgtacaaagattacttctatcatcttttcagtgagtgacatatactaatttgtttttcccggtagatcctaaagagaagaaatcgatgtgggcaaccaaaagatttatttacaattctaacaaattgacagagacaaatacaacatggaacagtccagagtattcacagaaaatgaaaacgaattccgagatctaatgctagttccagagagagcttatctctcaatccaagactccgtgtatactgccaacacatctatatatatatatatatatatatatatatatatatatagatattatatgtgtgagagaaagaaatacatatatatatgatatccgtaataacatatgacgtggctgattgggaggataatgaactgacagactacgtaa

SEQ ID NO: 21901 - DNA, 604 bp, Arabidopsis thaliana landsberg
agacccttgggggagtgtccgaagatgcaaccaaaaacagagttcgtgaagttcttgagaaaaggtgcgtatggatctagcgatctcgtcaagtacatcaaacgcgacgataacgctttgcctctttacgccgccgtgaaaaccgccgaatgtgaagactacaactctctcgaaagagaaattcagattctatccaaacttgaaggatgtcgaaggatcgtgcaatgctatgggaattatactttagaagaggacttcgatgtcggtggattccgagtctacaagatggttatggagtacgcagctgcagggagtttattcagtttcatggacagttacaaagatagaaagttaccggaaacgatgattaaagactttactcgtatgattcttcaaggattagtctctgttcatagactcggttatgttcattgcgatctaaaacccgataatctacttgtctttccatgtagacaatcttacgaattgaagatttcagatttcgggtcttcgagaaaagtcggagaatattctgattgctgggatgttgatttgccgtttgttggaacgcctgtttacatgtcgccagaatcagtccgtagcg

SEQ ID NO: 21902 - DNA, 1824 bp, Arabidopsis thaliana landsberg
ttgatcgaggaatcttaacttgccaaaattactataagtaaacaatcttgaaacgtttgtttacagttatggtacaagtaacctcctcaaaatccccctggtagaatatctttgtaattaaaaaaagaaagtcgaatcgttcacgcaataagaaatagagctatcgagagctaaggctacctcactcatgacctcacaatatatgtatttattagttaaattttatttgctttaatgttgatattaccacaatatataaacatagttttaagttattagattagagtcatgttctcactctctagtctcttaacattttactatgaactaaattcaaattccacacacaaaaaaagttagcaaaagaagcaacatgaatatcatgatggtgcaaaatatctcttttctatctctacatttactattaatattactactctgcctccgtcctcttaccaccgtagccgacggcaattctaccaacattgacgggtggtgcgacaaaactccatacccatatccatgcaaacgctacttcataaaacacagcggttttcgactgccaacacaaatatccgagttccgagtacttctcgtggaagcagccatggatcgggccgtatccgcttgggacaaattgaccaattcaagcaagaactgcacagatttcaagaaacaagcagttttggcggattgcattaacctctatggagacactgtcatgcagctaaacagaacggtgcagggcgtgtcttcaaaaaccgggagaaggtgtactgacttcgacgctcaaacgtggctaagcaccgcgcttacaaacactgagacttgccgacgcggctcctccgatctcaacgtctcagatttcactacacctattgtttcaaacacaaaaatctctcacctcatcagcaactgcttagccgtcaacggagccctcttgaccgccggaaaaaatgacagcaccaccggtgattccaagggttttccaacgtgggtttcccgtaaagagaggagacttttgcaattgcaatcagtgcgtgcgaatcttgtggtggccaaagacggatcgggacatttcaagacggtgcaagcggctattgacgtggcgggacggagaaaggtgacgtcagggaggttcgttatatacgtaaaaagagggatatatcaagaaaacattaacgtacgtctaaataatgataacataatgttggtcggagatggaatgagatataccattatcaccggtggtcgaagtatccaaggaggttacaccacttacagttccgccactgccggtaaattaatgaaatcattttatttgattttaatttattttttctcattaatagtaagatattttaaatttccgtacgaaattgagttttccgattaatcgataagattcatggtggagacgtataagttaattaaatcattcattgggatcttcaccaattattatcactatcattttttacagcattattatgactatatctaaataaacgtaaaagttaccatttgaaatttatttcatttttacctcacgatgtaacggttcgctaaattgcgtgtgatataggtatagagggacttcacttcatagcaaaaggcatagcgttccagaacacggcaggtccggcaaaaggccaggcagtggcactacggtcatcctcggacctctcaatcttctatagatgctccatcgaagcttaccaagacacactctacgttcactccaaccgtcagttttacagcgattgcgacgtttatggaactgtcgattttatcttcggaaacgcggcccgtgttttccaaact

SEQ ID NO: 21903 - DNA, 1017 bp, Arabidopsis thaliana landsberg
  unsure (1)..(1017): unsure at all n locations
aaaactaagacctgttttaatgtaactccgaaattaaacaattggtaacttcagataactgcaagatcaaagaagggaagctgggtctatagtagacgggaccatccaaactcactgtttaaaacgttttctccttaaacacaggaaaagcaaaggtttcattggtcaaaacagaaaagaatttaaatgtacacacaggtttcatgggacataaatcaatacaataatctatgtttatttagtatactaaccatcaacagaagcaattctccagaagcgcacaacacatacaactggttcatagttgtatgttgatttagtgatacgcctagaccacttggtgacaaactcttcacacatggaaccaacagcaacacacttgagtttttgttccctataccattggcagactatggtaaataatcacaggcaataatctacatgtaaagtctgcagcctagatgaactaatcctaaatctataatctataaacttaccaattatccattagttcgaaagaaacgtatctagcctcatagtcggtctcacccttgttgcggacgtaaggaaacatcttgatagaagaaacgcttgcaaccacaccaatagcatctatgaaaacaaaaaatcagctagttattgtatgcagcagagtactcaaaatataaactcatgaaatgatctaaagaattaggatcgttttaaacataccagtaacatcaacaacattgtctgtagcagagtcctcaagttcattgggaaacagataatctgtgaaatcagatttcactaactctgacattctgaacactacagtatcccatctgaacatgatatggagacggttcaacacatacgtttctactctgtgtgtagacggaatcacacgaaactgagagatgttaaaccacanaccctcctggagagctctcctagatttttccctcaaattcaatctacgtatggttgcaacgattctgtgatgctgtaagttgacataataaaacaacttagtag

SEQ ID NO: 21904 - DNA, 625 bp, Arabidopsis thaliana landsberg
aaatgctacatttgtgattacttgttcatcaaaaaacaaaatgcaatatttaaattttaaacacagcaaaaacctcaacaagttctgttgattttccacaagattgaaaagactctgtttcaaaacgaagacaaaaacaaacagaccaaaacacaaattagatccaaacttaacatccttaatcatcaaacaacatcatcgtaagaactcaagcagagcatccatgtctgcacacttcaccttcaagtcctttaaatcttcctcaatttcttgcaatcgactcttaccagtctctttcagtttcttctccaaccaatccaacttaaaccctgctttcgtaacgaatcgtagtgcagaatatgcctcgcccagatcaccattagagagttccttagtagacttgcacagaatctcattcaaactttgtacaacattttttctttaaaatgtgggttcttgggacaacagttttgaagcaaaaccttgggtacttttcaaaacagaattgttcacagattctaccctaccaagaaaccaaaaccggccggttcaaagggaaaaacccattttcgaacaagcgggttttttgaaagaccctggaaaaattaaacccaaaccaaaaatt

SEQ ID NO: 21905 - DNA, 568 bp, Arabidopsis thaliana landsberg
ggtctgtccggattggcaaccacctttgaaatagcaccatggctctcaagcttcgggttagacagttcggttaaacgccaaaagctgagtgcgacaacaaaatttcccttacccaaactctgaaagtaaccatccaagtactccgcctgttgattgcgggcttcgcactccaagacttcattgctacgttagaaataaggacagttagcgtttagagtgatattgtaaataaaacaatgaaaagaacacttactatctatcttttatcttgaaactcagtttgagaccctaatagtctgtagtcaatccgccaacatcaaccaacgctccaacgacatctagatgatggagaaacacagataataaacaaaaaatttcacaaatgtaatacatgacgcatcgaagttattcctcctcaccgactaaaacgttcttgtaagcagatttctccaaaatgtagtcgaagggagtgaaatcgaaatctggaactggtggtgattcggtggggcatgacgacgacggtccgatcataaacagtatgccgcatcatgctttgttctctgactga

SEQ ID NO: 21906 - DNA, 294 bp, Arabidopsis thaliana landsberg
  unsure (1)..(294): unsure at all n locations
gatcagctaccacttgtgaattttgaaaatagtagagttagagtttctgtttgtcaaaatactcttatttgcctcttattgtcaaaagttggtatcttgtggggaggaggtttaattatgggaaaaagggggagtttttgaatccttgatcaatttctcgtgaaatatctctctttatgtttcaacatgtgtgtttgactcagagataggaaattgagtttgatttgcaaaaacaaaccaagtggtggcaaagaatgatccatagatgccaaatttgnagttcttaatttgaat

SEQ ID NO: 21907 - DNA, 627 bp, Arabidopsis thaliana landsberg
caactttaccttccacttccaacaaatacagattaatcctataaaatctaaaataatacgcaaggtaatattttttgcctgtttttgctatcatcagttttgtaaaatattgatatataatatgttaaattgaagtccttttgaccaagagttcaattatacattcaaaattttacaactctaatgtatgtgaccataaaaacgttaacaatatacatataagaatcatatttcttattattttggacttcataaatataatctgcgtttgttagaggtgaatgataaaattgcaaaagtggatgagttagaaaattttattgtacaaaacccttaatatataattttttttatttcgaaaatttacatgtagtctccatatcaatcttcaaatgacggtaagtttggtttcatgctctattgtatttaatttgttttgtttttcgaaccaaatccaaaccaaacataactaaaccgaataatactacctttgattttggatccatctagtttattaccaaccaaatgaacctaatccaatccgaaaccgaaaataaaccaaattacctaccccttaaagttaaaaaccatgggaagagctttcagctattacacaaggggaagagc

SEQ ID NO: 21908 - DNA, 542 bp, Arabidopsis thaliana landsberg
tcacacctgtgacgctgagaaaaaagggaaaaaaagggtgagtaaagaattactcagtgtgaggatcctttccgctcactagaaatacgatacacgattctacctttaaactacaatcaacaatcacatagaaacaaatacaacactcatatagtttacatcactatgcaagactataatacacacctcattcttgcttaagcaagatctccacatcctaaccaggttcgatcatctccctgacctttgaacctatctagttccactggactagtcagtcttttattgaggtacaaagaacccgtcaattcaatgtagaccatttccactgttccactgttacacttttccactgttccactttccatcatctcaaaagatggtgattccactttctcatataacacatataattacttgttatcacaagtacaataattcaatcatcctacattactagaacaatcattatatcatcaatcctaaataacaattcattattactaagcaaacagatctactcctatgcaatgaatcatgaa

SEQ ID NO: 21909 - DNA, 461 bp, Arabidopsis thaliana landsberg
tgctgctggggccgatgccgacgccggcggtcggcatgctgacccgctcgatgcgcgccgacctcggcgtgttgatctccgcctcgcacaatccctacgaggagtgacggcatcaagctcttcggtcccgacggcttcaagctcaacgacgggatcgaaaccgagatcgagacgcggcttgccaataacgatctctcgaagagcctggcaccctccgccgagctcgggcgcgccaagcggatcgacgacgcgcccggccgctacatcgagttcgtgaagtcgagcttcccgaaaggcatgagtctcgaaggcctgaaggtcgtcatcgactgtgcccatggcgccgcttacaaagtggcgcccaccgtgctctgggagctcggcgccgacctgatcccggtcgggggtggagcccaacggcaccaatatcaacctcaaatggggggcggggcatcccgagg

SEQ ID NO: 21910 - DNA, 573 bp, Arabidopsis thaliana landsberg
tacaaaacaaaatttcttccaaattagcacaacatttttaaaattttacaaatagcactataaacttcaattaaacttaagtaaaatataagatagaaaatgaaaatgagagcaagcactaatctaatataaattgaatcaaatgttttttaaaatagtaggattctataccctaaattcgaaatagataagccaaatgtaatatcccaaactaatattaaaatgtaaaatctcttgtaaatggtgaaaatatataccataaattgaaatagggaacccaaatataataccataaactaatattaaaatgaattaaaatttattttaaatggttgaaatatatagcctaaattggaaatagaaaaccaaatataatattttaaatttattttggttgaatatattttatagaaaaattgtggtattattgaaaaaataaattaatgataatacttttaaaacaaaaacttcatattaaatcaaataatattatatttggaaagtttatgcagtgtgtgctattagtgtcaataaaactacacaatattttctttttatgtagttaagttcata

SEQ ID NO: 21911 - DNA, 471 bp, Arabidopsis thaliana landsberg
gcacttactcaagaaaggtatgggaggatatagcattgccaattcttcagcacaggttctcattggactggaaggacattctaaattacgtttgcgaaagggattcagataaaacaagaaacttcatcatcaaacatgtgttccaaaacactatccattcggtgtggggtgaaaggaatgcaagaagacatggtgaacaaccatctccggtggggaagctggttaagatgatagacaaaaatatgcgcaacaaactgagtacaatccggtgtggaggaagactcacatatgaagatggacttcagttttggtttgcttcaagacagaacctaatctaatgtgtggattgattagcttatggaaaaaattatgcattaagttgtaaacaatgttgtaattttacccatcctttttttgaatataatttaacagctattcaaaaaaaaaaaaaaaaaaaaaaagcttgcgaga

SEQ ID NO: 21912 - DNA, 885 bp, Arabidopsis thaliana landsberg
attcctaaaattttgtaatattattctctatcatttagtatccctgttttgacatgaaaacatttagaaaattaatttctcatctaatcctattttaatcacattaaatcttaagaaattcataacttgaattctataactccaaattcagtgattccaattcctaagatctcattttaatgtgtagatttttactgtatatggtatttacatgtttggtgtgatgtcgaatttggctatactatgtgagtattgtgttgatgcgagtagacgagcagggtacagaggaatctgaggttcaacaagtagagactgctaagcaggagctcgtggaaggcaagttgtgcccttgatcacttcttttacccattcatgttcttattattcataatgatctgcataggataattttgctgggacccaataggataccctagattttgactatctttataccttgtttcaccactggttttactactaaagttttgggtagttcaggctattgctttatgtggatttggatatagagacattcatcactcattggtatactatttattattatctggtttattatttactgttcatgataagactattgtgttaactggaacatggagaaccactcggtaaaagcattcattataaaaatggaaattacattgatataaggaatttaaaataatgaaacttaaaatttggtactttgatcatatggcgattgcataacaatttcttccctattctatatatatgcaactggatactcaaatttcaggttaactatttttgtttttctgaatgacaactcttcaaagtacaagctgaaaagagagagtaaatttggtcggtcacggatacctgcgattgaatctccagcta

SEQ ID NO: 21913 - DNA, 252 bp, Arabidopsis thaliana landsberg
catacggctggctacgttgagaagaccggaaaatgtaaggttgtatcattcgagatgaaccataaccattatttagtgaggacatctatgaagcatttgttgaagggaaatcgagaattaactatctctcaaaaacaacatgtagatgtgccgagatgtcagagatttcagcaaaagcaaccgttgaaatgatgagtagagaagttgggggcgagaaaatctggggttttttgaagacagattatcaaaatc

SEQ ID NO: 21914 - DNA, 468 bp, Arabidopsis thaliana landsberg
tgttctacgttttctggctcaatcatttctattgttttttgttcttattggttcttatgcttttggtgacacaaagatctcgactttttcttgactctctatgcgaatttgtcaaaagtcaaaactttgtaacagtttactctctttcgcgcttgtgtttatgtatgaacaatagcttcgctattgggattgtttatttcaccacacttgattaattatacatactattgaaaatgttatcaatcttggcgataaaaaccgtcattttcatgtgtcttagctctagtagcaccttttgtttagagatcctgagtttaaagaagcagtagctagcatctttggtatagtaaattgtttcactgacaaattgtatatcatttggttataactagattagtgaaatttaatggatgagattatgtagcatttgtttaattttgtatggagaaaactggtggggggcttatt

SEQ ID NO: 21915 - DNA, 768 bp, Arabidopsis thaliana landsberg
gttaactaacaataattttttgtggacaaaatttttaatctgcatttgactttggttgatataaaatattagatgtggaagctcgcaaccggatctgtagaacctcggagaaatactatcgcgaattttgcggccatgcaggaaacgacgattgcctttcaaaatcaaccaaaaaacctaaaccatttaaatgtgtttgccatgataataggcttctgattgatataataactgcatatgtaccttttattgctaagtcttaataaacaaaatagtaactactagatattaatccgcggtttacaattatgagatgatatttattaaataagaatttcaaattttaagttgtatttttttgttgatattgtttattttgtttagtggtttttttttttttgggcaaaattttttttagtgtttaagattgtatatttttatttgattttgttaattttacctatagcacacaatcatgtattaatatcaatacaaatccgttaattctaagattttacccgtggtataaagtttaaatgtttataatgtataaatttcttataaatgttggacattcagttgggaaagacatcatctttaccaaatctaaacaatctgtaaaaaatactacttcttggttgtctacaccaatcatacacttcatcgcctctgaaaaaattttcgacttctatataaagtggagataaacttctacgcaaagtaccagctcccataattggtgactccccatttaataaggtgcaaaac

SEQ ID NO: 21916 - DNA, 513 bp, Arabidopsis thaliana landsberg
ttaggtctttggatttaagaaatccctctggcaggcgtattgccaatctgttagagcataacaaccagtaccagagcatcacttgatatgatctctatggttagaacttctaaattctccaaacgttccagctcctccagtaagcttatagttagccacattgttaaattgagtagcctcaccgtcttcagattcgacaaatgatcaatccctgaaacactctcaaggcacaacattgactctagattcagatgcatcagctttttcaactttaataaaccaactggcaatctccctatgctcgaatctgacaagtcaagatatcgtaatgaaaccaactctgatatttgatccggtaacccactgagattgacattccatgatagatccaaaacaactagccttggcatagacctgaagaattccccggagatatttaccagatggcggttatcctgcaagaacaaagttgtaagtttaggacactcaggactgccatgtatctctttaatc

SEQ ID NO: 21917 - DNA, 692 bp, Arabidopsis thaliana landsberg
ccttgcggttttggtcttaactctcgaacacactaccgatcaacggacgataagcgttgggattgtatcttgctttttcaacgctatgatgtatgcttctccattgtctgtcatgaaaatggtaataaaaacaaaaagtttggagttcatgccgtttttgttatcggtagttggttttctaaacgcaggtgtttggacaatttatggctttgtgccttttgatccattcctggctataccaaatgggattgggtgtgtttttggactagtacaattaatattgtatggtacctactacaaatctaccaaagggataatggaggaaaggaagaagcgactcggttacgttggtgaagttcgattatccaatgtgatcgctcaaactgaacccgagaacatcccatatttaaacaaaagagttagcggcgtttgatttggtcttttcatgttattcactgtaagtttattatataatcatctaggattttttttatatttttaggactgtaatatgcgaataagtcaaatttcgttgtccatagttctcagaagccgtagactcttttaaaaatatgacttctctctttggtcatttttttttgtttgaagaccatttcttcaagagtgaaaaattgagaaaaagtcgttgatgtttcttgaacaaactcactaaaaatgcaactaatgttaac

SEQ ID NO: 21918 - DNA, 755 bp, Arabidopsis thaliana landsberg
aaattgccaaaatacatgtccataaaatatcttctaaatatgatttttattgattatttaatatttttgaaagaataaataaaaatatttaactcttcttcaatcttaaaccattcttttcgtaaaaaatacgtaaagatagatcaatcataaatgtcctaggaataagatacgtattaggtaatgtttttcttttgaaattaaaataaaagtatttatatatatatttttgatgcactttttgatcaaaaatctctctaatatttactaataacatatgagcttttataaattctatctcaacaaaaatgttatattcttaaaaatttacaaatcgttaatttgcattaaatacttgaattaactattttctttatttcttttttagtccctacaaaatttatctaaaaatattttattttaaatttaaatctttaattaatttttatatttattaaattacattcaattaattgctaatttcctaaaatctatatatctacattaataataaatatatgatttttctttcatttttatttgttcttatatctaatttatttttatttgatatatataatacatatagttaaaaatatattagttttttctgcatatgaggtaattcaaaattttaaaaacacacatatactactcaatcgatgaagaaaaaaaataagtagaaaaaatcccacattactttaaaaaattgagtaatagttcagagtcatacatggctttcaaagcaaaaacta

SEQ ID NO: 21919 - DNA, 760 bp, Arabidopsis thaliana landsberg
catttgacatgtgtctattaaataattaatgtaagctctttaacttctaatttataggttaatgatatatttcttatttaattttattttacatatttaattatactattactaaatttatttttattttatataattttttaataaaactattttaatagttttctcatactggaagatttttttttgtaatccaaactcaaagtatgaatgtataatagtcgtggattacttaatgatttgagtaagttattctcttaaattgatatttatattcttttatgatatttatagaataaatcactgaggctgaagaatacgtaaggagctttatcatcaaattcttaggtttctagaatccaacactaccctctcttaaattaatttaagacaaatgttgtttatgaattatatgtatgatgcattgttgagaatgttgttagaaaaaaatatttttaatactaagtaattgcttattgcatgagtgaatgattagataaataaaattaaatttaaattaaataatacaaaaaaatccaaaaaaaccgcggcgtagcgcgggtgatcatctagtttatcataaaatttggatacaaatcgaaaacaccgaagagtttttgaataatagtaacattagagaataacgctaacaataattcaaaattacaacaatattatagtcatatttagaatattatcttagctatatatgtgtaaatttataatattattagaaccataaaaatgtatagaagtttca

SEQ ID NO: 21920 - DNA, 555 bp, Arabidopsis thaliana landsberg
aaaccctctagagccaaaaccatatgattctctctctagagaagatctttctaaactatattctcttcttgtttcttacattgatttctaccttaaacatgttttggtctttgataatcatgtatgaatagttctcttgttgggtttagggactctcaatagggatttagatgaattagtagaccgaaaatcctgttaggataatatatttagaattcttcatctttgattgttcttagtgctagttctagaattactagaacttgattttaggttaataggtagtactcaaaaagacttctattactagaactatcttagatgagcctagtatttagatgcggactagcgtcgatttagatacttaggtgaacttatcaaacatgattataatgcttgcttagttctagggatttacaaaagagttagaatcaatactactaagcatagtgagtaatgcggcgaaccaccggttactctataatagtgattagagttctagaatggttcgatagtaattctaatttatggctagatctactattctgatatttc

SEQ ID NO: 21921 - DNA, 1111 bp, Arabidopsis thaliana landsberg
tacccaaaggtaattttgaaattagcttccggttatgtttgattttggttataactatctagtcataaaaataacaaaaaaaatatatgtaaaaaaattggaagctaatttcaaaactgcagattctaaaaagaagaaaggaaaattgttcgtaataatgctttctctattacaactaactaaattatgtcggatcccaaatcctaatcatcaagaatatacactagttacaaataaaataaaaacaatataactttgaaaacaacttcgtacactaaatcctaatagattaaggacgaggagtaacctctcgctatatatacacacaaagtttaacttattctactagagaaaaaaaaacagaagagagagttcataaacaatgacgttcgaagaagaggtgtctaaagaagatatcgagtgtgtggaaacattactgatcgatcgatcttgagctggcggacgattttcttcggcggatgagtgttggatcgatcgatctacacctgggatcaatcgatccaatgttgctaaccacgatttctcaattcctgctatcgtttctggtccaaatgagcccgataagtcccgaaaattcccgtgtcccgcttaaacacctaaaacttgcaaatgactcaagacacaactaaaaagacgcaaaagatgtactacgacacgacaaacgactcaaaacacggactaaatcaggactcgaaaccgtcaaaaacgctatacatcaactccccccgacttagatctttacttgtcctcaaggaaagcagaaatccttatcaagagaagtgaattgaaaacatgagaactcccattttcttcggaataatgctcttatgaattgcctgcaaaccatcatcacaaaattcatcaacccgtactagactgtactttgccataaccgtagcgacaaaattaaatcccgagatctaaaagaactttcagaatcaaaggatttaaccttttaacattcattagtagaggcttgtactttcacaaagggggtttcaaacacgttatgggctaaggtagaaggctattatgtggtggctcaactgtttcggttttttaaacagtgtaaagcgggtggcatgttcat

SEQ ID NO: 21922 - DNA, 966 bp, Arabidopsis thaliana landsberg
taacaaaaccacatcttgattatcagcgccaatcatgcatttcatagtccaaagaagggcttccacttctgcgtgtagtggcgacaaactccttcttagattggaagctcctatggttggtggctctccatttggtatgtacaataccatcatgttccagagaatttatcacgttctttccatgaaccatccacatagcatcgatatcttgaataaatgatatcaattgagagatatctcacttgaggcctagtgtcaaaatttaagtaaccatgattttcagtataaagttcaatttgaggtaactgccacgaatgtgcctctttttccgtcaagcgtactatatgaggggtctttatccacattctcaaaaaaaaatttgttccttgctttccaaatataccaaattatccatggttaggaagataagtcaaattcagaaggtattctccagaataagtgatccaaattcgcataaatagatgaatatgtaaaatttccttcaacagaaggtatttctgagagtgcccatatttgccgtgcagggtggcaaaggaaaagtgtatgattaattgttttttctacctgaccacatctgaaacaccctgtgtcatagttaattcctcttttctgcaacttgtttgtcaccggtacacatcccgctaaaatttgctacaagaagtgacgtaacttgggcggacattgtactttccatgagaatgctttcaagactttgatgtctgggccaaaaaaagaaaagttagcatccaaagtttttaacctcgccgcatgatatccaaatttaactgtatattctccagattttgtgaaatgtcaacctaggatatcttccttagttgacgcacccaagagcaaagcacttattaacgagacatcttccggatcaaaaagctcttgtaaaagatcaatattccagaaatttgtccgtgagtctataagattttt

SEQ ID NO: 21923 - DNA, 1445 bp, Arabidopsis thaliana landsberg
tctcaatacaatacacagtaaacaatttttgcgccagaggcaaggtgcgaaaaaaataatacaattttttctttaacaaaaaaaagtgacactttttaggatcacgcactttacttttgctttacttctgtacttcgtttcaacaacacgaaataaagaaaaaaactaaaataactcaatgcccattttccaaattttattaattaataaatttcgctgaaaaacaactttgccctaaagtcccaaacctcagccgcagactaatccagattttgatgaacttacctaaagttgtattgtaatttcaatattacctaacttacctaaattagatctaaaaatcttattttggtaattagttacaaaactaattatccagtgagaaagttaaagtttagctgtcaaccaatatctagagaaagtcaactcaaaatcagtttcatttatgaaatttgaaatgtttcttatatgataaccatgcaaattacttttttaagctaatgtcatccaatcgtaacaagaaaataacatacagtaatgaaaaatattaacacttcgttaagcaatatgtgttttgtagtcatagacaaaaaaaatgtaagattgaaaaaaacctaacagaaggcatattttacatggcattcaaactatgttcatgaaacggaaactagctacgatcaacatcactaccttcaatgttacctcaaatctcacaaaatgaatttctaatgacaaatgtatgctgttttcctctaaaagactaaaagtgtaaaaacgaatacatgttttatatttattttcgtttttgatttagcgccattaactcatgaacctttttatttgtatgatcagttcatcatatataatactataataggttgagttttagaaaacaactgaaattctgtcacaaatgtctagatgaagctgatattagttagatttttttatttttgttgttgttgttaatttccctagaacattggatgaaagaatttcgataaagatttatactccctctgtttcatattagttgtagtttaaggctttttcacacaaattaagaaatcataaaaatctcatttaatctacctattttatataaaaatatcatttattataaccaattcaaccaataaaaaaataaatgattaaatataattggttaaagaatactaaatacatttattatttgcataaaaagttgaaaacaacacttaaattgaaaaaaaaataaaaacccttaaactacatttatatagaaacagcgggagtattgagttgcaatagagtatggggtgaattaaagttgaaaatttaagtgtgtgcaaaatttgctttcacctatgaaataaattgaaacctactctactcttttaacagaagacaattaatattaatgattcttttttgtaacatctaaattgatgattggactttcaaaa

SEQ ID NO: 21924 - DNA, 766 bp, Arabidopsis thaliana landsberg
gccaaaatgctggtcttggggttaatgctaacgaagattgtgcttggagtaaaatatataagttacataatgaaaaacacatgtttgttgggctttaggtctcgccggccctgaggagattcttccgctatagcctttctgtttcgttgaggttaggtctgggtagataaaccgaaccgaatatactgaaccgaaccgaaaattggaaactaacggaatggatattaaattctataactgaaataacctaaatcgaatggatacaaacctaaatattttgggcaaccaaaaatatctgaaatataaatatattttcaaaagtattagttatttctacattaaataactaaaaaatactagagaatatatataaaatagcaaacatactcgaaaataactaaaaaatatccgaaaatattcaaaaataactgaaatatttaaagcaaaatatctgaatggacactaaattttaaaaccaaaaaaacagaaaccgaaccgaactttcaaaataatcgaatggatactaaactttagaaccgaaaaaacagaaaccgaaccgaactttcaaaataaacgaatggatactaaactttaaaaccgaaaaacccgataatcgaatggatataaccgaaagtgaatggataaccgaacgtgtaggactagttgaggctgtttgcatgttcctcttttgcttgttttggttcggtttgcttaattaaaaaaaaagataaatgtactctaaacttattctttaaagggtatttta

SEQ ID NO: 21925 - DNA, 545 bp, Arabidopsis thaliana landsberg
tctcttcttcctctctctcgttcttttctcttcttccttcccaacatcggcgacgacaactgaaattagggttcccattatccgccgccgtcgacgacaacaacaacaaccaaggtattacatgcactggagttcttcctctctctcgttcttctctcttcttctagccgccgtaattagtagatctagggtttcttacgggtttctagccgccgtaattagtagatctagggtttatagcgttcatgattcatatctctttctttctctgttctgtagatgccctatagttactctcaaccatccacgtccgaagctagttggaatagtggagaggcgaatgccgatgcaaattggggggttccagaaaaatgtttttgtggtaagcctgtaaaacttgaagtgtgcaaaactggttacaggcaaggcgacaaagtctacaaatgcccaatgcttaaagtaagttattgtgttttcatttcattggaacaacaaagtacaagtgaattatatttatgaagtcttctctctttcgcaggctgaag

SEQ ID NO: 21926 - DNA, 358 bp, Arabidopsis thaliana landsberg
agtttttgcccaattaagatataatgtggcaaatactgaaattgagtccaaaattaaggggggtattgaacgaatgaatgtgatggaatttaatagaatattgaattctggtgttattcgtttagatactttataaattcttttaaactcatgcgttattggactaatatggaaagagatacatctcgtaaagctaatatggaaatgagtagctttgcttggggatatgcaacatggatagtggacttagagctaaccaaatctctcaaagcttgaaggaacaatatctcaaaatgttttagttatatgtaactttgatctggagtttatctatgttctgagtggatggaagggttcg

SEQ ID NO: 21927 - DNA, 458 bp, Arabidopsis thaliana landsberg
ctctccgttaataaacaaaataatattttaaataaattttaaataatatcttataataaaaaatagaagattattaaaattttattaaaaatttgcgaatatgttttcttatattattaatgatattatttttgtgtaaacaattatatttgtttcttttataattgctaatatttagtatgtatagaataataacaatttattatgcaaataagcaactatatacccactttttcataataaatttttacttgtaattttacgcgaaaatacaaatcctgcgttttttgttttctaacacaattgtgcagatttttttgattggccaagttcttgcatactcgcataagaaaaggccattatgcgattatgcgtgttaccaatcaaagctggagagtctggtggatatggtgggtattatgaagttcacccaaacacttacgcctatcgactacaca

SEQ ID NO: 21928 - DNA, 1093 bp, Arabidopsis thaliana landsberg
ttgaggtgaggaactcttaaattttgggcgtcattttcacatatgtccatatagctaactagggactttggtcagtagaaacataggtaggacatatatattttagaactaatttaagttagattatatatcacgaataaagacaaagcacaagagggaatctttagttatataataataggcagaaaaattggatatggttttgacccttgtaagcacgaaacaacgttctttaggaaaagaaaaagaaaaaatcagtcagcgtctcgccgtctccgcagtggtcgggacgtcccttgttacgagtcgcggccatacgttttcttctgcctaccttcttatctttttttatccactttattaaattgttcttttaggaagtttccttttctattaatatatttttgatggttttaaaggtaactacgtgccctatgcatgtccctgtggcttcgacgaattttctttacgatttatgattagagaaatttaggcacattcgaaatttaagcgagacatcgaagtgtttaaaatatagagtatgttattaagaataaaataaaaccaaagagacacgtccattttctcctagaaattgttgaggcaattcgagaccgtggtattgtatataccagtataccactttttttttttttttcacaatataccacttcttatggatattgttattcgactttgagatactgatgtatagagtgggaagttaatgacaaacaaatgggtgcatatcaatatcagtatatatcgtgaagaaaagggaaatcataagattaggctttaaattagcatttgacacacaagttgtttaactcctgtgctttggtagaacttgtactttttttttgataaaaatgtaaatatcatttcaagaaatgaaagattcaggaattacaaagtaaatcctaaaaacatggttccatgccaaaaaaaggtagaacttgtactttcgccggttgtttatatatcccacttatttttttcagattgcttacaatatatcacaattcgactgcagatatttattatagagtatatgtttttagagatttgatcttgatacaaaacgatgaat

SEQ ID NO: 21929 - DNA, 4174 bp, Arabidopsis thaliana landsberg
  unsure (1)..(4174): unsure at all n locations
ttttttttaaatatctaaaccgattaaaaaccgtagaaccgaataaatttttgttggttttaagttcgaacacaatttctagtcaagaaccgacccgaataaaccgacttccgaaccgacccgaaccgaattttaattcgggtattcggtaaaataaaattaaaaccgaatttctcccaaaccgaacaaaccgatccaaataacccggtttagccgaactcccctgaagataaactaannnnnnnnnnnnnnnnnnnnnnnnnnnnnnnnnnnnnnnnngaaactccgcctggtacaaagacaatagattataaaactaagtaactattcttaattgtaaactacagaaatttgaaaccaattgctagacttacagataacttgcaagatcaaagtaagggaagcttgggtctatatgtagacgggaacatccaaactcactcgttaaaacgttttcaccttacacacagaaaaacacaggtttcatttgtcaaaacagaacataatttaaatttaaacacaggtttcatgggtcacaactcaatacaattatctagcagatttagaatactaaccatcaactgaagcaattctccagaagcgcacaacacatacaactggttcatagttgtatgttggtctagtgatacgcctagaccacttggtaacaaactcttcacagcatgaaccaacagcaacacacttgagtttttgttccctgtaccattggtagactatggtaaataatcacacgcaataatctaaatgtaaagtctgcaaggtagatcaactaatcctaaatctataacttataaacttaccaattatctataagctcgaaagaaacatatttggcctcatagtcggtcttacccttattgcagacataaggaaacctcttgatagaagaaacacttgcaaccacaccaatagcatctatgaaaacaaaaaatcaaaagctagttattgtctgcagcagagtactcaaatataaactcatgaaatgatctaaagaattaggatcgttataaacataccagtaacatcaacaacattgtctgtagcagagtcctcaagttcattggggaaaacatagtctgtgaaatcagatttcactaactctgacattctgaacactacagtataatgaaactttaacttattgatacaagtatacactaaagtcattcattaaaagtctgaagccagtcgaatacatatatacaacatgaaatggtaagtttctttggaccctctaactgtaacgttataactgagattgcatgttttcatatagatggctacaaaattagtaatgatcgaacatataagcttaatagaataattttaagattaactccaaaattaaagatgaaacataatccaaaacatgaaatccaataactttgaaaaaaaaaacacgaacataatccaataaaaaaaaaaaaattcaaaacatagcttcagtgaccaaacacagttcaagaagcatcacttattaaaagaaatagataagtagatcacttgttcttctccactttgacccttacagcagccatgttcctagccatctctttcttgatttcttgtttcaccacgacagtagctgggacaggtgcttggtcattctctgtttcaacaggaacctttgatgttttgacttcagttggaacagtaacttcttttgaatcagccacctgcggattcaaggcaactccatgttcagcattctcagataaagacttttccaagtctaatggtacaacacacaccttctttgaacttgaagaaccttcatagccactcgtttctctagcgtaaacacgctttgaagatggagtcgtagagtttggcgatccattaccattctccagcataagtggaacctgcaatatatagagttagaaattgccaaaactcttatgaactttatgattgtaatgaagaatgtaatttgagatgttgtgtgaaataccttatcaccagacacaatggatgcatggttcacatgttcagtagaatcctctagtaattgttcctctagtagtccatccttcagaagcacctctgtaaccttatagatttcttttccatccaagatgttgtctctctcaacccacaccagaaacagaaatgtcttaccaatcagattctttacagaatcaggaagatcttctggatcctcaatctggaagagtgtaaatagctatttgagttctctatatatttatatgtcagtatacataaagtagacacgggacaactttaagaaacatacctcattaacagatccattaagaacagaggttgcagactcgccaatgatctcaaagcaaattgaatcaaacagaaccaatttggcttcactagtgctatccataacctttgcatagatcatgtaccttgcatataataaaattttacgaacttaatttccaagctatacacacagttccaataaaatatttcaaagtagtatgctatgtaaatataatcttcaaagaaatgtatttacctagagaccacattggttacaacagacttgcaggtgtcacaccagaatttaggcttcttacccttgttgttcactccattaacaccaacatgaatatgattcactttcttattacatgtcttgcagctgatgtaataccaagcccaatccgtatcaattgcatagattgtgcacaaaactctgactttaccaacctatataaaatatcagaacacattagatactgatgatagttagatttctaaactttgagataagttagctgaatataacctcagtcgagctaagcagatcttcaatggtattccttgtgtactcactgtagtcagtccttttaactacaaccatctcaaaacgtgggactcttgcacggaacacacaaatagcaccatcatttggaagtctgcatttggataaaaagataatcaatagcacataaagaagtcaactaaaagtagagtgtgttgagagtagatgcacttacgtttgactgaaatggtgaacttccgggaagtccggattgacatgtacttgcgatgcatcaaatgagttggataaactcttcacacttgcagtctcataacatttaagtgaccatagatcatgcaatatggaaaggaaaggaacaggtgatatagaaactgaatatacccttgtaactcttgattttggcaaaacgaatgagaaaaatcacattctttccctcagattcctaacatgctctgtaaacctgctgagcgtatgttccccacaaagtaacttgcattctctcatccctatgagaacaaatgaatcgaaacaaacactttctttgataagcaataaacaaataagatcacaataaactaataagatatagacattacatttgatctctgatctcaaagtcaatctttgttgtacgcttattgttagcctcgagttcctccaactcaccaacagtaatgatttggccaatagcatctgcagtgaaacatgactgtgttcataatctaatgatagcaaatgaatggaataaagcaaaaatacaatatagaatcagaaaactcaccaaccaacatgtgagggttaagctcaccactctggatttttgaaaatggcaccaaagtcaagaagttggagtcagagacaaagcacaacccatgacttcagttctaacatggaacgccatcttgtatagatggttggttgggcgaaactggccagacgcataggtaagaccaaaaatctcaatgaagacccattcaccaacaagaagcttgtgaacaaacttagaaaccaactccttcttcacggtagcatgcattttttttccccttatgacaaagacaacagaaatatatattagcacttgtgtatatgtaaacgtacatattatatgataacagtaattcttacatattcatcagagatgaccaactcaatggtttcaccggtgttgcttgtgtactgcttccaagagtgaagaatcttgacctggactctccatgcgtttntgtaaggcctcacgtctttaaggtatgcgaatgtagcagccatttctcaaaatgtataattgctttgatctctcgtttgcggtgtgagtgatgatgaaatggaatgatatgagaagcgtatttaaagtagccgagtgaatctttaaacatttatttgcaaata

SEQ ID NO: 21930 - DNA, 649 bp, Arabidopsis thaliana landsberg
  unsure (1)..(649): unsure at all n locations
gggatctcttctctgtattaagaactggaatgaatctctcaagaacaatggatgaatagcttatgtctctcacaannnnnnnnnnnnnnnnnnnnnnnnnnngaaaactagggtgtagaacaatgtatataaaccctataaaacgtctagggagtaataatgcaaatagggaattcttttggggcaaatttcctcttctgtaaacttgaaaacgtcatggactttgctgggccgaaactaggtgtcgatcgacaccaggagtgtgtcgatcgacactcctcttgattcttgagtccaaaatcgtccttagctttcttttccttagcttttgctccaaaatgtctcctcatctccattattgtcccactgtatagaatacctgaaaagacactaaaaagactcgagaaacaacataaagactcaaaatcctatacctaaaacttagataaattcagtgaaaatagagttatatcaatagatatacctttagtttagaaaattttaaagtttaattccaaaatagatatacctagtttatacatagatataccgtttagtctctaaaatatctaagttatattggaacatagatatacctagtttatacatagatatacatctagtttcgatatttataaagtagatcaaa

SEQ ID NO: 21931 - DNA, 530 bp, Arabidopsis thaliana landsberg
agctctctggaccattcctctgtatagatcaccctccacttgaatcccaattttccatacacactccaagtatctagcgttcaccttttgatcacccgaaaatggcctgcagatcattggaactccttcgccgatgctttctagtgtcgagttccatccacaatggctccaaaacgcccctattgcaggatgagaaagtacttccttctgtggagcccatttcacaatgtagctgatacatatgttttctacttgattatagggcaggaagctactgttactaagaaacctgcttttcctccattcccaaaacctacaagaaaactaataagtagctctgtaagctccgggcttatagattactctgcttctcatcttctttgaatgttctatatatacgagatatcagattctcgcttgtggacactaattcatccgcataatgattggctagctctctttgcgcacatgtgaatcatgtggtccatggtgtacgcacgtagttacacctctttatttcgctggagaga

SEQ ID NO: 21932 - DNA, 677 bp, Arabidopsis thaliana landsberg
ggtttttttatgggtttgggctgggttaggtttttttacccaccacaacatccctagagatgtatcatttttaaagacaagtctacaattttcagttttggtgttttcacattataacttgctctctgtttcgattaagtaaatgactagtgtggaataaatactcttttgaggtcgttgctatttcaaagagttgaatttgacacccacttggtgtttgatgttcttattagtttttagaaaggaagaaaagaacaggaaatctaaattttgagagttttaccaaattctttaacaaaaatctaaaaacccacatttatgaactttttgagaaaccaaaaaccaaaaatcgaaaactcaaatctataatccgaaaaccacttaaaaccctcaaaactttcattttttacgtatgcgcaagataacactaattagttcattaattgtagatagaaaaacttgcacggttaataaataacttggtagttggttggtaccaaaatagaagcaatacactctaatattatgggagaaaatccactttatttgaaacttgatcaacgaggaaaaacgagtacatacagaagcaaaacactcaaatatagatgtcggatgtcacagcaatgacactcacacataacagactaacaaacacggccacaaagtgtgtgtttttg

SEQ ID NO: 21933 - DNA, 496 bp, Arabidopsis thaliana landsberg
tatcttctgtctcgttcgggccgaagtaaagaaaatcctcaatcttaaccgtcggcttgaagggctcaggcacttctcgccaatttggatgtctcggcttcgtcagccatcggggcaaaagagttgcgaacaagaggcggctcgggatcatcgggcaaatccagttcccgagcgatatcggcattggtatcttcccgagccgcgacgggagtcgcctgctcgggggcatccgaagaagaaacagtatactcttcagaagatgtccaaactgctctccgtttgtagatcgggggaagatcatctgggtgatttgagtcgctagaatcgacaagagaagcgctcgggatcgacggagactgtctaggactcattctcggctcgggaacgatagacgagaagggaaacaaccagaaaacaagaatttctatcccggagaaataaaaaataacaaaaagaacgacggagcttcgccggaaaagaaaaaacgattgaaatt

SEQ ID NO: 21934 - DNA, 1391 bp, Arabidopsis thaliana landsberg
aggatcaaccaaagtgaagacaaaaaaatacaagaaataaattagttatatgttttcacttttttttttatggttttggatttaaaaaaaagtctgaaccttctgactttgtttatgtttttcaataagtattaaaaccattttcaatttttatgctgctttatacatttacatgtattgctatttttttgagagattttatttctggttttcactatctttgttctactatatatttatactctttatcctaactctattttcttattgaaaagcaaagaatcggtctctaaattatactgaaacagatgaaaacatcaaaagatctttggaattttagagtaaatatacttgcatggtatattaaataatttttgaaacgtaagatgtgatatatcagaaatataattgttaaatctgaattttcaaaaataaaccaaatcatttgatcttgaaaccctcaaaagaagctgtctaaattcaaaaaagtaatcattcattggcaaaaatttgaaattcatttctgatataattattttcgaaaaaataagaagttacgtttattggaaagatcaatagattctctccttatctcattcatctttcacacaagaaataacagtagagaagaaaaatagtttttcttcaatgtcaaacttcaagaacttctctgatttgcgtcctaaaaaaacaaaatggtttgtctttgttaagctactgaggttgtggaattggcctcctaattacttcggggaagaacctactatgattttagttgatgagaaggtatgaaacttctatttacagttttgatttctataattgttgttatttaccggatctcttgaatataaacattcatgaaagatttgattagatgtttaaatatgttctcaaggacactgaatcgatgcattgtctcctctacatgctaacaaagaagaaatgatttctacaataagagaaggacaatggtatcaactctcatacgttgaagtggttgtagctaacacacatgaaagattctcttttacgtaagactacaatggaatatgttgcgcctaagataagatgtcatttcattgagtgttttgatttctatcgaatcaagaatgcagttcatgttaaaaagatatttgttgttggtgagtattttagtttttgttttgtacttatactcggctaactaaaaaaaacagatataagttaacacttggttattacaaaattttcagatgctatgggaatcattgaatcagtctcacaaatcgagaaaatactttagggttctaagaattgggaaagtgagtatgaatcgagataccttactttcacaattaaagatactctgtaagcttttaaactataatacattcagtatgatttataga

SEQ ID NO: 21935 - DNA, 917 bp, Arabidopsis thaliana landsberg
ctttagatctctacaatgtggggggacaacaaactatggggctttatttttcataaccaatttatgcattataaaatcaatcatattatttcaatatcaacgtcaagtcatcgatttaccctgtaaaaaatagacctgtagtttacgagttggagttaagtggtttcaaatttctttttctcgtcagtggttacaaacttacaatttaaaaatcttatcttaagctctcctctcttctctctccaaaatctttcagagaggagagcttgataatcgttttgtctccggtttgatccggatttgtttatattctcgtctctatgcgagatcaataattttcgattacatatcggatcttctgttatcggctatgacaggtcttttctccgttttaacggaacttgatctctatctccatcgttgctcacccatcgatctcaacgttttcttccaagatctttgttgtctccatttcttcgtggattaacatcttcgtcacctccgattgctcaagacgcaagagcaaaaatggactttagactacatcaagatagatgtagtcggtggtggagtctcccgaaactggtgattccaaagaatttgtgaagcagctttaccctttaatccggtaaatgatttcgatgcttcttttgattggagtggagatcggcaggaaggaacagtctacccatcgcactgatcggcggcggttgatcggagacggcggtgtttagcaacgtgaagacggcatcgctcgattcctgacgcgtggataggtagggtacacgtctccaacacgtgtcagaagctagaattatagtttttatgggccgttcttctcgcatgtacttgttattgggcttttccttactgtacttgtcttatggactttttaatataatattttgccggctaaa

SEQ ID NO: 21936 - DNA, 550 bp, Arabidopsis thaliana landsberg
tttactgagacagcgatcagtcatcaatatatgaagcaagttggtgtagtgtaaaccttttcttaagttatatcattttgggtcctcttggactataaacgaatgaaatattttgtatctgaaatactttctcatctttctactgacgatgctgtaagaacaagccttttgtccacaagatggagatatctttggcaatcggttcctggattggacttggtctcctacaaattctcaattgatgatctttatggtgcgtttgatgtctcttaggaaggtcaaatcgagttacataaaagttaaaacttactttcgaagaagaattttaataggaaatttagttttgataaaataaatttttaccgagattaaactcgatccgacgttgttaacgcttaagtgaaaaacgaaacctaatcccaaactaaatttaaagtcagatagatttatcctaaattttatctacagaaatctcctttctccaccctcacgagtcacgagtacttgtgggttacgaaatcagtctgaagtttcaaatcttacggtgaga

SEQ ID NO: 21937 - DNA, 464 bp, Arabidopsis thaliana landsberg
atgtgtctttggctcctcttgttgtcgatgaagattggatggtttctacgactaatccttacagggggagctccattgttgtgtttgataataacacatactctgattctattttagctgaggactctgcttctaaactggattatgtaattgaaccgaactctgtgattgaaccagattttgtgaatgaaccgaatactccttctgaaccggtttctgtttctacaccggtcgaagtatcccctatttttgatactccatctactccgaacaagggctctgtctccggtgataatacagtgtttaccaacgtttgtcctattgtcacaactctggatcgtaatccccaacccttggttggtgttgaaagttctgttgttgaaatcacacctccacgtcaaggaaagcgacccattaaacaatctatttgacttcaggactacgtgcttattatgccacaagct

SEQ ID NO: 21938 - DNA, 1152 bp, Arabidopsis thaliana landsberg
gatcgtgattgtaatacatactagtcattgtgaatttgtgattagaaccgaaaacttcaagttgttctgagaacaaaatcgtgagtcgcaaggaaattacagaaagtgagagaaactgggagaaagtgagaatgagagagcctctgttgccttttaaatacttgtgctctctgcttaatgcttacatcaaacttagggtttccttttttctttgagattagtagtttaattactgcgattagtaactaattatagccgttgtctgattaaccttataattacgatttagtcactgactcagtgactcggtatttccttttttcaggtaagtaatttgcctttttgcttcaggtttgtttagtttacagtttgattggttaacattttttttcctttataaatataagtttactcagaaatattcagtgatattttaatcttttatcaaatattatgccggacaatgtatccaaatgggttttgtttttcgtgctctgtttttttttttttttttttttgtctatttggttgtttaaaaactatgcttcttgtgttgtttgtttggttcattcctttttaattaataaaagaataggaaaataaatatttttaagaagttaagaaaaactgatctacagtcgacacaatgatgagttatcttaataaatatgaaggaaatttactgctagtgtatcaattttgttttatggtttacttggtcatttactgagatgatgtttaaggggtttcacttacaaattaagaaagtaaaaatttctagctaggcaaacctttaaagtaaaatactttaactgttttactgttaatgatggtttaaggttttcactaacaaatgaagaaagtaaataagcatataacaaaatatctgtaacatacagatggttgccaaatatattttttgttttttgttttgttttgcataagatgataagtacatcatttagtttggaaaaaaaatctttcaaaaaaatcattccaattgataggaaactagattttgcggcaaaagatactctatatatcccattttataagattttttggttaaaagtacatatattaagaaatttcttttcactaaaaaatatattttaaaccatgcaattgcaacctatcataaaaacccgcata

SEQ ID NO: 21939 - DNA, 2314 bp, Arabidopsis thaliana landsberg
gtgttcttattatttcattattgtatgtacaaaatattttatgttcttaatgttcttacttttgacataacagcctgaacatggcattcctgatggtggtaactttgaacaactcctgcctgacccaatactgtctgacccaaccattgagaaaatgtcagatgatgtatcttcctcgtcccatcaggtacaggagtacgtactactaattttagtgtacgtacagattatttctaatttttattctttgcatttgtataggacgttgagaaaggacttggtggtaatcctgaagaagacgttgttgctcctgggtcacaacagttggaggagccacaatcaccggaggtcaaggttaggcaagaatttgcttttgaagttacagaagatggcaatcccagtgtacgtacaatgtttttgaaatctgtttcgcacctttgaatgttttgttgtgagtttgactaatagatggccatccatctccatataatgaggtcaggctgaaacaatttgtggggatggagaggaagctttgaaggaggctaaatctccaagcgttgtagatgaagccttggaggtatttgtaacgcttatttgccaattacagatataaccaattatttggttactaaatctgaaggacactgcgttacctggatttgttcctccgacgactgtaggggattttaattatgaagcgaatctcagtgacccgtcttcaccaaccgtagttgttagcaaggtaagttcctaactaactataacattactgtcggagatatcatttgatgtttgttatattgttttcattaggtgcttactcaattgaaggacgatattctcgcagaaaatgtatctaaaattcctgagaaggttgtcgtccctgaagaggtaatttattagctaactattaataacattactgtcggagttataatttgatgtttgttaaattgaaagacgatgttctcgaagaaaaagtatctgaaaaggttgccatccccgaagaggtcagtatattatcccgtttacctattaatatttcaactagacgggcatatagtgtacgtactcttgtagctgtttccatgaccaatctaattatatgattttgtgcttgcagacaggaaaggaggacgatgttgtcgaagcgggtgtctctaaaactgaagcaatcgttgctcccgtcaatgagaaagagaacaaaagtgtaagacggagagttaacttctccgatgacaccaaaaatgatgataaaaaagatcctgatgtaacatttgttgaggagagagaggcaggcccggaggttttggttaaggctggcgattcgttgtacaatcctttggagaaggctgacgaagctaaattccagaaattatgcaatataatgcaaggagaaaaaaggtatgcatctgtgcattcacacaattatctgtttgtttgtcaatcttatatcaatcataactatttcatatgtcttactaatttcaggtgccatactcttttcggctttcggaaagtggacaacgaattcttcacaactctagccgaggctaatgattggattggctcatacgtaagtgaccattaattacgtacactgttgtaattgtacgtatatgtaataatatgtttttgaaagtacgtacataacatcagacttttatgtacttttcagcacatggaaatgatggcactcttgatgtggcataagaacggggagcatatgaagagaaatcggtatgtcgtggtggatctcagactcactttccttctgtcaagctgtgccactgcattcagatcctgtcgtaaacccgacactttcaaatgggacaaacttctcacacggtttctcaagggagaatgccttaatcgtgaaccacagctgcattggatcagagatgtggacgtcatatttgttcccatgaactggaaagatgagaagcattgggttgggttggctatatgcctgcaacgtcgtgctattgaaatcatggatcctttgcgttcgcttacgcgggagtctgtggttaggtcacgtatccttccaataatggagatgctaccgtacctagtcagagcgacatgcaaagattatctcgataagccttatcccgtgactccttttacatacataaggaatcaacgtctagcacagaatccaactaccggagaatgcggtccgtacgcgatgaagtttattgagttgtacatgcttaacactcctgttgaggacaggttttcgattgaagaagatgatatgtacaacttccgtaagggttacgcagtcgacgtctacgagcatggaattggg

SEQ ID NO: 21940 - DNA, 622 bp, Arabidopsis thaliana landsberg
gattaccggtttttgagtatagtgatatgcttgaagaagtccatgaagctcaaaactttttggaagagcaatctctgcaaaggatgtctctggattcgggtaagcagtcgagtaagctacaacttgatttgaatgaacctgccaagattgaggaacattcagattatgtgttcaatcagtttctaagttcagttatataaaatgaaattggagaagaattttttcccaaaattggcggaaaatgttttaaaaaggtcccatgggtaaaaaaaacccagggttttttaaatttccgaaggggtaaaaaagggcccaccgggtttttttttaaaattttgcccccctttttattaattaaaaaaaacccaaaccgttttgttttttttttttttggggcaagccaaaatattattttttttttttttttccccccccccccccccaaaagaaaaatatttttttttgtgtgtgaggggccacacacccccaccctttttttttttttttttttttttgggagaaacaaaactctctccccgcgggggggggggcgcccccccccccaaaaaaaatatttttttttttggggaaatttttttatttggggggtgggggggggggg

SEQ ID NO: 21941 - DNA, 513 bp, Arabidopsis thaliana landsberg
aaaattatcttaattaattttgatataaataaactaaagatttgaaaaattgttgtaaaattggagaattgttgttagtagtgaactattatcgtgcagtctaaaacataacatcatgtcaaaattttaaagatttgattttgtaattagttaagggagttacaattatgctagaaaaaaaaatcaaaaattgtagtttaatatgtagtaattttcaaagtttaatgacatttttctaaatatataatatatctattaataaattattttagacttactaccagtaatgacaagtacatgtgttatcaaagtatagtgtcaaatatcgcattcgtaggcaaagttagagaaaatatgaggtgcctcagctcatcaaagacttatagaaaagtttgttggcatccatcaaagagactaatgccatgtggctctaacattagtatttttaagacctaagtaataactacgaatttttaaaaactatattactcaacagaaattttttaaaaagat

SEQ ID NO: 21942 - DNA, 567 bp, Arabidopsis thaliana landsberg
gaagggtccgaaccaatatttacgatcccaaagtcggaaagaatcagattctcgaataaggttcctgcttctcgtgtaaccgaagagatgcatggagagttaaaagagtttttaagtgttgattatagggcaacccctataaatgttatacactgttgaacagaggaactgagagaaggaaaggtatgggaagcgccaaggattcctttttgctagcgcttggtgcattttgtgaaaagggtttgtctttttggctaagaatattcaagactttctctatgatttaagaaatgtatttatctattgatatgaagcagcaagtatttgcaggttggtctgaaattttcttttcactaaatgtgtcttttgtgttaagagaagttaaactatttgttgctctaatgtgatgtggtttcttcttaagtgatctctctgcagatcgcaaaggtcaactgtccagttagatttgtttcagtaaaacgagcatagtcaaaggttagcttatgctcgtttgtctaaaaaggagatagcttgtgcttcagttaatgccttaatggatagttcatg

SEQ ID NO: 21943 - DNA, 528 bp, Arabidopsis thaliana landsberg
  unsure (1)..(528): unsure at all n locations
ggcaagagcagctacgatgcgattgctgctgaaacggaccagtcagtctgaccacgtcggagaagggctaacagctcaagttcggtctccgagagagtaacttccttggtccttgctacaaatcatcaaaaacaagcaattagtttcagtactaacgattagcaaaagcaatcaaggattcaacacaaacaacaaagaaaaatcaagaggctcaggtctccatctgacccaggttggtagaccaggtccttgttatcctcccgggatcaaaattgctaactgaatgacgatctactctgaaaaagaaatacattggatcgccaattggtgtctcggcaggatttcaaaccgccgaggaccagagatccgggacgtgcactaatgtagtacgtcccttggtcactcctaacattggtnnnnnnnnnnnnnnnnnnnnnnnnnncatggcaactgaattctctgtttacttccgagccagggtgaataatgccagcacatggcggacgaagtcggacactcatggtggtg

SEQ ID NO: 21944 - DNA, 525 bp, Arabidopsis thaliana landsberg
gtaccgcgggttaaaatctagtaataatttttaaaaggacttatacaaacaaggctggggcggttgattctcacaactctaaatgcttttgtttatttgggaagagatctaaggagatggaattataagatgtgtaataaatcaatcaaacgcttacacatcactctttataaatcattccattaaataaattatgctatatttcttattttattttagctaatatgatcttatctagtagctttgaacttttggtaagatctttggctatatcattctaacttgttatacatggaaactctacacacatataaaatatgctctgttatataaatagttatattttttaatatttgccttattgcctttatatttctacattttccttataatttacaagtcatttatttattttttttggtttttttttcaataagatagatacgcaaagacttccaaaaatgaatagactctccctaagtagacaaattaatcaaacatttttcatcaaaagttttactttca

SEQ ID NO: 21945 - DNA, 516 bp, Arabidopsis thaliana landsberg
gatattcatatttaatgtcgatatagagattatagaaaattagccttaatcgaatatagttcaaaaaaaagatttaattaaggataaaagtttagaaaagagttaattgaagtatttaatgaaaactaacaatttgtaagtttttagacatataatatttggttgagtttaaatctgtaaggactaatattgacaataataaaaaggtaagagatttttggccaaaaaccctaccaaaaatgtatatgtatatgtccaaatatatttttttcagaaatttccaaatacgtatccttttaatactataaaaacacgttccgtagacgtcaaataaattcggaaacaaaaacattctcccccgttgtagcgcagatccaatcctagtaagctaatacaaagtagtatccaattcctgtgaaacatttgcaaacatatatagagcatacaaaattgagaactttgtttaaagcccacaaaaccctatcgaaattgtgttctcatcattctctttggaac

SEQ ID NO: 21946 - DNA, 513 bp, Arabidopsis thaliana landsberg
ccgcaccattgattttctagccacccttcctctcaaaatctgtgggtaacttaagcttatccatttttaggaatttatctcctgtagacaccacttgaatgttgttcttgctgaatgcttcctcctcaggaatattgcaaacaatcggttcacaggctggatccctgattctttgaaaggcattaacttgcagtaagtgttgcattcctttcttcgattcttcgatcttttctctaatctcactaattttttcctgaatgatcttgaaaacagaaaagatggcaatttattaaattccgggcctgcacctccaccaccttctggtacaccaccgatcagtaaatcatcacctactccgaaatccgggaaccgtggaaaccgttccaatggtgattccagcaatagcaaagactccagcaaatcagggcttggagctggtggagtagcaagaatagtcatttctttgatagttgaacagcaggcatagctttcttcttgatcaagagaaaaaga

SEQ ID NO: 21947 - DNA, 547 bp, Arabidopsis thaliana landsberg
  unsure (1)..(547): unsure at all n locations
ccggcattaagctgagcataaagtaattctaaaaaatttcgtgtttctttgtgatgttcttgtttgctgcagcatggttgacagttttattttatggtgcatctctcagctggaagcaatcgagtgaagattattgttgctagcattgtcagcatttctgttttcatgatcttggtttttgcctcttattggtactggagatacaaagccaaacaaaatggtgagacactgaaatgcgtagtagcccttatttctctgttttcttttcaatcagctacgttagtgtagcctttgaatgctaattttctacaatttagtactgacttggatacttgtaaatcatagattcaaatcctataccattggagacatcacaagatgcatggagggaacaactgaaaccacaagatgtaaatnttctttgatatgcaaaccatattaactatcaccaataactttagcatggaaaataagcttggtcaaggtggattcggtccagtgtataaggtaaactttatcatgctttatctacctctttttcttttgg

SEQ ID NO: 21948 - DNA, 530 bp, Arabidopsis thaliana landsberg
caccaccgcataaagttatgatcgagaattcttctgaaaatttctgagcacaatttcttattttgtgaattgatttgtggcaagttaaaaaagcttcgaacatagagtaataatttggctctcttgtgaattgcatttggtttggactatatgttatctgtatgaatcgaatcaaaattatcaatctggttcgtcggagttggatcaatagtggaagtgacaattaatagtttgtcgtttgtgtatttatttcggttcggtttacatggttttgaaaaattcaattgatttcggttgggtttgaattggaattaaaggagaaaaacactgaaatcacacactcgaggctttttttgaaagaggcgagtgtgtttcaaaacaagccatttggtgggttagaaccacagaaaacgtatacacgcgctcaacatgcgtttggtgagagtggttgtgaaatcgcccgagaggtgagagtggggtatgacatggaatgctctgattggcttataaaataaaaatagtagagatgt

SEQ ID NO: 21949 - DNA, 965 bp, Arabidopsis thaliana landsberg
  unsure (1)..(965): unsure at all n locations
aatcggatttctgttacatgtccacaatatttatgtgttggagtgacgttgcttacacaactatgcaagtttcttgacatgcgaacatgaatgcagtcaatgttgtgttcatgtgaaagttacttgatttnnnnnnnnnnnnnnnnnnnnnnnntaaatggagaggaaagatctgcgaggtgatgagtttatccaaaaagacagaggatatcttggtcacatgtgttcaaggaatcttggaattcatttaacaaagtttttatatggaggaagctttagcaagtcgctcttgaggctgaaaaggaaacgccataaagttcttaagagaaagtattatgaattggtggacaaaggatgtcttcaaagatttcagatttgggtcgaatctttctaacccagaagggctgatgcagcgtatctcaaagacgaacgtgttgttcgtcccgtttgggctggctcgttgtttgggttttgtttctcatgggcttcatgtttatttagccttttagtacttgtattcgtttgcttctcttttatgttagtttttttttttatctttctcttatttgaaaagacgtaatttagtattgtaattagttttgattattgattaaagagttttaaagagagttttgtgtaaagcctataaaaaaggactcctaaccctaagagcttgtgttcaagccctgtaaggaggacttgcaaaaccttgtcgatatcgatcccttagaatcgatctcgatcttatcatttattgcttcttcgtcaagttttgacgttttagcaagatctattcgtgaatccgacttctcctgcgatcatggaatgagaatgtgtttttttaaaaaatgtgtttataaagaaagaaggaaaaaaaaagctttagttacatttgacgtgaactaaatgacaagtgtgggtgcaatactatatcaaaaaaattggtagtagtaatacagtnacca

SEQ ID NO: 21950 - DNA, 599 bp, Arabidopsis thaliana landsberg
  unsure (1)..(599): unsure at all n locations
gtcgtggttgaataaaataaaaatctgtcaatcaaattaaatcagctataatttataaatctgtcatcactatcttctaaaaagtctgtcaaccaaaagagtctgccatagaaaatctgtcgcagttaaaaaagtctgcggaataagaataaatctgccgtaattaaacgatagacttttataaaattgctggaattttttttaaagggtatttttgtatttattttatttttaacacatatgtcggcaaggaaaacaatccttcccaaaattaagccggcgagcaaacaatatctctcgggaataaaaacatatcgaaaatgaaaaaaaaactcaaaaataaagaaaaacattgatactaaatctaaacttctcaaactcgttactaaaagaactcaaaaacaaagtacaaagtataaatccaagttaaattaaaaacagatctaagactagagatctatccaaaggaaataaaactaagactttccttaccaccaacggcagtgagacatcaatcaacactcccgagattcaaagganaaagtctcatgaagaaaggaaggagaccaagagcttcaatattgagaaatatgcatctg

SEQ ID NO: 21951 - DNA, 599 bp, Arabidopsis thaliana landsberg
ggatcttgtttgaacaggctcctgagataaattaagaccaaacgaaagaaccaaacaagagaatcatcaagtttgcatcaggatcataagaactaatagaattaggcaaacctataataagcttaaccataacaagtaaccttcctctacatatttccaatactcgggttcatgctctacttcacaatcctgaaaaagattcaaatggagagacgacgcagaatagtaaaataattcattaaaaaatcaatattactcaactttagctgatcatgatcttctcttgttcttttttttcccaagcttcttccctgtcagaaaatacatattaaaatttgttagctaagttcaagacccatacatctgcattcatgttttccttaacgaacaaagaaagtagaaccaaaatcagagagatgattgaattctaataaaaataaaaaatagacaagtattgtcaaatctagactcgatttcttacctttaaaagatttagtgccctcaatacaacacaagaaaagaaaacaaaaccacaatgaatgataaggaaaacgaatttgatagatatcaagagtcggtgattgcccatatttcttacc

SEQ ID NO: 21952 - DNA, 570 bp, Arabidopsis thaliana landsberg
  unsure (1)..(570): unsure at all n locations
atcaaaattaatcataataaatcttttaatttctacttatctnnnnnnnnnnnnnnnnnnnnnnnnnnnnnnnnnnttaatttttattatggttttatatgtaaagtaatgtttaattatggttttaaaaataataaaactacttaataatataatttgtaaaaataataattgatatatttaaaaatatagtaaagatattaaatttaatatatgaaaaatattataatattttaatattaatgagatacccataagagtatctcaccaattgaagcacaattttagtataagtttctctacttaaattaaatataaaatattaataatatgttatgaggtattgatgtagtatggagatgctcttaggttcgcacctaattttagagtttattctgatctcaaggggcgcatacgtggccatatattattggctctgtgtttgacaaaacaatttttttctcgcttttggccttgtttattttttcatttcacgattaattttctttctcttctctcgtaaactccggaggccgatcgaacgattggtgaatatcatcatcacgcgtc

SEQ ID NO: 21953 - DNA, 475 bp, Arabidopsis thaliana landsberg
  unsure (1)..(475): unsure at all n locations
gagaatcaaggtcccatcagcaatgattgttggattcttctcctttgagacggcagcagcatctcgatcacagtcctcacagtacgacaaaagaacgtccggcatcggagccagaagctgaaaaccattcttaagccaatggcgaggatgagactccagcatagccatttttcgagcgatgtcagatcttcgttcatcatagtacctcagcatctcacggtattccttatgcctagactcgacacatgacaagaaaccctcggcttcacgtctttcctccgagctcgcctggaataggagagtccagggaactcgaaggttattgaagaacggcatccctcgttcaatcgcctcagcannnnnnnnnnnnnnnnnnnnnnnnnnnnnnnnnnnngaagatccagcactctccaacgaaagggccgatgaaacaattgtcgatcaacagagtatttataggggcaaatacagaaat

SEQ ID NO: 21954 - DNA, 567 bp, Arabidopsis thaliana landsberg
aaagaccccacacccatatcttagttagacaataaacgaaatttgaattccataagattagacatattactttcaccacttatcccaattagttatgtaacatggaaccatcgatatagtggatcactccaagcgtgcatatctcatcttcatgacaatttttatttggaataattcattactaagtttctaggattgtccaaaagtacttccgaacaaagaccatttaactaacttgtaaacgagacccaattatataaaaatttaccttttaacattaaacatatctttattaatattttgaagtacattttaaagaatttaattggatctgtttttatttgattttgatccaaaattgagtgtgttaaaacttgcttagtttatacaaaagcagaagatacttaccataaattaatgatagtctgaaaacagcttaaagtgtaatatttaaaaaaatttcattaagttttaattattatattgggaattttaaaattgactcaaattatatatgttttaaacaaaagttttttttctttttaagaacacaacgatgcttagtta

SEQ ID NO: 21955 - DNA, 935 bp, Arabidopsis thaliana landsberg
  unsure (1)..(935): unsure at all n locations
gtgtgatagactctccnatggtttcaagtaccaatgtggggatattaagttagatgtattgtgtggttcaatttctgaaccatttgtccatctgagccatcctcatcatcctttatattacattccattagtgggtcgaaaacagtgcaatggttgcaaccgttggtcatctcttctgcttacgtgcattgaaagtggttgtggatttttggtatgcttcagttgtgccactttaccacaattggtaaagcatagagtagacgatcatccactctcactatgctatggcgaaacggcaagtggcaaatactggtgtgacatttgtgagaaagaagcgaatccaaagagatggttctacatgtgtaaacagcaccgagctagtttgcatacacaatgcgtgctgggagactttgcagggctgatgccaagaagcatactaacgtattcccacagattatatgaggtggtgcgcaataatagtatgtctcgtccactttgcagagcgtgtgagttgcattgtatgtaccctatcatcttgaagatgcttggaacatcagattgatacatttgctctttaaattgcatagatggtttctggtatccaaagaacataaggtatgccaaggtttagaccaacagagtgaaaataactcggtaaaccccaaaaatcaaattatgtttgtgaaatcaagatagtcgtttggaatttaattattcaattgaaagtttattcaattgtttgtacttgcagtaattcttttcatttagaagcccaaaaatgtatcatttttcatttaatgaataagtttttttctttgacttgtcttttaacagttaataggcattgtcacatctttttacaatttgggtagatactaatatactcttatctgtcttgagaaagatattgaggcttgagaagtaatgaaaccatg

SEQ ID NO: 21956 - DNA, 525 bp, Arabidopsis thaliana landsberg
  unsure (1)..(525): unsure at all n locations
tgaaaacaaccgacaatttttatatatatactataatatatatgacttaaacttaaaaaaactaattaaatgtaaatgtgtatacagcacatttttnnnnnnnnnnnnnnnnnnnnnnnnnnnngggtcagaatctaatagatagttaaactgtattacaaaattgattgtgtcagatataattttattttttctttttctaaatactaaattaaacatagaataaggatcgattactatttagaattcaaatattattgataagattgagtgtgtataattgtggttcgtctcttttatgtagcctggtttcttttctttcacgtgtatagataatggcttcatcatgggcaacaactagattgtatatcagttctagagactacatatttgcagagaaaatcatatgatgttggctgggaatttggaatgttgataaatcccaacaatttggacgaaatgaaatgcaaattatcatatggtgaaaggagttttcaggaggaatctataaactaaagcaacatg

SEQ ID NO: 21957 - DNA, 561 bp, Arabidopsis thaliana landsberg
  unsure (1)..(561): unsure at all n locations
tttcctgaaaaaaaatgcactttaaaaaatcttataacttttttaaggaccttttaaaaacacttattatccttgtaaagctttttaaaagctttgtaaagttgttaaaacgcttgaaactcattttaaaacctcttaaaatagttataaagtcttttaatacatatataaatactttaaaacccgttttaaaacctttgtaagtattttaaaatccttgtaaatcattttaaaaccttttacaatggtttaaaaatatttcaaatggtttttaaaatccttttaaaactcttataaaatcttagaaaactttagtaaatcattttttaactcttaaaaccaaatttgtaaatattttaaaatacgtgtaagtctttttgaaccattttaaaaatcttggaatacggaggtgtctactccagttgccttacaaagactgaaggaaacaattaagaagtggaatagagaggtgtttggagatgtccacattgcggaagctaaggtagccaatgatataaaaagggtacangatttgcttgctttgaaccaaacggatgccct

SEQ ID NO: 21958 - DNA, 609 bp, Arabidopsis thaliana landsberg
ctttagagtagaagagagaaaaagcaaacataaagaacaaaagaaagtagacttgttaacaagctctaaagctaagtatcagacacggaaatttagagattaaaagcaaaagataaaggttgggttcgaagaaccggagtgcaagtaagcggatgaaccattttcagggtcattccttcaaaagtctcttccatgttgaccttatcttctttgattttccagtcaaagcactgcaccatcactcctattgcggttcctacaaatataaaaccaaggtttgctccaggacatcctctccttccgctgccaaaaggaagaaacttaagctctttatcatcctcttcccctgatcttgaagaagttagaaacctctctggcttaaatttctcaggatcttcccaagaatcagaatctctcattatagcgtaaacattaacaatgagtgttgtcttctccggtatgtaaaatcctttgacctcacatttttcttggaacttccgtattaagaccggtgatggtgggtgcaatcttagaacttccttaaccactgcttgcaaataaggtaggtttggaaatctgttttttggatcaaccttgttccctacaacg

SEQ ID NO: 21959 - DNA, 839 bp, Arabidopsis thaliana landsberg
gtaagatgtacatatatgattatattactattctctacgtacattgatgcatctacaagaacaatggtgcaagatgatgaggctgttatggatgcaagatccacacactagattttgtaaattggatttggggaattaagtttagatcttcttcgtatatatatggggcaaacaaacataaagttttcaagaacaaatgtgtgatgaattgtattgataagagaaaccaaaatatctattttaaataatagttttatattaaatgagacaaaatgcacacttaaacgcagtaagaagaaaaaaattcattcgcatttcacatttctgttttcactcttcaaaatcatttcttaggtaaccaaaaaactagtttaaaaatgaagaagtttttacaccaaaaaaagaagagaaatacatgtaaacgtaatcaggaacacaccaattggcctttgaaaccattgcaacataaatgaattctagttttgaagaagattaagaactcaagatttaagaataactctcttattaagcttaggaaaataattcaaaacctaaacaatctctagatcttaatctcacaaaactcatctggtcaaccacaccttgggactcatatatatagagattaataaatctaatcatacgaggattaatattagataactcctaacttatatcttaagataactccttaagatttaacataatcttttggattatttaatgacttattcctcaagtcatttcaagcttatccaacattctccctcttaagcttgaaatcctcctttggttcttcttgaactccaatgagctccctcatgtctatgaacttgact

SEQ ID NO: 21960 - DNA, 617 bp, Arabidopsis thaliana landsberg
tttttactaaattctaggggaaaataacaagcctaggaaaattagtttcacaattttatcatttttctataattttctacatatttctaaagttcttttgaaaaagaaaagggaaaagggttgaacagtgttgggctggtttcagctcagcggcccagtccagagaggaaaggcgcccacgccgcccgcgccctggcggctttgcagaaagggccccgagtttttgactaactgtgaacgagttcagttactatttgtatcagtcactgacaaattgcaccggggtccctgaggttctatttctccataggtgaggtccctgacgacggcagcgcacggaggagctccggcgagcgcgtagaccggccgagcggggccacgaccggtgctcagctgcggcctaaaccaaattcataacctagcgaatgtttccctaggttaatttgaagaatggtgccctaatttgccctgaccacggcaaccgtgagtattgcggctaggtggtcgcgttcccggcgaccagaggattctcaatccaattgcatgcgtcggtgagtttgagggaagcttaaggatgctaaaacgagattagagagggcgtgatcggacatggggag

SEQ ID NO: 21961 - DNA, 463 bp, Arabidopsis thaliana landsberg
  unsure (1)..(463): unsure at all n locations
ttctatacgtacatacataaacacataaatattctagttattttctctttttattaatantaggacgaactagaaaataataagaaaggaaatttcaactaaattcatcatttatataaaacaacaaatgctaaaacaaatatcattcacatgcaaaataaaaaaataaacagaacctaacattatttaggttagaaccatcaattttctgatcgtaacaattagtgatgtgcttttttttttaacatgtacaaacaattttattgtcatttatcaattttattttatttgttcttgtcctatcacctaaatacagtaatcattattaatactattatgatagaaaccagtgagaataaacacaaattaagcgcttcatattttctagctgcctatgactttgccttccttccttcaattgatagttttgatacactgaaatcaaatcttctttcttttttaa

SEQ ID NO: 21962 - DNA, 1010 bp, Arabidopsis thaliana landsberg
gtctccctctaagccggagtcatgacatgcatggtagatcaaatagataaccctaagaaacggggtgctttttgatgacgttaagaatttcacattcactatctacactcaaggcatcttcaagatccaagtaagccttccgaattttatctaaagacgcagattgaaaaagactcctctatttgtttgaattcaagtaagcgacttttgtagtttattctcttataagacgaagaagttgaaagctattcacttagaaacttttggaagctcgagacttctagggcttgataacaatctggtctatttaacaacttgactgcttactaatttcaaatgatctattcatataatgtacgcaacttctagcttgccatgttttttatacatcaatgctgggttcctatatcgatacaattctgtcacttcttaggctattgatcgagtccagcagcttcataaaatagaatctctggccgaaccctccgttctccacagaatctgaccacactcttccaaataccgacaacctataacatcatcacacatatcaataatgtttgacccataaaagttcaaatttcagctcaagaaagacgaaggcaactgtttcgttttacctcttctattaaagcttcatatctgagactgatccaccggttctttttataagccatgcaaatgtattctccttcttcgccacatccgatctgcattttccatatattaagactgtaacagagatacagaaaatcaatagcataaaacatttgtgaccctgtttcaaattttaccattgacacaagccggtagttagtgtttggttctaagccttcgtatagtttgctgatatctatctcccagtccatagccttaagcgttccagatatttctttctcagtttcattcttctcccatttcaacactaatgttacaaacccacaaaaacagcaacattgtcttatcatattcaccacaacaaatgaaatgagtagataggatcacaatcg

SEQ ID NO: 21963 - DNA, 432 bp, Arabidopsis thaliana landsberg
tcagttattatccaatcaacgatcatcggacacaaaaccaaagttctacagtgagactaaattgtgtattttaccaaaaaggttcgcaaaattcaagtttctagatgcttaaactaaaagctgattgcttcttaagatcaaatagggtcttcaattagctcaaaaacaacaaaaacctgaaatttaacaaacagaagctgaaaattgaaggatttaagcttgtgctaaacttgcgaaaaaaacaaactttatcacaaaaatcaacgaattttgacggagatagaagcagacttacaaaacttcgaaacccaaaacgtgggaaaagagaaatttcacgacttgggccgaaaaaaacgtgatgaggaaacaaaaacccttaaacccggaaaaccttttttgcaatcaatcagaaaaaaaagaaggaataaactt

SEQ ID NO: 21964 - DNA, 540 bp, Arabidopsis thaliana landsberg
  unsure (1)..(540): unsure at all n locations
caaaccttaatgtagaaatatattttgatttctttattctttttatttaaatactattggttttgctttttttttctatattctaggatttttttattctaaagttccactttgggattttattatttgtcttgtcacaaaatgcacacgaaaaatgaagtcccagcatgatgcataatttagtggtatctatttttattaattatttgtatttaaatatggtgttctcatgaaatgataaacatagataaccggtatagatacaaagtaatataatttctctttctagacttttcttacagagtgggtgttacaaatcctacccccttaaaaataatcttgttctcgagatttgtaaggaaagggtgtatactcagattgtctcaacatatatgcacaaacaaaaatctcggcatgatgcattatttatcaacaacacatggggtcaattagaccttattattcctcctaaaataatatcatatcatccactaactaaagntacatctagatcttacaaatagtagtaatttatatata

SEQ ID NO: 21965 - DNA, 1110 bp, Arabidopsis thaliana landsberg
  unsure (1)..(1110): unsure at all n locations
aggatataactcaaccgggacaagatttcaactaagaaaaaacttcaagatattgccaaagggttcatcttcatcatacaaagttgtaatgggatcgcgtatagttgatggtgatcatcaatcttgttataagattgtaaaacgcaaatcggttttcacaatcgaggatggatcatgaagattattggcagaagttaaaaagaaacaatcaaatatcaaaagtttagatcttgggaaagatgtattaacaatgatggtggagccacaagtagatcactctttaataatgggtattgttatagcatatagtcttctcaaatgtaaattgtgataattagtaggggtgagattgaactattgtgtaaactttagggtcgtaaatgtaaatatacaattttggagagccaaatgataatattattgttaatgaagttcttaaagctaaattaaatgttattacaggcatgaggcataaaccccaaagtctctagcttgaaactgagattttcgaagaattcatcaaaatgtggagagaatcggcttcgtttatcctcgataagcatcagaacaacaaccccatttctctaactcattcaattgattctcctccaccaccatctgcttcannnnnnnnnnnnnnnnnnnnnnnnnnnnnnnnnnnnnnnnnnnnnnaaaccagagcggcgcatcatggaattgtgactagcgagtggttggagcaggctcaagccgcggttcgacgttaccctgatcgtgattccttagtttcgggaagaccctttagcgtgattgaggactttaatagttggagacagcaacctgatttggcggaggctgttgcggcgattcgtgctcttgcggctgttattagggctagtgaagctactactatgatggagcttgaaattgaactcaagaaagcttctgatactttgaaagtaagagtctttcttctttgtgttgaaagttgggttctgaattttggatgactctgtgttgtgattcaatctttaacgaactgtactttggttcatgccctgatgataacttaggattagcttgcggccgcgtaaatggtagatgtgatcagtgcattgcattacaatgtag

SEQ ID NO: 21966 - DNA, 252 bp, Arabidopsis thaliana landsberg
  unsure (1)..(252): unsure at all n locations
ctgtggttttgatggctccgccaagtttttcctccatgggagagatggaaaagtgcaatgttgtctgcaccctggtttcgttaggggcattgagaagagttgtaatgtgcttctacttgaggttgagacgaggcgagagaagaagttgtgcaatgagattgatgagactgtgttgttggtagagacggnggttcagttaccattttcgcaaactaccatttagttatagaaggaatttacttcacatagtga

SEQ ID NO: 21967 - DNA, 600 bp, Arabidopsis thaliana landsberg
cacacttttccagatttagcttccagcggtagcactcaagctattgaagacttgttgtagatcttccatgaagttgtctgggttttctgttttgattaccacatcatcaacttaaacctccacacgctttccccagtgattagctaagcatgtctggatagccctgtggtaagtggctccagcgtttttgatgccaaacggcatggaggtgtagcagaaggccccaaagggcatgatgaacgcggttttttcttcttcttccttcgctagactaatctggtgatatcccaagtaacaatctaggaaggagagcatagagcatccaacagttgaatcgactacttgatctattctaggtagtccaaatggatcctttaagcagtgtttgttgagatcggtatagtcgacgcacatatgctaatccactttattctttttgagtacaagaatagggtttaccagccactcaggatgcagtacttctctaaaaaacatgctaacaccaggcgagctaattctgcttgtatggctctcttttgtcgagcgtgaacggcgcacgttctgcggatcggcacgcttgaggatacccttgagttggtg

SEQ ID NO: 21968 - DNA, 445 bp, Arabidopsis thaliana landsberg
ataaaattttggtataattatctaatttagttttttctaataaatttccataattatcttttaaggagaaattaaagtagtatttttttccatttttcttaagaattggtaacttacatttggccttttttgtcttcaatttctatttttaactttaataaaatacatatagttttcttatatttctatatagttttttttccatatagttttttttaatatattttgtttgacacgtgtcaactaagatcgataaaattactatgtgttatgatctcgcgagttagtaacttttgaaactgtactttatataataagatatcctaaaattctaaatattttacacagattattacaaatataaatattaataatatataattactatgtatttgtggatatgtataaatatccgctcgaataccggttgagatcagatttggtt

SEQ ID NO: 21969 - DNA, 508 bp, Arabidopsis thaliana landsberg
  unsure (1)..(508): unsure at all n locations
caaggaattgggcggagatcactggatagctcggtccacgcgcggcggcggaagaccgaagtccggtgaggtcgatctcgggcctccggtgaagtccggccgggttcgagggcttggcaagcttcacgggctactggcggactagccgaagcactggctcgacttgagggtggctggagtgggctagccacagtggccgaagctctggcggcaatggcgagcggaattgagctcgccggagctaaggaaagggggctggccggtgagggtgagtccggggcgaagtgaggtgcgcccggggaggctttataggcgcgggcgggcacggccgagggcgtgggcgcgcggcggacttgaccggacgctagggtgagcgcgcgccggagttgggcgagctctggcatgccgaccagggtcgaacacgtgtgcccgtgcgttctcccaagttctggcgcgtgtggtactcatcnnnnnnnnnnnnnnnnnnnnnnnnnnnnnnnnnnnnnng

SEQ ID NO: 21970 - DNA, 1355 bp, Arabidopsis thaliana landsberg
tcggcgcaccttctcgtcgaggcgggctcgatggtcgagatggtggtgctcgttgccgaggcgttcccaggcggtgggcgcacatcccgtgtacgctcggggcagaccgaggcttcccaaatgcgccgggaggacaccgcgtgatgctccgaggggtcagctcgcctatgggagggggagctttcggctcgtcgaaccgcggcgccctctagaagattcttgagttcgccctggatgcgtcgtccctcggtggtggatggctccggcatggcccgaagcagcatcgccgctgcagctaggtcttggccggacccgctgacggtcggaggcagcgctgccctggcattgtcgacgatgcggtgccggatgtcttgggcccagtgacaggcttctccggcgagtgatcggcctgcccacttctgttcgatgttctgtcggagctgtataagccggtctgcattcccgtcgagcctgggcctgcatctcgtggatttgctcgagctgtatgtcctgaccccccgcaggtactgggacgacagctagctcccgaaggatgtcaacgcgaggcgcaggcctgagggggatcattgtcctccggcataccaagatggttgccttcgtcgagaccccctagatcgacgtggaagcattcgtgacttgggccacagtcctcgtcgccgaggctgtgactactatcggagcaatcagagaggcagtagtcacatgcggtcatgaagtcccgcatggcactggggttaccgagcccggagaaatcccaaccagagtcagggtcatcatcttccttggaacccgggggcccgtagatcgagacgcccgtcagtcggtcccaggttgaccacatatgataccccggaaggttaggatatgcctttatgaaagcgctcaccgaagcggggtcgcttggtggatcgaagctgaatctaaaaggcacagggtggaaaacagacggtacctctcgatcgatggacgatagcgaagtcgcgtcggggacagaatgcaccgtcatctcaggtacaaggttgaagtccagcaagtccttcacgagagtgctggcgtcatcagtccgcttggggttggcatgttgcggggaagagacgctcgtcgttgtctcaggcgcgtggacaacgcccgacatgtcccccgctggggtgctggtgtcgtcgactcgctctggagcgacaaccgacgaggtgctgcctcctgcctggccacaattgccccacctcctcctcctgtgcgaggagggggcaggcaacccggatgcgctcttccgccacggggggaagaagtcgttaaatccacccccccccgagctgcgtccgtgttgtcacatc

SEQ ID NO: 21971 - DNA, 1490 bp, Arabidopsis thaliana landsberg
aagataaaccctcatcacttcgaaaatcatacacacattgtataatctgtcgagatggaaggtatgagttatcataagaagctttacagtttatgaaattgcgtgtacggccaacaaataacgatggagacgatgactctgttttcgttttttcaggggacgatgaatcctgcgtctccatggtcggccggtggatttgctactccaatggttggtgggatttcaaggttgataaaactaggccaggaaaggctattaactgcgaaaaaattcagactttcaaatcacttgaacaagttctccggcgaagattctccatggttggtcacgacgtcttttgtttagtattctatcttggctagtgtactagtctagtgtaccgaagtggtgtactgttctagtgttctcactttgtgtactatcatagtgtacgcatttggtgtactagtctactgtactagtcttgtgtactagtcttgtgtactactggtgtactgttctagtgttctcacttggtgtactattatagtgtacccatttggtgtactattctagtctactattatattctatcttggctagtgtactagtggtgtactgttctagtgttctcacttggtgtactattatagtgtacccatttggtgtactgggtttctctcaaacgtctctcttctcgaactcgttcaccctcgatttgttgtacaccgactgtggctagggttcgtgaaaaaccaagaagagtaaagtaactcaatctcagaataaacacgggctcagaagttatttggataaaaacgtaatgaaactatcgggctcaaatatttgggctcacttaatacgaattggagttaacgggcctaaaatgagttttaaaacccaatccaatttgtttcgtcgaacccagccggaatgtgtgtttttaaaacacaaggctactattgtatttgacacaaattttggaaatttgctacttttttctatctcacatgaatcctattagacaagcccaataaaaagtactctctcagcatatttccaaaaaaactgtctagttctcaaataattttctaaaaactgcctacttttacaataaacccaagtataatttagtgaagttggcgttgacttcttcctctaacaaacagccacggctctgggtgtacatcaaacggaacccacaatccaccactttacttttacaagcatcagtcaagtggaactgcatttttacagttgtagggtgatgaataggtatagagtggtgatctttcaaacgtgagcaagtgacatagccgataaaaacatggtctgcctcaatcattcctggttcgttcaaacatccgatatcacaatcaaagcgaagagacccatcttcgttttcaaattgcaatgtgcattttactgagaaactgccgatgatcggatcttggttctcatggaatgatacaactgcacatagagctatcccagaaagcatagtgttatac

SEQ ID NO: 21972 - DNA, 568 bp, Arabidopsis thaliana landsberg
tttctgacttacacaacactcgtgtgcaatacgggttgaaaagccttaggccatgttcgagaggctggacacttacggtttgacgactcgggcaaacgaatttgtgtcgaaaacctgggttggccgactgcgggcgtctatcgtgatgctcctattttgtttatattttaatagcgggatagggtgttacaatatgcatctattttatatccttttactgtaagagtgcccgcccacttacacttgaatattacaactttgaaaacttcatggtagtttaactctataactttgatcagatttccatagtaagctacagttccctttcttgggttaggatcacgagaactagcataactcatagtctcagctgcaacataaacaccactattttgggtttttaggtcagtatctctctctattgtccgaaactttaaaccattaacattgtaggcagtatacttcacaactttgtcagatggacccaaagctaaccatcgtaaatcatcggttatcccatctaactcgttaacctttactttatgcttgaaccattttgcaaaattga

SEQ ID NO: 21973 - DNA, 620 bp, Arabidopsis thaliana landsberg
  unsure (1)..(620): unsure at all n locations
aacagggacacatacttatcagattgaaaacgtacatctcacgtagctcatcggttctgagggatattaggatcggggaaaacaatggagagagcaccgaacgtgcaaatctgaacattttttttaccatcaaaataacgatctaccttccaccatccatgcacggccacaataacaccaccaccaccactgcgataattttgattgaaatcaagagcctgctttccagtagccaagcattccaacacacggttgtacataaaaaatatatatatatattagaccttttatactaaccaacaacaaattcataatattcataaataatctcactctttgttcttgagttttgaaacaaatccttaaatcattgacatcgttttgtgtaggcctattattctccacctctcctacatcatgaatcgccccaaccaagtctagtatacaacaaaaaatagaacatcattaaatatcactgaaatttattcaaatagattagatgattttcaagaacataagaaattaacagtaaattaannnnnnnnnnnnnnnnnnnnnnnnnnnnnnnnnnnnnnnnatcgataattgaagagaaagatgcgaaagcgtaatgaggaatc

SEQ ID NO: 21974 - DNA, 505 bp, Arabidopsis thaliana landsberg
tcttaacaatgatttgtttgtatgccaaatttatgttgatgatatcatatttgggtctactaacgaatcaacatgtgaagaatttagtaggatcatgacacaaaaatttgagatgtctatgatgggggagttgaagtacttcttaggatttcaagtaaagcaactccaagagggcaccttcattagccaaacgaagtatactcaagacattctaaacaaatttgggatgaaggatgccaaacccatcaagacacccatgggaaccaatgggcatctcgacctcgacatggaaggtaaatccgtcgatcaaaaggtataccggtcgatgattggttctttactatatttatgtgcatcttgaccggatattatgctttcagtatgcatgtgtgcaagattccaagccgaccctaaggaagctcaccttacggccgtaaaacgaatcttgagatatttagtttatactcctaagtttgggctttggtatctaggggatcacctttga

SEQ ID NO: 21975 - DNA, 612 bp, Arabidopsis thaliana landsberg
ttaaaaatatttttaaaactatatttttatattactactattaaaacttttaagtttttaaactttaaggttttttcttataagtgttaaatttttaaattttgtataaactggatacaacatccatatttaaaaatgattttaacactatatttttatattaataaaacttcttataaatgttaaattattaaattttgtgtaaactaattggacataacatcaaaacctcgaaggaggtgttttaagttcaatatagtttacatctaattttaatttttaatttttaatacttatctttattttatttaaaaaaaatttataatatttattgtatttttgtgtaatttacacaaaattttgaatccttaggattgttgagttcacatttggtttttgtataacactcacatcgattgtagacttgtagtgagtttgtgagatgctctatgttctccctaacttttttttctgtctctaggcacgattttacgaaaccggaatctgtggaccaaaagttacctagagagtgattatttttgagaaaatagtcttctacgagtatgttaaatctaacatataaatgaatgtgattttattcccacataacct

SEQ ID NO: 21976 - DNA, 579 bp, Arabidopsis thaliana landsberg
  unsure (1)..(579): unsure at all n locations
tacactcaccttaaaaatcgaacaacattactcttccccttcctcattttaaaatggctgcacagttacccatctctagcggtttccgaaatcaagcctttcaaaatagaatggaaaatccaagttaagagtgtgcactcatgggttcaatacacaaagtacacaggaaaaactatggaaatgatacttgttgataacggtaagtcttgatattcatatattttatattcaaaaaaatatttgtgcattacacttaatatcatattgtatttctataatttatagggtactttgatccatgctacaattaagaaggaacaagtgaataagtttcagaggttcatcaaatctggaaagtggcgctttatcgagaattttacacttgccaaaacaattggcaagtatcgggcaacgaaacatatgttcgtgctcctattgtttttgacgatatctactgtgatcattaatattntttttttcctttactacattcaaaatcacaataatttgtttttcaacagttaactacgtgaaatggttgagttntcattaatgacattgaagcatttaacacgagtg

SEQ ID NO: 21977 - DNA, 4033 bp, Arabidopsis thaliana landsberg
  unsure (1)..(4033): unsure at all n locations
agcttcaagttactgtgaaaacaaactttagtggagattggaaagagatcatggacgaacaggtggatgctgatgacacgtcctatggtgtaattgtcaacacatttcaggatttggagtctgcctatgtgaaaaactacacggaggctagggctggtaaagtatggagcatcggtccggtttccttgtgcaacaaggtaggagaagacaaagctgagaggggaaacaaggcagccattgatcaagacgagtgtattaaatggcttgattctgaagatgtagagtcggtgctgtatgtttgccttggaagtatatgcaatcttcctctggctcagcttagagagctcgggctaggcctcgaggcaactaaaagaccattcatttgggtcataagaggtgggggaaagtatcatgaactagctgagtggatcttagagagcggttttgaagaaagaaccaaagagagaagccttctcataaaaggatggtcgcctcaaatgcttatcctttcacaccctgccgttggaggattcctgacacattgtggatggaactcaactttagaaggaatcacctcaggggttccattgatcacttggccattatttggagaccaattctgcaaccagaaactgatcgtgcaggtgctaaaagcaggtgtaagtgttggggttgaagaggtcttgaaatggggagaagaggagagtattggagtgttaggggataaagaaggagtgaagaaggcagtggacgaaataatgggcgagagtgatgaagcaaaagagagaagaaaaagagtcagagagcttggagaattagctcacaaggctgtggaagaaggaggctcttctcattctaatatcatatttttgctacaagatataatgcaacaagtagaatccaagagttgattgtatatattgctgttgtttgttaaatcattgtgcgtgcatgtaatatcttatcagttatttgttgggtaatcgaattcgtcttgttttgctattagaattatgtaaatattttatatatatatatatatatatatatatatatacatttttaaaaactacaacttatatacattgaaatcgtagaaagagccaatgtctaataatttcattgtatagacagctgcgctggtagtccggcggagttcaactttcctaattcttctagcggttttaggcttattatcaataatgttttttttaaagaaatctacaatttccctaacaattccttttatgtatatccgtttatagtttttcatattttaatagctatacaaaatttgatttatcttgtcaccaatctgaatttcaaacaatcaagatatttgtcataaggagattttttttttttttttgtgcacctaaggagatttttttttaaatgaaattttcattaagagttttgatttttcggaagaaaaaaaaaagaggaaacaaaaaatacgtttttaagaaaacaaccaagtatttcacatatcctaatttaatatcctatcaaaatcagtcgtcataaagcagtcaaaaaaaaaataaaaaaaaaaagggactagaatagctagaaatctagagtacacactttgatttagtttgaaaacaaatgttgaggcttgtttgtccatacgacataaaaagaaggagagactgagatattccgaatttgatttttctttctttattcgtttatccaatactaatttttacggctataaacttttcactatcttttcgacgtacctctagctaaaagatattttctcttaaaattttgggcttatatgaatacaaaagaacatatgagtgcccgccacgatatgtactgtgaaccacttagtgtgttttgtaactattacgaataataagccaatttccttttgttctttcttacatcacatcttaatatatgtaggcacagagaaacacacacattatcggaaccaaagcaaaaaaaataaaccttagaagagagttcctcatggcatcggaatttcgtcctcctcttcattttgttctcttccctttcatggctcaaggccacatgatcccaatggtagatattgcaaggctcctggctcagcgcggggtgactataaccattgtcactacacctcaaaacgcaggccggttcaagaacgttcttagccgggctatccaatccggcttgcccatcaatctcgtgcaagtaaagtttccatctcaagaatcgggttcaccggaaggacaggagaatttggacttgctcgattcattgggggcttcattaaccttcttcaaagcatttagcctgctcgaggaaccagtcgagaagctcttgaaagagattcaacctaggccaaactgcataatcgctgacatgtgtttgccttatacaaacagaattgccaagaatcttggtataccaaaaatcatctttcatggcatgtgttgcttcaatcttctttgtacgcacataatgcaccaaaaccacgagttcttggaaactatagagtctgacaaggagtacttccccattcctaatttccctgacagagttgagttcacaaaatctcagcttccaatggtattagttgctggagattggaaagacttccttgacggaatgacagaaggggataacacttcttatggtgtgattgttaacacgtttgaagagctcgagccagcttatgttagagactacaagaaggttaaagcgggtaagatatggagcatcggaccggtttccttgtgcaacaagttaggagaagaccaagctgagaggggaaacaaggcggacattgatcaagacgagtgtattaaatggcttgattctaaagaagaagggtcggtgctatatgtttgccttggaagtatatgcaatcttcctctgtctcagctcaaagagctcggcttaggcctcgaggaatcccaaagacctttcatttgggtcataagaggttgggagaagtataacgagttacttgaatggatctcagagagcggttataaggaaagaatcaaagaaagaggccttctcataacaggatggtcgcctcaaatgcttatccttacacatcctgccgttggaggattcttgacacattgtggatggaactctactcttgaaggaatcacttcaggcgttccattgctcacgtggccactgtttggagaccaattctgcaatgagaaattggcggtgcagatactaaaagccggtgtgagagctggggttgaagagtccatgagatggggagaagaggagaaaataggagtactggtggataaagaaggagtaaagaaggcagtggaggaattgatgggtgatagtaatgatgctaaggagagaagaaaaagagtgaaagagcttggagaattagctcacaaggctgtggaagaaggaggctcttctcattccaacatcacattcttgctacaagacataatgcaattagaacaacccaagaaatgattgtaacttttcttagattgtaacttttcttttgtattacccaaaaaaaatgattgtgacgtttgttctcgattacttctctttgttcaagaacaatttatgatagttttatttgaaattgtctctattatcgaatcttatactaacatcttagttagtacatacttattaagcattcgaattcgtacactcaaattgaagaaaaaaacacaatttcttatatactttttttttttctgtagctttagaagagtgtagaaaccttctccagtggtcctgcatgagatcgcaacttcgatattgcttgctccttggagtttagaggagtgtagaaacactttcttgttggtgtacttttgctttctcgatcatgacaagttgacaactcgtgttagatccaaaatgacatcatgcatgacttgaaaattgaaatctatctatgatatnnnnnnnnnnnnnnnnnnnnnnnnnnnnnnntatatatcttaacatcgttcatttttggtattatgtacgttacgaattttcatcgtaaatttaatttaaaaggttatatatgccagtgtaaaaa

SEQ ID NO: 21978 - DNA, 483 bp, Arabidopsis thaliana landsberg
tcctttgtaattggatcaactttgggggttacccaaaacatactattgtaaagaggactaggtcccttagtttattgtgggtttttttactttacactcctgtgagaatgagaaatgtttcttgcttgcttgagtttggtgttagtaaagcataatattcaatttgttccattgcagatatgattttccatggagtccaacaaaatacatgcctttctacggtggtgctgagtaccacgactatcatcactacgttggaggacaaagccaaagcaactttgcttcagtgttcacgtactgtgattacatttatggaactgacaagggtagtattcatcaaaagtgtaatcaaaaactcaccgaattaggtttccatttttccggtttctatatactaattctggctgaaacatttgatcatgtggctatatcagggttacagattccaaaagaagcttcttgagcaggtaagattatggatgc

SEQ ID NO: 21979 - DNA, 1861 bp, Arabidopsis thaliana landsberg
catgcatgcaggtcgactctagaggatccctacagaagctttcacaaacaccaagcatagtatcaaaattcctaaccaacgaaataagcgacgttgagccctctacacaaaccaaaaccaacaaaaaatatcaaaattagaaacaaataaacaaacagaataatctcagatcgagggtttaaacaaacctagagagtaatcgagaacatgaagagcaacgattcgatctccaggacgcgctacattcaccaaagaccatgtaagaacctctctactccattcatctggctttactcctacaattaacaacgccgaaccttccgccaccgctccggcgacttcccctcctccttctccggtcggtttcatctatcctccttccgtttctcctccacggtgacagacacacactcactgaatgtatctctcagtagcaaatttcctctctctctctctgtctctcgtgtgtgtgtgtggggtgtggtggaggtattgtcgtatagctcttgggcaaagagaaaagggcgaatcacgttaactgtctccgggagaaaaagtgagagagagagaagagatgttttgtgtcctctggtttgaatgaatctcagccgttgatttaccttacgatccgattcttactatactatttaattatttattgttctctaatagttaattagttttaattaaagaggggaagataattaaattaagcacgaggacggagaataataatggacatcgttatcattcattctcttttaatggacaaaagaatctttttctctctttgtttttttttttgttttccaacttcttcttcttcactttggattcttatttattatgtcattatatttctcatctctaacgaaaacaaatcatgcatgtttcattttcaataaagggtagccaattccctcatttttttcatttcttttttcttaaagaatggctaaaagtagaggacacaaatagatccgtcggtgaagagacctaatgttttaacaaaataaaagatgagacctaatgtttcttcttatattgtaggtggttttaatttacagttgttttgatggttttcctcaataatttgttacataacttaccaacacactacattcagtagaaattgtgaaaagtatatatttggatgtcttttttgttaaagaagtattctaaattagactactaggaattatcttatgaggtaattagataccttatttacattggaatttgggaacgacaaagaaaaaacagaaactacattagatgtttctagcacatattaaagtttatgatcgagttaggcaataaatacacatatcatcctatcgctaaagatctcatagtgattcgagtattgttaacgaatctcaattctaaccataatgatattgttaatacacgcaagataatgtttggcattatgatattataactaagatattaatcacatttacttaaagatgaacttctcgattattcatatcctatcctttattttgaattttcagtttgaagaaaaggaaaaaaagacctttcaaactttcatggcgtacgaataagtcttagtatgactcgaatcttttcgtttgatttaaaatcatatccctagagaagtgaagactaagaggactaattatttaacaaaattaatattgagaaaaacagatccacattaactcactaccacatagctaaaattaaaaactagaagagattagatatataatctggtgggcacgattcagaatagcacgtgaaatattatatttataacaaatccagctaaccgtgatgtacgctaattatgatttccagagcaaaagtgaccgtactattactggtgtcttca

SEQ ID NO: 21980 - DNA, 1057 bp, Arabidopsis thaliana landsberg
agatcatagtttctaacaattattaatctcaaaattttgtgggttttagtgttttcatcagaaataacaagcagacaataacatagagttctgaacagaataattgcaataacatgaagcctaatgatggattaaaaaatgaaatatatggaaagtgctagaagcgtactaacaagcagtaaacattgttaaattaatcattacatgtgtcttcgattcagtacccaaaatatttcaccggatttttctcatacttaagctacttatacagataattagtaagaaaacatctattgttaaacataccagatctgaagcattccttgaaatattggtggtacgaataagagagtttattgttctttgtgcaagttatttttcctctctgatcaagtttagctggctgaataaaacaatttgtgaacttatgataatggtaatcacagcctaacagcatcatatgcatttacttttcattgtctttacaaaactggactatcacaagtttgtattaatcaagaatcactttatgttgttgatattctaattcagacattactttaacataaattatcccagcagtccataacaaaggcaacaaataaacaaacagaaaagaaagtactcaaaaatgtaacacttcaaaagcctagggaaagagaatcacccaccatttatagaatattgaagtagctagagagaatcaagttcaggcaagtcaaatagagaaattgcagtcttaatttcataatgtgataaggatactacaaataaaaaacagatcatggtttctagcacctgcatgacagatcatcaaatattaaagttttgttcacctcatgacaggttttacttactatgtctgatatgcatttgactttattatgactaacaaaagatagtgacctggcagatcatggtttctagcaaaccgcagaaaatttgatcaatctgaaaaggtataaaatgttatgaacagatgtagccaagtcatcacgtaacaaaatttttatttagagtgataatctcagaaattttatttagagtgataaggtgt

SEQ ID NO: 21981 - DNA, 489 bp, Arabidopsis thaliana landsberg
  unsure (1)..(489): unsure at all n locations
acttggatctgacgaagggtccttgcaccccaacatgttgcactcttgtctgcgcttccttcttctgcttcttgttgcctggctctgaacttgaaccgcccgtgatcgagagcaccagcttcgtgaccgaaaggtgctacaacttggttgttgaacgaagccatcgtctcaacagtggaagtgagttcaccggaggtgggcgctaatgttggggacttgttctcaaatgctatgagttaagaacaaggcaacacaaatgttaatggttaaaaacctttgtccttcgaagcattatctccctcgagatataatgatcttcagacaaaggtcatgaaggacataccttcatcatttcaataggtaataatgaaagttgaaacatatgaaacataaaaagaacatggaataatcacattaaatcatcaaattattatttatgttcttattaaataaccatgaacaaacatngatgatattgactatatttgt

SEQ ID NO: 21982 - DNA, 556 bp, Arabidopsis thaliana landsberg
tcccctacaaaaagaatctccaacaaaacaatttatgaacccagaaatttttaaaacgtatcattactttcatatcacgttctcaagtgtaattaataggattaacacgaatttcttacccagaacacagattgtctccccttcaatccttcaaactttgtaaaacagcaactgaaaacttcagattcttcaccgtaacacaattttgattttcgtttttttcccagaattctaatcttaattatgtaaatatcttacaatataatctctattataataggtaatcatgagttttagtcttgtcaaacatttttagcattaaaagcttctgagcccaaccaatttttaaaaattttgaattctaatctcaagtgtcaaattcgccgaaacccaaaaaatatttaatgcatttctcgtcgatgaacaatgtacgtacaaacccggttctcttggattccacgacgcggtccgtacgtacaaaccgggtttcagtttcgcacgggcattttggtcagtttttggctgaatggctaaaaataaaatgccaacccacaat

SEQ ID NO: 21983 - DNA, 895 bp, Arabidopsis thaliana landsberg
ctctatgttgcggaggcatctatatttttgtagatcctcttaacacagaatgcttggaactcataaaagactatgacaacgttaacaatctgaaaatttagttggtacaatggtaaaaagttataatcactattcactaacttagaatttgtgggataaatacagtgtgtttctggaatatatgaaaatcttatcctcgtaccaaaatgtgaccttacatctcctgattgccatgtaagcatcttggtatattttgcactagccactaaactaaaccacaagagaagaatatttacaaagttgctttcgcagtcgtatcggtctatgctatccgattactgggctaataacgagagcgtacgcagagcacttaaagttgtggaggtatttgacaagtttatcataagatcattgataaagtctgatgatcaaactctatatatgaggactttttattgcagggtactacaggtagatgggaacgatgtaaatggactttgcaaaacaataaagacattaaaagcagcataccataccataagaagaacagcatccaaggctatcgatctcttatcttcaggtcaatacacaaatttaactacaaggcttgtgtttttattagttgtctgtaattcttttctggtattggtgtgttaggtgaatagtggtgatcacgacatgctaacaccttacgttggaactcaagactggataagatctctcaactattccattattgacaaatggaggccatggatgatacttgatcaagtcgctgggtatatataccattttttcttttggatgttggtttcttttcttcatttgtatacgctgcttatccaacattgtttcatttgcagatacactacgacttacgctaataagatgacat

SEQ ID NO: 21984 - DNA, 626 bp, Arabidopsis thaliana landsberg
tatctatttccccataataaactgaaatttaattctatacactccatcttattgatgatatttgaacattaaatagtaatcatataacttttcagtatttaatttagtattttgttaaactaaatttcaattttacacgattttgcaatacaatttaaatatcataatacaaatacaatttaatttgatcgtatagaattcaaaaacaattctattttgcaatacaaatacaatttaatattctatactccatcttattgttagttttctatttatttaagaaaattataacttaatttttttagatatagacatataaattagtatatgtaaaaaaaataatctacttattttagtaggatttttttttgttgacacatgttaacatatgaacgatagacttggcacgtgtcacgatcaagtgagttactaactttaaaaactatactttatatagtaagatacttgctattaatacaattttgatcctagctaggttaaagtttactttcctgtttttgacagcatatatgatttatcagaaaaaacctaaatacatctacaaaccttgtttcttgtgcatattcataagtcgatgtgaaaaagtagagacatcctatgaccgg

SEQ ID NO: 21985 - DNA, 809 bp, Arabidopsis thaliana landsberg
atacaagaacactcattgtataaaatacaatatattttactgatgttatatgacaaattaagctagttacacatgtatattaaacatgtatgcaacatacacgtgtatatgagctaattactaaactagttgacaaactaagctagttacaaactaagctaattactatgcaacatacacgtatattacaaaaaataaaagcaggatgttcaatggattaatcaggctttcacataaaccggaatatgaattctatatccattttattaaaatataatcttgttctaagttgatagtgttgtgtggttaaaaaactctataaacaaaattatacacaaataattacttttaatgggggttggcaactttctttaatatcaaagtagaaagaaaaaaagagtgtgatgagagagaatgaatttttgtgttttgttcgagaattctctctacactaatttaccaatatataaggaagaaacaattaatagaaaaagaaattataaaagaagataatattgtaccagcgatttttactagaccactgcttaaatggagtgtggcagttttgaagtgcggtcctgtgttattatcctttgaaatccgcatctgcttttttttttttttttaaacgcaatttatcttttagttttattgattggtgaaaaatcacgtttttccacactctcactttaaaatccgcgaatactatgtctgcattcactggctaaaaaccacaaaacattttgaaaacaaataaaaatatatgcgatgtttgttaacatttacgtattcgattaatattaaattta

SEQ ID NO: 21986 - DNA, 581 bp, Arabidopsis thaliana landsberg
acacgtaggacctcgacttatgacatgcttgctagagccttaaagtttcttaaagtatttgctagcttgaaagagtgtgacagaaactgcaagtcattgccttctgagaatgagtgggatcgtggagagaggatttgtgaccttctaaagccgtttagtactatcactacttacttttcaggtgtcaagtatcctactgctaacgtgtattttctgcaagtgtggaaaattgagcgtcttttgaaagactatgcagtttgtggtgatcttagagtggataagacagaaatcaagttgggtacccacgggtagtttacatgatatatttacataccagcttagtttataagcaaaatatagatataaaatatatataatagtatagtatattagtagttaaacataaacactaaaaaaaaagacagaaatcaagttggatacccacgggtagtatcagaacaatcgggtttttttcgtgctttatctactaatcaaaaacccatttggattttttaaagtgggtttttggtggacgagtttattttgggttcaggtcggctggaatttttacctacataaca

SEQ ID NO: 21987 - DNA, 1078 bp, Arabidopsis thaliana landsberg
tgacactgcgccctttacgtctcctacagttgtggaaaagaacattaaggatcaagaacaagttgaatctactggttttgggttagctgatgattctaccggatgttcgtcagaacctcaagttcaattaccgccatccgcagagccaatggaaggtacacacatgcacttagaggaaacaaagaaatctgaaactgtagttaccgagattcaattagctgatatagatccctcattttctattatagttgtgcaaacgaatattgaggatcaagatcaaattgaaacaggtggatgtgatttaattaatgtcccttccggatgttcaacagaaccacaaattcaattatcgtcatccgcagagccagtggttgctgaaggtacagaattcccttcttccctcctaatgaccggggtagataattcttcccatctaatgaccggggtagataatgccaagacccatctcgctgatgttgtgccttcatcgtcacctacaactatggaaaagaacattgaagctcaagatcaagatcaagttacaactggtggatgtggtctagttgatgtcttgaccgaatgttcgtcagaacctcaacttcaactgccgccatccgcagaaccagtgatttctgaaggtacagaactcgctacactcccattgacggaggaagaaaatgctgatagccaattagctaatattgagccctcatcgtctccttcagttgtggaaaagaacattgaggctcaagatcaagatcaagttaaaactgctggatgtgagttagtctcgactggatgttcgtcagaaccacaagttcatttaccgccctccgcagagccagatggagatatacacgttcacttaaaggaaacagagaaatctgaaagcatggttgtggttggcgaaggtacagcattcccttcatctctcccagtgacagaggaaggaaatgctgagagccaattagctgacactgagccctttacgtctcctacagttgtggaaaagaacattaaggatcaagaacaagttgaaactactggatgtgggttagttgatgacttctaccggatg

SEQ ID NO: 21988 - DNA, 566 bp, Arabidopsis thaliana landsberg
  unsure (1)..(566): unsure at all n locations
aaagtcataatgaggttttaatgcaccgcggacaagatattgttatagcggttgaggctgtgactaaaccgtcaacgaatcagaccgctttttatttaccattcatcaattataatctgcagtgatctagataaaaaaaaatagaagaaaaccgcagcggaccatttgcaaaccgtttttacatacaaataaacttggtctgcagcggtttattgtccgtcccaaaaatgagatggactaaaccgcagacaaattagaccgttttgtccgctgcctccattcatagccttaatcgaaatgccattattattgatttcgattcgtccttctatggcgcttattatttatacttttttgacaaaaaaaaatccagaaaataatctcaactcataattacattttcctgaaaaaaaagcacacacaaagtctttgaaacaaacattgttgtagcagcaacatacttgagttccgacaagcaagaattgatttgtccaaaaaacagcgaaacaaaacataagcaatntttttttatatatttggcttaccctagtccttagtagcacacg

SEQ ID NO: 21989 - DNA, 470 bp, Arabidopsis thaliana landsberg
ctattgtagaacgagggaatgctattgctgtgattaagatctcatcaagatattttattattgctcggcttgcgatttgtctattaatcttgcctgtgtggagaaagcaccagtcttatcgatcgaccatgcaaagtgccatgagcatacacttgccctgtttgcaatacacacttcattaacttgcgatctttgtggcttggccgattcaagctgtcctttctatatttgctccccttgtggctttgcggtccatcaaacgtgtaccagcttaccacgtataataaacatatcatgtcatgaacatcgtattacttttaccccttcttttgatcaaagagagtggtcttgtggtgcttgtcacaaaaagatcgacaatgattatggtggctattcttgcactaggaaagattgtttgtttgctactcatgtgaaatgtgccacacagagagatgtgacagaagaagaag

SEQ ID NO: 21990 - DNA, 725 bp, Arabidopsis thaliana landsberg
tgagactgatattgacttctatattgtatgaatatgaatatttgttggttctggtgaagaaagtgaagaaaaatgcaaataatttattgatgaattacttttatttacatccaagaactatatctctttcaaaaaatctattacctatcttctaattttgtctaaatttctggatttgtttgagttaggcttacaaatatatcttctgaacttttctcttgcctttttatagtcactctttgacttaatgatccactttttacttaatcttattcaggggaccaccttatgggtttatagggaaagtactgttagtatttgatgagaatccttcagctaaagtgggtgttagatttgagaatccagtacctgatggagttgatcttggtcaactgtgtgaaatgggacatgggttcttctgcagtggtacgtcatgttcagtagtgcattggttactcgtcctcagctgctcttgtctcacacactgtttcgtctgttcttttaatagctactgatcttcagttcgaaagctcggcatctgacgatctaaatgaattacttgttaccaaattgtttgaggtacttgtcagttgcaagcagtgaattctttcttcgtctaatactttgcctaatactttgtccgtttccaggttgcccatgatcagagcagaacttgtcccgttattatatttttgaaagatgctgagaaatattttgttggaaat

SEQ ID NO: 21991 - DNA, 482 bp, Arabidopsis thaliana landsberg
  unsure (1)..(482): unsure at all n locations
gttctcatctatttagatgatttaatcatctccggagacaacaaagaaggtattcaatcaactaagtcctttctcaaaaccgtttttgatattaannnnnnnnnnnnnnnnnnnnnnnnnnnnnnnnnnnnagtttgatgttctccggaaggcttatttcgtttctaaagaaagtacacacttgatcttttgaatgagacaggaaaacttggagccaaacaagccaagacacctcttgaggaacgctacaaggtcgatcaagatggggagaaagaaaatgagccatatgaagatatttctttatatcgtcagtttgtaggtaagtttatctacttaaccatcactaggcctaacatttgctttgttgtgaatcaagttaaccaacacatgcaaacccctacaaagtaaaattggactatggtagagaggatccttatatatctcaagggaagtcttggccaggcatttagatggaagaaaca

SEQ ID NO: 21992 - DNA, 307 bp, Arabidopsis thaliana landsberg
attccttattcgacaagattgcgcgacatgatctctgattttccgccattgatttatcacttccttatatttggaaatatccataatcatttacatgacacctttaacattatgaccgcatttcatttattcactattcaaatggggaaaacctttccactttctccacgactcccgaggcggttttgctaatcaccacaatttcgcgtgagggataaattttcttcttctatcttgttttatctttactttactctctggtctatctgataaaaggaatcttacaatcctttcatcctcatcttct

SEQ ID NO: 21993 - DNA, 460 bp, Arabidopsis thaliana landsberg
ctatttcctaaaatatttttacctaatttaaactttaatttataattcttctttcatttttatttggtcttggactttatttattttgaatttatataaaatatatatagttaataaaatattatatttttttctgaatatgatgtaattcaaattttttaaaacggacatataatattcaacatatgaagaaataatatgtgtacaatgtcccacatcgcttagaaaaattggataatggttcaaacccatattataaaaggaccaaaatgattatgattacgaatgagcaggaaactcgatttatcaggcgtccaaaattaaaatagttatccgattttactcggattttttattttaaagaattaaaactttaaaatgtttcaagaaattataaaatattataactgtatcaaaagttaaatattataattttaaaaaccttttattaagtttatct

SEQ ID NO: 21994 - DNA, 182 bp, Arabidopsis thaliana landsberg
tgatcttctgtgaaactccaatgtatgtgcattggatcagttaaattttttataaatttccgactcagtttgatttggcaataagttaatttatctatatctgttatatactactttaggaaaaggtgcagcaagtattacatcagtgaggagcgtgtggaggtattcactcaaaggcttac

SEQ ID NO: 21995 - DNA, 595 bp, Arabidopsis thaliana landsberg
agagctctgtttgttcttctcaccgccgtatatataccctaccttgaaaccccccaaaactctcggagctatcatcacacgacaatgaccggcgcattatttagaaacgctgcctctgacgccgctcggatcttccggttaaagctaactacgacggcgaatcctttcggaaagctcaaccctttaccgataggaggaaacatccgacgattgcagtcgaggtctttttatcgtacgcctcagtttctcgggaaagcaaaggaaactagagtctctggtttctgtacttcttcgtcttcttcgacggtctctacagcaggattcatcggatggtatttgggaatggtgaaatcgcggccggttctgaccaaatccgtcacgtcctcgcttatttacatagccgccgacttgtcttcgcaggtaatttcatatatctatcttatttcggttttctaagcctataaaaatcagattttagatgttctgtgttgttgttcttcttatttcggttttctaagcctataaaaatcagattttagatgttctctgttgttgttcttcaagttaaagactgaattttgacatcatatatgta

SEQ ID NO: 21996 - DNA, 527 bp, Arabidopsis thaliana landsberg
  unsure (1)..(527): unsure at all n locations
atgttacctggtcaatcataggcattaaaccaatagctcgggcgcgaagaaaacaacccggaagcacaggctcctgtacataatcaactttgataagaaattatttcagccatttcattttcttttggtgaatgttgttagaattagactcaaacctgcatgataactaaaacatctatagggtcattgtcttcacatagtgtgcgtgggacaaacccgtagttgtgaggatacacaaccgaagaatacagaatcctatcaacctgatagacatatccaaacacttacgatcatcatatatcctcagatcattctgttttttcaagatttgatatctttttaccttgatgagacctgtttttttgtcaagttcatatttgactttgctcccctttgagatctcaataacctaatttcatccaaaaaagacaaatgatntaactcttgttcgatcttctcattaccaaaacctgcatcggattgtcacatcatcaagcataaagactttaccacattgaaaatcactg

SEQ ID NO: 21997 - DNA, 516 bp, Arabidopsis thaliana landsberg
cgccgatcaccgcacttgatgtcgcgttgtggtcatgaatgttatacttggttggtttcgtcaccgttcattgggggatggttaggtaaggaaaacctatcatggttatgaactatactactgaaattgtttcacttagcaattggattcatggatcataacttcaactattgggtttttgtgtgaatatgtgaaaaaaggaaacagttcacgcggtggaattggtgatccgatttccgtcacgtccaaaggagtttgggcaagttcttaacagttctgagtagatctcgttcccaagttttcagaacagctttcggatccaaaatcagaggtaagatcgatcgggaaatcgcgtctaaagttgatgattattcacagtttttcagagccatatttttagtatctgaaacagttgcgtcttagggttttaaggaggcatttccggtcactcctgagaattgatagaccaagagacggctgtttacgatacaggaagtgttagagaagccacgggac

SEQ ID NO: 21998 - DNA, 2537 bp, Arabidopsis thaliana landsberg
  unsure (1)..(2537): unsure at all n locations
ggtcctatcgattcaacaaccggatgggagaagcttcttaaaccattcgatctaaattctctcaagaattcattttataagatcactccttttcagctgtgtaagctatttcaatggagttgttctcataagatctggattctctcatctctaaacaaagtctcgtttaaaacacaactctaattgaaacagagcgtgtggctttgcatactatggatttgcataggaacatgtcgcacaaattatgttcattaataatcataccgtccatggattcgaacaaatggatgacttaaagaaccaccagcttgaaaaaaacataaataaaagtaggttttgggtaactgtatgtgcttggtgaagatcatatgtattatcggctaactgaaaatcatcaagacttattgcaggcttacggaaccatcacaaccggctgcaccataatagaattaaggttctctaaaccctttcagaatcatccacttagatttggccataaacagttgtccattttaccaaaagcacttgttcatcgtagtacttacgaaagtaaccaaaacacatgaaaaaaataatgtctcgaaacaacaagatcatgctacgtgtaacacccgtcccgccatatagactaagacggcatgttattcatctgatcttgccaaaacgttttctttaaacttcacacacgaacaaaatattgcacataactcctcacgcttactaacctgaggaaaaaaaggaaaaagaaagggtgagtaaagaatactcagtgaggggaatcaactctgcccactgaaacataacactctttccaaagctatacgatcatcatcataacatataaacttagacacacgcaatcaacttaacatgctttaacttctagtaacacattcataccaatcatcttatatatatatatattaatataaacatacacatcattaggtccagtcatcctcataagtgatgactagaacctcataagtggaggctggccctcgtggctcagacactcccattccgggctcgtcagctgtttttgaacagctgttaaccggtcagtccatcactgtccacatcactagggagaccccggacatcaatggatacggcccaggggtacatgcataatgcatacatactcatggtcatacttaacagacatatacttataatatcatacataactttacattatcaaacatcatactcaacaatcatcaaatcatatcatcacataatcttatcctatgcattcagatctaagcctacatatcatgcgtcaagaagcataacaaaagaaaaagataccatgcttcgcaaataccaccctcaccttagcctaattgaagatgacaacacacttttccttctggctcatttagacaaacttattatctcaactgcgaccacatgctcttaagctctaacttggttctccttcaaccaggacctaaatccatgagtcatgaaagctcctgcaaagcttcaactcaaaccgaactcgtttcccaaccaacaacacaaactcatcactatttacttcaaataaaactgtcttggaaacatactcaaaagtcaggaactaaccgttacaaatgtgatccaaccgttgaatatgtagccagtagtatcatgactaactccacgaagttnnnnnnnnnnnnnnnnnnnntacaagctcaaacgttgtcgttaacaagccatctcgaactgtcatttatgatttttgggtttgacagacttagcaattacttgaccagaaagaaacgtgcacaacttcttgagtttaagtctgattgaagatccgtcagtggctgtggattccttcacatcgtgttcattgaaatcacaccttacgctcctcgtgattctctctgatttctaggagaaattgatcctcaaaacctctatctgacactacaatatttctcagatcctttagaaaaactgcactctgaaaactgtgactattcaccaactttaaacgcgatttcccgattgatcttacctctgattttggatcggaaaactgttctgaaaaattgggaacgagatctattcagaactgttaagaactcgtccaaactccttcgtacgtgacgggaaacggatcaccaattccaccacttgaactgtttccttttttcacatattcacacaaaaacccaatagttgaagttatgatccatgaatccaattgctaagtgaaacaatttcagtagtatagttcataaccatgataggttttccttacctaacaatctggcaatgaacggtgacgaaaccaaccacgtataacattcatgaccacaacgcgacatcaagtgcggtgatacaacgatgatgatgatggctgggaatgagatgaatttctgctggaaagagattaaacgtgatggtgatgttgaagacttaaatggctgtggcttggttgacgaggaagacaatatatacacatgtatgtattaggtttttgtttctagtggaattggacctttgtggcctaagtggggtttgggtctcacctgtag

SEQ ID NO: 21999 - DNA, 535 bp, Arabidopsis thaliana landsberg
acactacaaaattttcttggaacatcttgacaagaaatcagttttactagatccaaatattgaaaataggtagggggtttttaagtgtgattagtctctgtgactgtgtaaaagactttaacaagaaaaaaatgaaaaggcaataagttgctttctgtcaccaaatgcacgacgacgactgcatcaagtagtttatctagatcatatccactttatagtacaatgaaaatatttagatggtaagaagaagaaaacacagacaccaatatgagtcaacttcttggctttctcaatgagactaaagataaataaaatttcataaagaacaattttacaagaactttattcaacaacttgtcagccatggaattgaaccgtaccacatgttacattgcatcactacgatcttcctcagtatctcgaggatgactatggaggatgaaccaatcgcagaatcatgtaggctagcgataacaaaaaaaaaaagcagcatttactaaataattagctattgagaaaagataataaaacttac

SEQ ID NO: 22000 - DNA, 771 bp, Arabidopsis thaliana landsberg
  unsure (1)..(771): unsure at all n locations
attgccgctaacaccttgaatctttttttcttctaaatagcattttattttattcttcataatatgatttttctctttatttgtgtcaaaccaaaacgttttatttcttgaaattttagccagttttcagtatgatgatgattgtgaaacagataaagcaactacaataaaacctctaaatttaataatcataataaaataataaattatgttagtccgagtctggccggttagataataagataatttatttttgaaaatcctatataaaattatggtctcaataacatcataaattaataatcacataattagatctatatatatatagtatatataatctatggtttaaatattttaaagtattgaatttatgttagattttgtctcgaacttttattgaatcaaacaattattttgtttctaactttaattgaattatgttgtgtttttaaactatcatatgatagtatatcgtttataacttcgtaatacagttaaccgtaattgttttgtaaaatttcaacttcttggtatgcatcattttcatttcaatagtcttctactatagttgaaattatcaatcataaacttaaatttatgtatatcatttgcataaatgaatacaattattgtgatttactgccaaatgagttttttgaaatattaaattttcaattctgatactaaaaaaattataacatccaagtcattaattntacgtatattgaattattaaactcatatttntctaaactttaacaattaaaa

SEQ ID NO: 22001 - DNA, 650 bp, Arabidopsis thaliana landsberg
ttagcccattggccattacgaaagagagaagcagctaataatatttaattagaaatgaccaattctctgtatccacgttagctttattatctgtatatacactcatcttttacatttcaaatttccaaaaacataactctgaaggaaaatgaaattatgtaactatttggaatttggatattttatggatgaactggatcaagtaaaagaataaacacgaaatagtaatctttgtacataagaaactgagttcatgtttatggtttctatactatatctaatatacattatggcactatattttattttctaagcaaagaactcgaagttaataacctactaatttgctatggtattaatgattaatccgagttggatatacgtatttttaatagaatttggcttagtcgatataaaactatttggtcgaaataacgtgttagaaattctacactttctataaaaagaaatttaaagtacatactgcttaagaaaatagaccaaactactaatctttaaattacagatggtattggtaatgaatttgaacaaaaacattaatataatcttttatctgtcggtcaaacatataatattataacctaaagtccgcttctataagttttcctcagcacataaaagaaccaaga

SEQ ID NO: 22002 - DNA, 797 bp, Arabidopsis thaliana landsberg
gggagagttccgttacagtcttaaaaccccaatgttttattttctggctacttgatgtttcttttaaaggaaatattgttttatctattgggggtccaagtaaaccaatccattatcttttgcaactctgttaatcgtgttgagctgttggccaagaaaattacagaacttggttactcatgcttctatatccatgcaaagatggttcaagaccatcggaacagggttttccatgatttccgcaatggtgcatgcagaaatcttgtttgcactggtacgttttgtgtatttcatgtgcttgaacattgacaaatgtgtttatgtttcacggggaatgtctgtctgttgcagatttgtttacacgtgggattgacattcaagctgtgaatgtggtgataaatttcgattttcctaggacttctgagtcgtatctacatagggtatgttaagggaagccgattttggtttatcttcttgagaacctgctctgttttatttgttcaaattgtgaatgggtttttgcttcattatattaccaggtaggcagatcaggacgatttggacaccttgggttggctgtgaatttggtaacttatgaggaccgcttcaaaatgttcgtgtttctttttctcaactggtgtggcctctcttttcatagatgctatagctttcttactcaattatttggtttccaacaggtatcagacagagcaagaacttggaactgaaatcaagcccataccttcacttatcgacaaggcaatctactgtcagtaacttctacctggtgtacattc

SEQ ID NO: 22003 - DNA, 525 bp, Arabidopsis thaliana landsberg
tacctgtcgtcctcaaagccaggggggtgttccacgtatacctcctccttgattggcccattgaggaaagcgttcttcatgtccatttgaaatagcctgaaagagtggtgagcggcataggctaacaaacttcaaattgactctagcctagccacaggagcaaaagtctcctcgaaatccaaacctgcgacttgggcataaccttttgccacaagtcgagccttatttcttgtcaccaccccgtgctcgtcttgcttgttgcaaaacacccacttggttcccataacgttttgctttggacgtggcaccaggctccaaacttcatttcttttgaagttgttgagctcttcctgcatggccaacacccagtccggatcctgcaaggcctcttctaccctgaaaggctcaatagaagagacaaacgagtaatgctcacaaaagttagctaaacgtgagcgagtcgttactcctttgttgatatcgcccagaatttgatcgacggggtgatttctttgatcgtcgctc

SEQ ID NO: 22004 - DNA, 585 bp, Arabidopsis thaliana landsberg
  unsure (1)..(585): unsure at all n locations
tcagtcaacacctaacagtgttgtaatttatcaaattcataatggtggaatgatttcgtcattccaaatattatactaatcacactttttagtgatccattcatagttcaagattaatatataagtataatcatgaaatcgttttttcaaatttctacgatggtcattcctacattctctgtgtaacattgcacatacaattctttttttaatatacagtttcgtaatgttactaacctgaagccatgcatctacaatgaattggagatcaatttttggtttgcactgattgtcactaagctgctttagctgcaccgattggaatttctccagatcactcatagccttaagcctcgacgattgattttctgcccatcttacataataatgcgtgtatcttttgatttcactctgaagcaatgttctcttatcgtgatcagcatcttcaacataattgttgcaagcatagtgatcactatatgatttaccacaaatccaacaaaaaacgatggccacacgacgctgagcatgtcatatggntacatccatggctcttctcgaaggacgtttgcattaggacatggc

SEQ ID NO: 22005 - DNA, 559 bp, Arabidopsis thaliana landsberg
ccactatatttaatcattctctcaacaatcaaaacatatttttaatagtgacttgcttagatgtcaatagttgtcagtgaagaaaagattatgtaagaacttacggtattatcggtaaatacatcacaaatatcctcagcatccaacaagaaccggcgttttccaggatttccaaaggattcattacgaacaatctttctacccaacttttgtagcaaactgtgcatctctacagttttgtccagtggtgatatatgtatgagggacttctcagccagtattttcaacccaatgatagcattatctccaagcatgcttataatgtattcgactccacagcaatttagtaaacacgcaatataaaggaatatttcttgataattcccatgtaatcgatcattagctgactcttaatgttttcagaatttctccatccaccaaactatttcggagactaggcatcatctctatccactcttccttgtccctccctttcaaagacgaacccatgatattgagagccaaaggaagattaccaacaagctctgaacttcatttg

SEQ ID NO: 22006 - DNA, 661 bp, Arabidopsis thaliana landsberg
gtgaagatgtttggcttcacggtacatgttactaatgtattaacgtccacggcgagaatgatggaaggcgtgcttttcactgctaccaccaccatgatcaccttgatctcatgcatcgaaacacatcacaatcataataaataagcattagcgttcaacatatacccttcaccagatctcggaagagctaacaacggagcaaaagttacccttttgctttagtgctccaaaactctactcataagacttactccaaacaaacttagttccttggcgaagtagttgagtgagtggtttagccatttgagaagaaaaaaattatgaaccttatagtatcttgccaaacctagaaaaatacggatctctaaaatattgcttggctgcttccacttacttattgcctcttgtagttaccaaatgttccaaaaacaaaactttttgaaggcaaaattcgcatttgctaagtttagcatgtaactactcttccttcaacctctgaagtatcaatctcaagtgttcaacatatttttcttaactttttgaatacaccaagatatcatcgatgaacactataataaaattcgccagggccgtctaaatactttgttaatcaaatctatgagtatagctattgattaggttaactgaagacataccccaa

SEQ ID NO: 22007 - DNA, 2264 bp, Arabidopsis thaliana landsberg
atatcttcaaagaaagcaagaggtagctccggtgaaacaggcatggtcgcaacgcacttgtactgtaccaagagaatcagatattagaatgttcttgttgcaatatatcacaagtttaaagttacatcattgaattgttgaatttaccttgtgttgcttgtacttatttctaacagcttctagagtgtttcctcttctgcttagatacaagtcatgtatgataccgacgcacacttgtagatcagctgctttgtactttgtgtattcttctagcatttgattctgtttgcatcaccagaagaggatttagaatataaagaactttttctgtataagaacctgtcatggttcttaatttgcttacccaaggatgttgttttggacggatgatgaaccgggcaagaaatacagctgaagcagacaaaagagatggcaaatacttcacacaggtgtaatctaacatactcaattctgatagatagcaacaaaggaactctatctgcaattgtgagtcctgcaaaggcatgaaaaaaagaagatttaacaatagaaattatgagatgcaaatgccacagtttacaggtacatcgattttgagcttactttgaaatcttcttgtgcaacccgtgtaaaccgtctgcacaaacacgacataaaaaagagaataacaatcaaaacgagggcaagtaaaaccatgaaatcataagtttaaacaccagactgtttcagagtcgaaccttaggaatgttttgatggttgggcttcctaattcaaactgcagagcaagaagtatatccgcctccatcgacaccacttcttgtttagtaaatgtattatccgtaatgtaacaaaaatcttcaactttaggaggacctatctcttcatatttcctacttttttaaaagcaaaaataaagattccataagccaaccatctaagactcttcacaccaacacaacaataaacaaagaggattaagatgcttacgacgcaataagcattgcagaaactcccacaagctgaagcttctgcctgttaataggcttcacagacaagaatctatcaacataggagatagtgagataaagcgtatccgaaacaagcttgtactcctcagcaacctccactaaccaatccaccaaaaccgctctcatgtgtggagttaaatcactctgaaccttttcaatataatcaggtagtggtctatgtttcggcttcccctgaaaattttaccaatccaaaaacaataaccattagtcccaaagtatcaatcatctctaagttctccaaacatatcatataaccataagagcaagctgtgattggacaaaatctcagaaacttatcaaatccacaactttaaccaaacccattaattaatatcaagtccaaacactgtaccaattccaaaataacataaactgataccataagatcactaagatcaaaaatgatggaatcaagaaatctactaaagatgattttttttttacctccatttcacggagataagcacaaatatcactagcaaaaggctcacacatctgaggatcaacagatctcgattcgattagtacgctagcttcaggaatcatcaaagccttcttcatctgcctcttcgaggtattaacacttgttttagccttaacggtctctctttcttgattgggtacagcaacgacattggacatattcggaagctctccgagaacaactctcttcttactaactgggttttcgtctaacgccatggacgacgcttttcgtttcgccgccgctctcgtcatcctcgcacagttctgattctccgccatggggttatttcagtgggaaagtgagatttgagaaaaggggtaatgttcaaggtaggtaaaagttaatgggttgagtaaaagcgccatttttgttggggaagttttgagatttttaggtcatggcgcttctctgtgtaaattttccgatttcgaaatttttagggatttgacttttgagtatccaaaatgtggggcttttttgcagatttcatttccacatttatttggcggctgttttctcctttttacccttcaaaaagtttcactcgtatatttagacaatcattagtgttttattcacttaattaaagatgaaaataacaatcaatgaatgcttttaattaaggaaattattagtagatgatttgtttttttttcggttttggttaagataaggaatataagtgagatggttttaaataatttaaaaaaaatcgggtttgtatgggt

SEQ ID NO: 22008 - DNA, 535 bp, Arabidopsis thaliana landsberg
  unsure (1)..(535): unsure at all n locations
gagaatattcgtttttcaccaagtctttgagaagccctgaattctgtcttatttgcaaaataatccctgcacgtttggagggttatatacctaattgtttggtcattgttagacctaggccttgaatggctgcagtttttggcatagtttttggattttgattttgcaaaaaccaaatattatccaatcatgattctacaaaaagtagatttcctaaaaactaggaaaacctgattttaaaagattttgcctatttgttcacagaatctaaaaacccaattttatggggttttctaacaatttacgtcacatttttttcaagttcttaaatattattttaaatatgctattttcaccatttaccattcattaaatgtatacattggttntatttaccaaacctatgtttatatgcaactagattaggacttttaagctttttaaataacattagatttagcatatagatacattaaattttatagggagtagaaactttatataataaaatttacctatgtttttggtattctgc

SEQ ID NO: 22009 - DNA, 1194 bp, Arabidopsis thaliana landsberg
aaaaacttacagtgttgtgtacaagatacatcgcaaatatcccccaaatacacaaggaactcccgttctccaagctgattggactgaacacgggcaatcttcttacccaatacttgtaggaaagagggcatcttcacagatttgaatctttcacagattagggatctatcaacaaggttttttagcccgatattaacatccaaggtactatttgctagtaataggtagatgtcactgactttctcaccattgaaaatacatgcaatgtgacgaaatattgcttcatcttttctgttattcaacccatcagagctgactcttagtgttttccctatttttccatccaaaccttgaagcctcggtagcatatctatccagtaacctttgtttatgccccgtaaatttgaacccaatacgttcaggcccaaaggaagattaccagcacgcaatgcaacttcagaagaaagctccaaaaagtcatcaggaggagaattcttcttaaaagcagaacgacaaaacatctcaagagccagcgcattagatgggagacagaccttgtaaatgtgatcaatccgattggcccttaaaaaatgcttattttctgtaaccacaatgattctactcccacttccaaaccattgagtttgacccgctaaagcatctagcacatcttgatcatctaaatcatcaataacgatgagagctttccggtgctttaccatcttttccattgcacctacatgtatctttatgtcctttttgtcaaaaatttcagctagaaaggctctttgcaagtgcaacttcatgttatagtcaacaagattagctccactgtaaacttccatactcttagatatgaaaaccttgtcaatgaaaacactactttgaaactgacaagagagtcgactaaatagagctcttgcaatggtagttttgccaattcccgagggaccccatatcccgaccatcctcacttcctcagattccaagtgcagcaatgaactcatctttgttatatgatcttcaataccaacaaaatcctcaacatccttggatggagttaaattcagtttaagcaaaacatcatttgcaatttattctatcatttttgcttcattaaccctaacaacaagaaaccaatcaatacataaaaccaaggtcatcacacaaagcgagctcaacacacaacgagta

SEQ ID NO: 22010 - DNA, 520 bp, Arabidopsis thaliana landsberg
gcatgaaaatgcattgtattggttagtatgttattgtgactgtgcaaaattggccaaagggattgggaatgggctttcttgggaagctgctagctataagcttgtgaaaccgatgcttgataagaaaatgagattagttggaagtttctcatgttgagataatcattgaagtcttgaagaaaactggtgatgaagacctcattcgtcgcttctcaacggattaattcgacaattcatataggtatgtatatatcaatatatcaataataaggattcttgttctacaaagtcatcactaggctttttcgatattgcatgaacaagtataacaatttttttttgctaagtataagtataacaattgaggtttttgctctgttttaaggatgcaagggctccttggtcttgcggttgaagctttgtgcggcaggctgttggttctggagataaggtacaacgtatttgacgacatcttcttttgccattctgacatgtccaccgggtacactcacaaacttca

SEQ ID NO: 22011 - DNA, 612 bp, Arabidopsis thaliana landsberg
  unsure (1)..(612): unsure at all n locations
gcgccatggcggtgtagtcatgatggcggctgtagacggcagggttgctgtacgctcaggccgtcatccgggttgtaggtgacgtcgaacgtcgccttgcccttatggccatagcataggccgagaagatggagcaaggctggccaccatgtgatgccgactgcaagaaaaccaacgagatagttagaaataatatctaatccaatgttatatacttaaataaaaaagagggtgtacccatgcttctgcatattgtcctaggctacggcagccttggtggtgggagggaccttgtatcatcagacgccgttcccggctagtgttgtgcgcctcgttccactcaggcgagcaccacctatccactnnnnnnnnnnnnnnnnnnnnnnnnnnnnnnnnnnnnnnnnnnnnnnnnnncaaagtaaacacgtacactgcataccagaagataaaattaaattcatgcatggagtactggtaccaaacatgcatgactttacctgtaggtactagtccctagtcaacgacatggttcaggcttgctgcttggtcaccttctcctaaggacggagccgtggtagctgacgatggcatggatttgggctcatagtgcat

SEQ ID NO: 22012 - DNA, 515 bp, Arabidopsis thaliana landsberg
  unsure (1)..(515): unsure at all n locations
gaggtgttcaaaaccgtattaaggtcggcttaattccattattcgttttattgtttatcttatgcacttttccactagaaagttacttgtattgataaattttgttttttttgcttggatgcaaatctaggaggacaaggatgaagaagatatcaacaaggaagcttatgagatatgtttaaatgagtggggtagacgaactgtggagatatttgttcttgaccatatctttaggtaataatgcataatttgtttctatatagtatgccattgtgttctaacttgatgtgcttatgtattgtacttcaatatctctgagcagcaaaattgaggttgcatacaaagaagctattgcgcttaaaaggcaggaagaacttatccgtgaagaagaggaaacttcaaaacggagcaaagtgctaaaaaagggttttgggaaatgtagactgaattagattcgaaatgttttctgtgttntgcgtaattttgttttcggtttttcggtattgaagaaatct

SEQ ID NO: 22013 - DNA, 450 bp, Arabidopsis thaliana landsberg
atattttaattcattggcataaggatcatactatgatttaacaataatactgagaatacaagggaatattatgattcgacgataatactgagagtaaaggggaatactatgatttgacgataatactgagaatacaagggaatactatgatttgacgataatactgagaatacaggggaatactatgatttgacaataatactgggaatacaaatataactattgaaggatattaaaattcgaatttatgtttgtttcaaacatcaaatattaaatagaatatgtagagatggagaactcttaaaaattaattaaaatgaattcaattaggggaaaaatatttggtcaaaaacatgttaatagactctaccttacatattccttatacttttaagctcacttttgatataaactccaacttaggattgaaattttacaattttatatatt

SEQ ID NO: 22014 - DNA, 1562 bp, Arabidopsis thaliana landsberg
tgtatgaagccaaagaacaagagctgtgtactccacttataggagcactcttcacagtggttggtatctctttgaaaagtgtggttcaatttttctctacggttaagaataaaccggctttagatgcagttgctcttatgagtctcaactggtttatcgttggtactcttacttacccgactctaccaagagttgctcgaattgtggtcccacgagtctttaacaccgtcggctcggtcttcgctttgctccatggtggctcactcccctcgccaccagagtttgtgaactatgttggttaagcaaaaaatcctctctcagaatgtaattattaatctagccaaaccggactgaaccgggatttgtatgtatttggtaataaataaagttttgtttatacaaatccttgtgtgatttttttccctatgtcaatatttatataatcacataatcactagtcatgctcaaaaatctaaatagttgatttagacgcatgcacgtgacagtcacaggtgacgagttccgacgttaggtcaacgtgcagatctagaaccagaagacttttcaaagagacacgcccagacaaataatcggtttatcattttcattaactaccactaaaggaggctgctcaagtattatcgatagttgggaacgacctaataatcacagaaaaaatatttgccggatttggtaactgtatatcctccttattctctttcacctttttctgatgagagagagatgcgatgattgttaaagttaccggcggtctcggattcgcttggtgcaggtcgggaactgattggctgacaccgacacgtgtcttgtcatggttggtttgtgagctcccgtcttgtatcaacttaaatcggagtccgaggttaaaaaataagggatccacttttcagatctgacacaatttttttttgcggtacaactcttggaaattctgtttgttgttcgtctaatttttttgttgagagttgtgtgatttgattgattcggtattgggttttatctaaatcaagataatttgttgtttttttccttactttttaagtctttgttttagtttcgaagcttgaagaataatgtttttgtttttgaaatgttaggatctagggtttttgagctatatagatattgttttcgaattctttatcagttattatttattaatgtttaacgggtaaatgaatttagatatcaacagattctgatggaaactctgtaaattttgaagctttatggtttaccgtttatggggttttgagaaaattttagggtttatgctggttttaggttagtgatgatgagatttatacaatttcgttcagaatagtaaacgccgttgatgacgtatatttttcttttgtttattttgatgatgttattggtttgtgatttaaatagagttttagtgacttctaatattatgtaaaatcttttgttatttaatcaacattttcatttttttttgtttgttaaagtttgattttattagttttaagatttataaaatataatctaaaatattcatactcttggaattatcagat

SEQ ID NO: 22015 - DNA, 433 bp, Arabidopsis thaliana landsberg
actgaaaaagtttcctactttctcctttcggctgtccaactttgttttcgaggcaatgacaactatattttccggtaaagtctcaagcttgcttttcaaggttgcatacacatcactgttccccacaagagatttctcaatatctttcagaaacaatattaatgaccctccttcactctcactaagtgcgacctatggtatgggtcaagaggttactatcctgtagctacaagccataagtagttatcacaaaacttaaagtaaaagctacctcaaagatttcattaacggcgagtttatcagcataatcgctagaagaaccttctaaccgaagtgagctagctggacacaaagaataattttaataaagttcactttttaagttaagtaaagttagaaagaaaaaaacagcccgcgataccagcacaaaaaa

SEQ ID NO: 22016 - DNA, 595 bp, Arabidopsis thaliana landsberg
gaagccgtgatgttctctaacccgaaaccggaaatggtttccaactcacatgaagaaaccagcttcatatttttttttgtaaaacactcaaagagacttgtattcaaaagttgtcctcaaatcatattcatacaacatctaaagagaaaggaaaggagggttaccagtggactcggatttccatggttttacaaatcaagcttctcggtgtatagacagaggagaaggtggagtcagagcaacatcgcttttaacctcttctttctctctaggtgtctgtacatttgggctatgtgcctctttccaaaacctgctcgggctaggagaactagctccacttatgttcttaggggagctcccgagaccaaaccgaggatcaaacacaccgtcttcacgaggcaaaggtgataccaaattcggagataccatattcttctcttcttttctttggcagaatttgtcttccactatctcataagagtttgcagtcctaacttcttgtgctaaagagcaccagcaacaacataaccagagcgcacaatcagcaatcgcggctctaccgaaacagaaattattaaactcgtaattgatcttt

SEQ ID NO: 22017 - DNA, 627 bp, Arabidopsis thaliana landsberg
atgtaattttggcatggaatccccattaataaataggtatgtataagaaaaattgacatattttaactcatttaggggaaaaagttaaatgggattaaatgggttagtccaattaaacccatttattaaatggggtttaacaaaaataattgggtacccaattaagactatttatattaattatctttactaaacaattaatatcttaatcgctaaaataaaagattaaatgattaaatacattaaaaccaaattttgctaaaaccgcaaaaccatattttcagtctaaatcataaatccgcattttccgctaaaattttaaaaccatattttcagccaaaatttgcgctttgatttttcgattttgcagtttaagcttgtatcaacaacaaaggacttctggggtaaaagtataagttcaattctaaaaattttcattttagatttttatcttggttattttatttttcaaatcattgttttatttcgattttagacatgcgacatatttgataaaagaactcgttatttctggcttaattcttttattaggagtagagtgaacgcaaaaaacatttaaactttaagctgagtaaacagatcagcatgttctgagataatttatat

SEQ ID NO: 22018 - DNA, 2439 bp, Arabidopsis thaliana landsberg
  unsure (1)..(2439): unsure at all n locations
atagacccaacattgatgaagatcttagtgttttttgggatggtgtagccgccgaccagcgcggtttcagacggacggtgagggactagcaaaggaatggttggataaagtctaagtgtttctttcaaaacggctaatatgtaaggaaggctagtgatatgtgattcttcaacaatgttgtctttgcccacaacttcatctagctcttgttgcgctcttctcatcaactctgggttacttattagttcagccatcacaaactctatcgtgttggttgatgactctgtaccaccaactaccatatccttcacacattgattaagtcatgagcaaataaacatcttacaaataacatctaaatgctaaagcgactaatgctgattggtaatctacataatggcgaaatgactaaaaacttatttttgcatgattttaccaatcgaaaaactaatgccttatcatgaatttcaaatattattctgcaatactaatgaaaaatataattgtgaaattatcattccgacttttcatataatttaagtgtttgtctattagtatttcaaaattttcatttccgatatatactttttgtcaatttcaacagatatgctattctccgataattatattcttaagtataaaaattgaaaccatttaatttcattaccatgagtacggctttgacatggttcattgtaatagggacgtccgagtcagcttcttggtcccttaacttcatcaagtgttgtaaaaaatctttacattcaccatcatcaccatccctacttcttagccgttgcatctgctcgatggctcgatcgagtatcgcatcgagatctcgagcatacaaatgcatcttcttaacaagcccttgaagatcgaatctagctagcatcgggaaaaaatcagaaacattaggcacacccaaaagcctagttatctcagaaatcactcctttaaactctgttccaacactctccatatcctctgctttcactgaccctccccataacatattcatcattagattcatcatcgtcaaaaacaactgctctccaacattcaccggtgatttttctagacctttctggtacaaacatctcgttctttctcggatttctttgcgtcgaagctcataaaaggaatccaaagttttgcggctaaaaagcttggcagcacaaacttttctaagcattctccattcggcaccgtatggtaaccatacaaggtccagaccaccataagtaacggctcgggccgtgagagggacgtcatggtttgagaaattgatatcttgatctttaaggatctcgctagccagcgatggagagtttaccacgacagttagttttgagccaagattgagtttgaagattggaccatgactttgagcgagttttgtgaagtaggtgtgaagatccgggtcaaggaagggaaggtttccgactataggtagccctcgcggtccaggtggtagaggcggttgcggcgagcgtttgaagatgtaccatagaatcgagaaggtagctgtgagaatgagtactgcgtaagcgtaaggagtgagactgattgcgttgtcggggaagagatttgaaagcatagacatttttgccaattgtggaaggaactatgagaacaaaaaagtaaagtgtactttagtgttagttatttgatatttcatctttcatttatagtattaatagattaataatgtgaaattcaataatgagacggtctcaagctgataagttttgagcggatgtgattcttcccaattttgaaaatactttttaaatatgattggatataattcgaacatttggtggatagtgcttaaaaatagggaaatattattacttcgtgaatctaatttaacagttaaaagaggaaatgaaaaatgtacggtgccacattttggtggatataagtttcatttactcttttacccgttaaattagggacatatttcaaaagactattttcgctggctaagtttattatggggccattttgctgagattttgagagtactccaaaaaccctaaattttcacaatttttaaagggtatttataagaagtatacatagaagaacagaaaattaactaatgtgtcactatttacacagtacattagcaaagaaaattacatcattatccttatgtctttttatctttttatttttcatctcaaaattggttaacaatcaaattaccgatttaaataaaactttatctagaggtagtgataatattaatcttattggatgaaatttatattttacnnnnnnnnnnnnnnnnnnnnnnnnnnnnntatgatataatagatgagttaagtcggtacctataaatatctcccatgggttatcgcttaatcacntcaaaaaanctttgcatgatataattataaacttattgatatnggtnttttgttatcatgt

SEQ ID NO: 22019 - DNA, 540 bp, Arabidopsis thaliana landsberg
  unsure (1)..(540): unsure at all n locations
gtttaactctaaacgttatgtgtaccaacaagtcaaagcataccaaaatgnccttttnattctcttatttgccaacaatttaaaaatatatacacacacaatgcaaataaacgagtccatttatgtaaaaaatcatttttaacaaaaagacaagaacaatgataagtttataaggtctactaccgaagaaagaagctgagagattgggttaagtgaagctgagaacagtgatacgttttggtctactacgagagaaagaagctgagagattgggataagtgaaactgagaagagaatagaggaagtcaactgtagtgttgattgagttgactcaacaaatgagggcaaagattcctcctcagtaagaggctttgtcttgaaactcttcttctataaatactgactctattcttatcgagaaaattatgctctgatgttctgagagttcgcgatctccttgttatcgttcttagagtgtgagtcagagatgtcaacaatctaataaacaatgtcatatcatttaagctattactgaatatt

SEQ ID NO: 22020 - DNA, 804 bp, Arabidopsis thaliana landsberg
gttctcagaattgaatttgatagaacacttaatgcttttttacccattgttgggctgtgtacatctcaaaataagaagcatgttgcaatcttgacaaaagtatcttctcttttacaaatggtgtgaatagaattccttcaatcaacaatactgcagcaagacacaacttttcttcatcttcaacagcaggttcaccttccttaggttttgaaaacaatcgatcttcgagatcaccaagagtatatactccttcactcgcccaaaagtatggttcttttacacaagatctttcccctttcgtcgaagttccctatgaacaggttcacattgaattcctgtatgaacaaaagacagtgtagagactattattacaggttttatagtaaatactttaaaaacgattgtaaatcatgtttaacacttttaaaagcttttaaaagcttttaaaatcccttataaatcattcaatgccactaacttatggtttaaaaatgattgtaaaccatgcagacacttttaaaatcccttgtaaatcattatatgacacttacttatgcttttaaaacgattgtaaatcatgtttaacccttctaaaagcttttaaaatctcttgtaaatcattctattcaacttacttatgcttaaaaaacgattgctaatcatgtttaacccttagaaaaggttttaaaatcctttgtaaatattctatgccacttacttatgttttaaaatcgattgtaaactatgcaaacacttctaaaatcccttgtaaatcgttttaagacacttacttatgcttttaaa

SEQ ID NO: 22021 - DNA, 581 bp, Arabidopsis thaliana landsberg
acaagggacaagatcatgcatcatatgtttgatacaaaatccaaatcttaaaagagaagaaggaaagcttcatttttgagaattattattgtcaaccaaatcatcgatttgctttttggcttttgctcctaatgtttttgacgttttcgagtactttagtggatccatgttgtaacatatatttaaatcttacattggtggagttggccaatctagtgtgatgctgatagtgggttttgtacaaaattgacgaaaatgaaacgaccatgtctacttgacctaactcgtcgagacaaacatgttacgacaaatatataaaaacgcatatggtacataaaatattgctttggaccatgtgaaagttgaattttaaaaatatatacaaatattaactataagaaaatagtctctgacattcaaatgaatgctatatgaggacattcaaaaatggtttcagatcttttatattatgaagcatttaatgtaaaacattttttttttgtgattaaattttatattctttaaaaacataataatgatctaatactatagtcacaaatattatatttaaatgaaaatta

SEQ ID NO: 22022 - DNA, 1181 bp, Arabidopsis thaliana landsberg
gaatgctacccccggtgagaagaagctgaggtccgagatgccggaactaaggctgtttttgttcctcagaccaagtcgttcacgggttagaaattaccttccatttttttttccggccttatcatttcgattaaatgactcaacgctccttgcctggtccaaccctttctttattctaacagcgatgaaaacagagggaaacgtctttcggtgcttcaaaacttgaaaagacaccatcctgccagcctttgataggtggcgtcctgcaattcgcaagcaattcctactccatgcccatcactcatctcgggttagttctcttcacccataataattctttaaactttaatcctccacttagatgctaactcttttttgttaccacttggttcaggcaaacggcgaactcaatgacatgattgagtactacgagagactgttgctagacagggaaaaggaggttatgacgtggaaagacaaatcttcgtcccttgagttcgatctccgttcttaaatgatgccaggtttagattgggctggtacattcctaaacttttgaaaccaatacacagcgaattactcttgtatttttcctaatccgaaataattgtctcaggccccagtgatcccatggaacccgaagcacccatcgtgctggtgacgattcccgaagcggtaaccatcccgccagaacttcctccatccacgaactcggagacagtggtcattggaagtattattaactcttaatctcaaagctcaagtatttctttacttgttcgtcaagctccacattttggaagtgaattggcccggggttcctagcgagcagcctactactggcgaatcgggtgagaataagacagttgccgtagatcctgaaccagctcaacccgaactcgaggtgcccgagaacttgtagtggatgtgtccacttaatggggattgtccattaaactcaaagtttattataattttttgaattattttacctgcctaggtaggctaaacaagtagtttgcctaaggagacttttaaacctttcttttaagattatggacccaagagggtttcctttgtgctaaatttaagtatggatttgcaaagtccatcttttaaatagcatctttgttaccatgtggtcaagttatgggatcataggttgatcagctaccctaaaa

SEQ ID NO: 22023 - DNA, 654 bp, Arabidopsis thaliana landsberg
tcttttacagccaaagcttggggggcttttttgatgagcaatcatgttagtgtttccttacacttttgctttcctttttctaaaatccatggaatccagacattgttttctatcactgctaccttgaacttgctgctcccttcttagaatcgggttgccacaaccgaatttcatggacaaaatcgtacatttctttacctgttgtatgctttctgattctttgttttctattttagatttttcgtggatctcatcttcatctattgctagttgctagtgtactatggattgtttgacattatttctcatgcttttgaggatactcagattctatcaatgttaacaaagaaaaatttattctccttcttttaccacttccatcttctttgtcttacatttggacattccatgtctttaccagcttccgcagggaagatgtccgtagagactttctcagtcacgttcagatggagtttcaaagaaaatgaatctctccattcaatgataatgagattaaaagaagagagtcatcagtatatccaggcgaatagagaatctaatatctcgctttctagcatcttgcgaacagatagtgaggcaaaaacttgacgttttacctgagaaatctctcatatcatcaatatcgctgatcaa

SEQ ID NO: 22024 - DNA, 1303 bp, Arabidopsis thaliana landsberg
tacctataagagggtatgaagctgcagactaatatttgtaatttttgttttatttacagataattaacaatttgggaacttagtgtgtttaaacataattagatgatgaattgctgcaagaaaccttaaaattaaaggaataacaaaaaaaattggagtttcttacaaagccaaaaaaaaaaaacgaaggaatatttacttggctctaagaccaggaacatttttgagacccatcttaccaaggataagttttggtatagctggaggattgtcaagtcccatactacgactaaactcgtttgccaactccacaagcctgtctttgtctcttccaatcatcttctgtgagttgtagtaacccaaccaagcctgatacgccgcctctttgttcctcatctcgacatggcaaagcgccttttgcacctatttgttcacatttcaaaaaattcagtttctcacacacatcaagctaatgaagttttttcaatttctaactaaaaagacttggcactggtagtgcattttagattccaacttctatctccttgaagcaaagatcagtgaaatatgaaaaagggttaaccttttttacagtttctgggtctattgatggcagaggagacttagtgatgggtaaatctttaagagatgatagaaagtattcctcccatggtgccaacaacaatatgccttctccttcctttccttttcgcccggttctaccaagtctgtgtatatattgttctctgtcttttggcaatccaacctgtagaggtaaatagatgtatacagtttctataaacccccaaataaaattttccggtttaagttgaggttgagttaagagttttacactattgtatgattgattttacctgtagaacaagggtcacgtcagggtaatcgactcctcgagcagatacatcagatgttacgagaatcaaacccttggattttcggaactcgttagaaacccttgtcctgtaactctgcggttttctagagtggatctctctcacgtttaagtttagctcaccaagtagatcagccactaattttgtaaccatggccgttgtacagaagacaatgaccttcaggaaccagagttaattcagtaagggaaaaacattagtcaccgcgctttgcaactgatgctggtaagaatttcataccttatagtctacgttatccataatgtgttcgcgaagaagtgtgtacagaagagagaaatgtatgtccagtgatgcaatcatgtgcatttgtctgacctgttgatgcgtctctatagtgcctctatgaacac

SEQ ID NO: 22025 - DNA, 589 bp, Arabidopsis thaliana landsberg
  unsure (1)..(589): unsure at all n locations
acacatattaaaaaattataaaanatcttattcaatctacctcttttctataaaaatatcatttattataattaattcaaccaataaaaaaatatatatgattaagtataattggttaaaaatattaaatacatttattatttgcataaaaagttaaaaactttcaaactacatttatatagatacagaggaagtaataaataaactaatctataaacaagaaatttattttagatgctcaattacatgaagataattttatttcattttcagttttacacaaaattatattatttcttttacatctttccaggacctccaaaatatatgatatgtccaaccggtaatcctgaatctaaatcttcgtatactttataactatgattattattcgagaatgtctctatattttttaccatcttatcaaccttaaaactctcatcaactaaagttatattacacacatgtgcatcgtccactggatctaacagtggaaaataaccatttcccatacgaggacccggcagagatgcgctatatacttctnctccccactcgacactgttagccaaactctgttgaaatatgt

SEQ ID NO: 22026 - DNA, 427 bp, Arabidopsis thaliana landsberg
ccatgatcctaagaccgatcagaataataagactaaaagtaataagaaataggagttccataatatatatatatatatatatatatatgtatagtatattcgagaaagaaaaacagaataagaataatcgaagatgaacaagcaaaacaagctactcgcgctcttgttttagctatagatgcattgcacatagcagcgtcaatgaacaaaaaatactcacgccctagccattcattgagtacatagtttttgtctatgttaaaaacatacgggaatcaaaggaaaataaatatttggtatacaaacgaaaacatctaataatgattcaagtctctcaatgtcatccaagtccgcagcgaatacttagttggcatgtgcttgaagctctgggagaaaagtgtaagctccttaagggtttggaacaaga

SEQ ID NO: 22027 - DNA, 6860 bp, Arabidopsis thaliana landsberg
  unsure (1)..(6860): unsure at all n locations
agtttatcttaattctgaagaagcaaaagaatattactttatcacaggtttaatatttattatccgtaacaacactttttgaatttatgcatagtatttttaactagagcaggaaggtagtcgtagttgttgataatatcatacgtgttatgtgtttttggattgttgtagcttaaagagagaagaaatttcttggaacaaacgggattggagttaatattattatcttcgtggactgtggtccattctcctctactcacactttaatcatatgatgaaacatctttgataaatttccaaatataaacataattaaaatcctttagtataatatttgcttccgggaaagtcctcaaaaagtcctattgaatgtgttaggtttactgtttacataaaacataaacctttggctacttattccatattcatcttcatcttcatcttcagtaggcttgttaactgttccaacggaagcgtgttcaagaaggtaccttgttttttcttactctgttttttggttcttgtgttacacgctacaattttgcgtagtatacaagaagtagaactgatacaaatattctggacatgactctaaaagacacaaattttaaaagttcaacaatcaaattttagaaattccattactcatcttggtatcacacaggaaagtaacaacagaatatggtttattcactcttgggacttggccttaatatgctacatagttgcagcttcgtctctataggcacatgcatagcgataggcttaatcagattggaagcaaaattgaaaattttgatatatagatatcgtttcttctacaaaacctctgttaatgaaattctccgatgtcatttcttgtaccaaatccgtttaatacgatgatgtcatttcttgtaccaaatccgtttaatatgaagtgcatcagttaaatgaaacttgtatatcaacatgaccgtagttgacttcagctagaggagaatccagagccaaaagagtttcaaacaacggatttaatccaatatcaggtaacaaatttttgagcacaattttatttacaaaattctagtgaagatgtgagctcataattctccacaccgtagttgaggtgatccttgctcgagttaggaaaggatttatggagaaataatcctcaaactgtaagaaacaagaaaataagtataatgtgaggattcagaattaaattgtaatataaataacacaagctcataacaaatgtgcatgctaagaaagaaacagagtacttaaaaagaaataaatgaattccatctgccatttttgagaattcttcattttgttaaaaccatttgcgtgaattccatcagtttttttttgtatccacaacacgacttgcatttgaaacaatttgtgttatatagtttattcggaaatagactaagttggtttatggactttgaaagatgcctaaaaactttgcaggtgtggctacaaagtaagtcagtcgttcgatttctctccataataggtgtatgctatacataacacttttcaactattcattaaaaaagagaactattataaatcacaaactcaattcgggttcactgtaaaactttgtgctagacagcaaattaaaggaatcgttatagtaatgaaataagcttatcacaaacgtgcaacctaagaaaagaaacaaaacattttaaaacattcacatgaacagcaacatcttcatctgccctgaagacaatgaagaatcttgggttctccttgttgttccatagaaccgacagcaaaactactcattccatcaccataaaagtatctcaaagattcatttctttttcacgtaatctgcaagtaaaagaaaacaactcattgatctatactattaaagatcctgatatctgatattctgttcagttcttgattaatacttaccttgtattgtgtattggttctctctgtctcaactgtcttcattctgatcaatctcattgcctaatcactgtttccacactcttcgaacagatcagtctcatttcttataccatcatcgtcactatccccatgctcttcactctaatcactctcattgcttatatcactatattcgcactcttcaaagtgatcactctccctacctatatcactattcatcactgtctcctcgctcttcgctctgatcagtctaatggcatccatcactgccttcatcagcttcacaaacatgctgcatagtgtttggattaccatgtcggttcttcgctgatgacagtcctctaagtgtcgtatttaccccatccgtttagtttggacgtagacaccctaatattacttatatgaagtgatatagctgcaaaagaatccagttgtcaataatgcaaaaagaattgagagatgaatagtcattatgttacaattattgcttaatgcttacccgcatgcgcttcgtgcttctctcagtttctacattgatatctccagactcttcactgtgttcaatctcattaacaagtccttgaagaggtgtataccctatattgccttcttcggcttcagaaacatgtggaagagtactgtttgaataattatcaagtcgagtctccgctgatgaacagtcctctaagagtcgtataccccattgtccaatatcactatatcttttgtctaattgctcaatctttatatccacatgatcgtagtagttccgttgagctagagcagcataattttcgtttagaggtatacggcagtccgtgaagattatattaaagccatcctcgccataaaatctctatttattagctttgaaatcaatgtgtatataaaagctgttcccaaatctgtctttgaactcacattttacctttatattttttccatgcttaacattagttaccaatgcgccaaccctaaatctgaagaatggttgggagaaagggacgtgaagtagaggaatggtcagagaggagcttccagtagtacggtaagtgaaatatgatggcacttcttctttccctgtaaataacatgcagttgaaaataattgattcttggtgatgaaggacagtttctggatccaagttgaagcagtccaagaaactgagttcgactttaggaagagaagaggaggctgtgtcaatattgtctgctttcatcatctccatcccacttggatatccactcaattcaactctagtcaatgtcccacaatttgaaaagaaagctttcttaagatgtttcagtttagaaatgtgtaggaacacacattttagcctgttgcaactgtccatgcttaggtcagtgaggttagagaatttctcgatccaccaaggaacctcttcaatcgctgtttcgtctagatagagcactgagatgttggttgagatttcaggaaagctcctcaactgtgagcatccactgaaacaaaggtaatcaagagattggaggttgattccggtgggcagagtctccagatttatgcattggacaatgaacaagtgcttcagttgattgagattctgaaatgaggaaggaagctccaccaaacttggcatatcacagagatgcaagatcgtcaaagtgggagacaacatcatcgccaggaagggcgtaagcggctgaaccaaataacaagttttacgggttttcagtagcaaattacttttaaagttaaatttagaaaataaatctttaaaaacgaaaagaataacagtactaatgtattatgggtaaatctcatcagcattaatataatgtattatgggtaaatctaaacaagaataaattgtttggaactttccattcacgctcacatctactctttattaaaaccgttattttttaattacataatatatgttattagaaaataggtaacaataataaattaagaaaatcccatatataattttcttttacgttttaatgatatcacgacaaaggaaaaaacccaattgatatcatctttaatttcttattttctttccatttttatctctttttaacttttttatttattttaaaaatcagatattttcttcttcattctttgtaaccaaaatttactttccaatcaaattaaaatattcataaataaataaaaattagtgttttttaagttttcacatacaagtgtacaaagtttgagtcaacgacaatgatttttcttttcttttataaaagtgttaggaaaagagtttggagataatgttaagtgtagaactacttaccttctcttcttcccattgtttctcatcactctcttcttttgatattctaaactcaacaagattctggagatgtaaattagaaggaaaatcttcaatgtttgttagatttagattgagaactgagatgttggttgagaatttgggaaaagtcttcaactttgagcaataatagagatcgaggcggtcaagagatttgaggttgaatccggtaggaagaattttcagacttttgcagtttcgcatgtacaagttcaacagcttattgagatttcgtatagaggacgggagctcgactaaactgtggcaatactcaagattaagtatttcgagattagtagccttggaaagatctggaattactttcaggtttaatgatccgcccagatccatttcctttagacatgtaagtggctgtatccaacaaaaatcaaacacatagctcaacagaaattacacatcatatggcactattgtcataaaaaaataaaataatataagaaattattctcaaaacttaccacatctccttcccatagcttatgtagcttgctgaacttcatatcgagcttgacaaggttttcaggacgaaaaacaaaaggcatacacctcattggaaatttggaccagcacaatagtttaagtgtaggaggcaaatagtcgaaattttcaggtatttgcaatctgttttcttctccaaagatatccgtaccaatttttaagaaacggagattacgcatccgtttgaaggcactctcatgtacacacaactcatcaatcttacttgtctccaatgatatacctaaaannnnnnnnnnnnnnnnnnnnaaatataatatcaatgagaaagagaaaacaatacaattatcttaacgcatattctgagttatgacttattaaaagaccacagattaaacttttttttatatataaaaaacaaaaaacttacaatgccttcactgagtacatcacaaatatcatttggatccaccagaaattctcgttttcggggcttgtcaatggactgtgtgtgaacaatttttctgcccatttcttgtagcaaacgatgcatctccacatgaccccatctcacatgaatgatggacttatcaaccaggttttgcagcccaacattagcaccatatatactatttgcgagcaataacttgatggttgtgacttccatatgattgagaatacatgcgatatgacgaaatatcgcttgatcttcactctctaacccatcatagctgattcttagtattccctcaattttatcgatcaaaccattttgaagccttggcagcatatttatccagtactccttatccttcccactcaaatacgaacccaaaaccttaagacccagaggaagactacctgcatatcttgcaacttgaactacaagcatctcaaaaccttcaggtggagattttttctcgaaagcagattgacataacattgcaagagcttgctcttccgttgggagactaacttcataattatgatcaatcccatgagcccttaaaaaatgtttattatttgtaaccacaatgattctgctcccatttccaaaccattgagttttacccaccaatgaatctaagatcacttgatcatccacatcatcaataatgataagaactttctggtgttgtagcctctctcctagtacacctagatgatctatctttatgttcggcatccttagaatttcagagaggaagctctcttgtaaatgtaacttcatattgtggtcgtcaggattggcactactatgaatttctctactcttataggcaaaagatctgtctatgaatttcctaacttggaaatgccgaaaaaggttgttaaacaaagctcgtgcaatggtagtcttaccaatccccgaggaaccccatataccaaccatcttcacttccttagattccagatccaacagtgcactcatatttgcaatatgatcctcgaggccgacaaagtcatcaaaatcctttgatgtagttaaaagcagtttacgcaaaacatcattggctatttcttcaatcatttttgcttcgtcatccctaataaggtgaaagataatttaagaaatatgaaacaacaattttatttcaagatgtatctaataatgaatttggtataaaaatcataccatttggcagaatcaaatccaagcatattagctacatcagtcaacgctttcttccattgatttttcacttcctctgtttgtctcttgcaagtcttttcaaagatacttccaaattcaccgatttgatacctcacttgggaaggatccacaccgtagaaaaccggtatgataattttatcattgcagttcacaatctccagcaactcgttaagacaccagctcgacgaagcgtagtttttggagaaaacgaccactgcgattctggagttcttgatcgcttgttcaagatcgggccaaagagagtggcttctctcgatctcattgtctctgaaagcagtgattagtttccgatcaagctctttgagaaagtggctacggaaagttacgcggacgtctccccctctgaagctcaagaaaacatcatataaccagtttcgagaagaagatgaagaagccatagagagaatgagaggaggaaactatgaacaaaga

SEQ ID NO: 22028 - DNA, 311 bp, Arabidopsis thaliana landsberg
attaggtctagcgaatacatgtttcgtcggtctaatcgcttttcttactcttttctcaaacacgttccactcaatcgtactgttcttcaacaatatgtccgaaagtctccgtttgttcggtcttatcgtcggcaatttccctcctccgtaataaatccgataacccgatacaagagatgataactgactccctgaatccggcatcgcaaaagcgtctgctgcagcacaagcgatgaaatctaatgccgctagctacacataaaccaaaggaaaaaaagattaatacaaaattgggttttacttaggatttg

SEQ ID NO: 22029 - DNA, 1536 bp, Arabidopsis thaliana landsberg
tccctttcatgaagtcactcatctttttctcagagaaaggcagtttatttacggtttttcccaaaggaatacaaaaaataacacaatactcaaccaccactgagcttcccgctcctgtggccttgttttcttttccgaaccgcacttacacacacatttccctgttcacagaggtcgtaaaacactaattgtcataccacactagactcgtccataccagtggacacggactattcgaataggtttgaactctgcgcagaggggtacactttacccactagtccggtttctgtgatctcaccgtcgtgaggcccgaatgccggatctctttctttcctcgcacgtctaaccttaacggttataccggaaggagtcaggccaccgccatgtccaaaccggacaaaacattccccctccttatcctcctggtgctccccagccttcataaccctagggttggaccgtacgagttcggattgagtgactgcccacacagtctcgagtggttgtactatttatgagtacaggtagtgaaagatgacaaaccggtccttatatgaggggcaatccttctcgtcacgcctaaaccagctgagccaacaccttaggccctcccctaaaccagggagtccctgattatcccactcacaaggtgataaggtgaaaacccttcatcatacacattttgaaaagcattttcttttgaaaactcacacctttcctcaaatcatttgtaacaaatatatcagggattgattgcggcaagcggctgggtggccataataacttgtctcaaaatcatatcatgcataaaataacaggctgagggttgtggttgaaaaatcataggtaatttatgcatcaaagggatccagtgagcttgccgtgcttattcggcgaaggggaaggggagctcgcggaactggcttctggctccaccgcctagcgtagacttgcagatctggcctccacgagacggcacgaacgctccgataactatgcaacatgaataagcaaacatacaaacaagcaagcataccaacaaatatttagtatagtggtcagaatagcgatatatggatgggtagagtcttgagtagaatctgtgtcatgtggtgttgtgatattactggtggtggagcggaggtgcttaccaggagggtggactggaggcgaagcgacactatgtgtgtagctggcagagcagagtaactgagtgggtggggtgtttgccttggctgagggtgttgagtgtgtgtggagagggagagggtagctgggtgtatttatagctgggtgtatgtggtgtagcacagtgaagttcactgttggtgagaatagtgacgaatgaatcgtctgacttagtccgaacagagagattataggcagaatatgggataagagtattttaggagttttttggattatgaaccatgcttatgggatgacatggttggatagggaataattcgataagaatttagaaacgagaataattggaatctgagtttggaagcctggttcgaaggaatctca

SEQ ID NO: 22030 - DNA, 623 bp, Arabidopsis thaliana landsberg
cagcgggggatatcattgcatcaagaaaggttgtctttatgcggtgcattcaaaatgtgcctctcaaccttatgtttgggatgggatagaacgtgaaggagagtcagaagatgaagtggaagaacttgagccgtttgtgacagtaagagatggaatcatacgacatttcagtcatgaccatcatcatttgacacttgatgagaacattgacagagattacaacgagaataagttgtgtcaagcatgcatcactccgatatatttcggtaacttctactcatgtatgcaatgtgatttcattcttcatgaagaatgtgcaaaactgtctcgcaaaatacatcacccagtacatccacatctgcttactctagtgggaagatctgaccttgttatggatgctacgaaatcatgttcaatttgttcttggaggtgcacaactggtttcttctatgagtgcagtgaaagagaatgtcgttttaaggtacacgtgcagtgtgccacaatttccgagccattggtccatgcaagtcatatggatcctttgttcttaacatcgaaaccaggagaggaacgaagatgttgtgtttgcaaagagttaggacattgttccacaaatgaaaccg

SEQ ID NO: 22031 - DNA, 933 bp, Arabidopsis thaliana landsberg
  unsure (1)..(933): unsure at all n locations
ctctcccctactgcccgggcccctttcgggtaaggtagtcttccactagctttcctaattagtcagccaagggcgtcccattaaacccttgtggtagcactgttttcccgggtggtcgctccatgttcccattaatttaatgatcttaacatgaacaacaataataacaagataataacagagtaatcatgaataatgaatctccatacccaatccacataaagcaatagcaagtactacccaaaaaaaatattccaggggtgaacaaggtatagaggtaatcaaaactggggtacataaaggttcccatcaaaattaacctatgcagatcattaaaattaataagaacatggctgggaaaagtaagtgatcaagggcacaacttgcctgtaatgagctcctgctcagctatctctacttgttgaagctcaggttccacagtgggttgctcgtatattcgcatcaacacaatacatacatagtttaggggaaatcaacatcataccaaacatgtaaataaaatatatagtaaaaatatacacattaaaatgaaatcctaggaactggaatcactaaatttggagttatagaactcaagttatgaattttctaagatttaatgtgattaaaataggattatatgttaaattaatgttcttactgttttcatgccaaaacagagacactaaatggtagtgaatattattacaaaattttagaaattggaatggctaaatttggagttaatatgaattttatatggattatacaattcctagcacttttttcatattaaatctattttctaattaatttattcaatttacaacaggctctggactgtgcgcccatttctggaaaagtcagggggggctggcgaaagttntccgagactcagtgaatagggttctcaggatggcgggttgataccct

SEQ ID NO: 22032 - DNA, 677 bp, Arabidopsis thaliana landsberg
gtttgataaggactttgtgcttatttgaagtaaatgtaacccacagcccacagacatgaaatatggacaaaatactaggcacgtgagtgatgtttgaataatatcttgcaaaagaaagttaaaatgaaacagaacgtattttggaatcatatgaaaagaaaagtaaggaatcttccattactctctctcacttctctctctctaactctcaccaagaacccagaattgagaataagaatctatagatcattatgctcacctctctgctcttgtttaagtgatgagctgaatctaacaaacgttcacacgtgttaacacccacacgtgcgacttcttctttattctcttcaaagcctcttcttgaactagaagtttcttttgaacatgtatagtccaaatactctagttgctttagagtcattgccaaacttgaacttgttttatccttcttctctttcattagcttgagcaagctgaagcttctttgtgctttctccaagctccactttaaagttgaatcatactcaaacatttactgacataggactgattcatagaatatttaacatcataaggtagttttgctactgacatcaaatttttattcttcagttgagttttgattacagtcatggtgtggttctgagagcataacttggagaagaaaattattttta

SEQ ID NO: 22033 - DNA, 561 bp, Arabidopsis thaliana landsberg
  unsure (1)..(561): unsure at all n locations
agaaaatagacgaaccaatattttaataaatgttgttagaaaatcattgttaatttttttactccaaaaacaaaaaaagggttaagataaaatattcatttttcttaaattccaattaaaatggtttaaactaacagaaaaatagttttaatgaaacttaatattttataatttatttctgagatggcaaacaccaatttttcaatgacagtttttataaattttaggtaatataatttattagttgacaaaaaggtaagaaaattcattattttaatgaaaaaaaacaaatttaggtaaattacaaataactatttttgaaaaaatgaagaatctttatacataataagcactataaactcttttttattacataaaggattaccatatatgnnnnnnnnnnnnnnnnnnncaatctaataataaaattagcttctacaaataaattttacaaattatccacccataatacgtttactatacataatcccaactaatgaaccaaactcaacaaaaaaaaatccgattattcttcaaacanaacctcaaagaaatgaataa

SEQ ID NO: 22034 - DNA, 975 bp, Arabidopsis thaliana landsberg
  unsure (1)..(975): unsure at all n locations
tgttgctcttgtattggttaagtcttttcctgggacaaaggtgttctggctttgtccaaagtttctcccgagtcaggtcgagttaatccttggatcatggtcgggcggctcggatcaggatagccgaatgacgttttcccgaggcgcttcgagacccgcctgggatgattttccgagttggtatcagaggcacttcgaggccggatctgggaggctctctgcagtgatgcccgaggcgtttgaggctggctcaggatggttcttcgacgtgacgtccaaggtgttttagggtcggctcgggatgattctttggagtgatgcccgagccaatgatcctggtcggctcggttacctggatgaaatccgaccccaacagtttgccccccagcttattgactccggcaagggaggcgatgagcttcacgagtagatatccgagccgactattcatcttccactgtcgtgactttggcggttcatcttcccggacggtcaaacttccgttgcatgcagccgactctttcttgagaagcggaaacgtttttcgcttattcccgagggtcacgcggacgtttctctttctgccgagcccacgcgcttctaacgcgtttcatcatttattgcggacacgacgcgcctttaaaaatcttatatatagcgagccatccctttgagaatttctcatttgaagtatttgaagaagaagaaatcaaggtttgcctccttctctctgatcttgatattcttattgttttctctttttccggtgaagctccatcgtttctttgttattttgattttgccgattagaacattttgatgtttcctcgtcattcctcatctcgttagacgtctccgagccgagaatggattctaaatctccttcaaccccgagcgcctttctcttcgactccagtgattcgaaccatccagacgactntccctctatctacaaacagagggcggttttgacgt

SEQ ID NO: 22035 - DNA, 542 bp, Arabidopsis thaliana landsberg
tctgcttcacacgggccagatctccggcgaacaagagcaaggagggcagacgagcagcaagaggtttgagaaggcggttagggttttcgtggagcgcggaaagataaagttcaaaacgcgccgccccccgtccccttttatacacagggcgcggcgcttcgggaaacccgcaatccaacagtacgacgtcaatcaacggtcatgtcaaaaacccccgcggaaccatttcgagcgagggcagcgtctccgccatctagcgacgtcttcggcaccaggtgacttagtcgaattggtccctcggagggcaaatgttggggcgaagcgaagacccacccttcgctcgaggccttcgccgtactcgctgcaccaacggtgacaagacaacgggcagacttacccttcgtctcatacgccgccggacgaagacctgtgacgacgtcgtctcatcctgcgacctcgtccagaatggagcccgcgtgcgattcggccattgtaaaggcctgcgtagcgttgcgcgttacgggctaatttgagggtacgag

SEQ ID NO: 22036 - DNA, 549 bp, Arabidopsis thaliana landsberg
atggttgtaaaatgttttaaatttattttaaagtattttaaaatatctaaaaaggttttgaaactggttttaaagtatttactatttacgtatgtatttaaagactttataaagattttaaaaggttttaaaataatatactaaggttcttaacaactatacaaagctttttaaaaatttacaagagattttttaagatatttaaagggttattaagaaatttataatgatttttaaatgcatttttcggcgggaaaaaacatattggcgggaaaaataaaatttggtgccaatgctttcagtttctaattaaatgttctcattagatgaggagtaatttggtcattttgtttaagaaaagaggtattttaaaaaatagccaacggaaaagggtattgttgcaaaagggtagtagaaaaattgtatttttgcaaataccccaagattttcctacatatttctgaaaaatgagatggtttttttacccattttttctgaatatctttagacaacctacataacatctttttttactaaactatgtgagct

SEQ ID NO: 22037 - DNA, 919 bp, Arabidopsis thaliana landsberg
  unsure (1)..(919): unsure at all n locations
ctctcagcagaattccaacgagcctattatcgttatcatatggaattcccacaaggacttcgtattctccccctacggaatctgtcgagggcttgatctgctttaaacaatcagcaacgccgacagtttggaacgctagcacgatagagctcttaacttatgaagggtgattagcttgtgttgaaaaacgtaccatgaaggatggtatccggaagcatagtatcacattgtggattttggctgacgcagagaaacacaagtggtcgagtaaagatgttcttgtactttctagtcactatgatggaagtttgagaacatgtttcaaactaaaaggttgcactcataatggtgagtttatttacgtatcgtccacgtttcgaaagatggagaagattcaaacttaataaaagaaatcgcagatgacaaatctaggcttagtaacaaagttccaaggctccatgccttcctcgatcacaatgagagtcaaatgtctttgtcataatttaatttcttggtttttttttccttaagaataatcttctttttttttggtcaaagtaaaatgatcataaatgatagaatgatcacttgtgcaagattatgattattattttcttctaagttctccttccttactttgattttattacgtgtaatcttcctcccttgccaattccctactgcattttacaaattcatcataaccgttcaatagtagtacctctcttccttcttaatgactttgacttgcaacttgtacagtataataataatgcgcttcaatatgttttggttcttttctttggcatacttttctcttcttctctatctgttgcttattacattagagaactacgtttgttgaggaggacaatggtggaaagtgcaaagccacaaaagcgagactatatatncttag

SEQ ID NO: 22038 - DNA, 1258 bp, Arabidopsis thaliana landsberg
  unsure (1)..(1258): unsure at all n locations
taattagaaccaatctaatctcaactgtccgatgcaaatccaaccgctcagacccgctcccctcacctgtgctctgtcgctgggcccagcctgtcagccctacctcgggtcgctgacaccctgagcccacctgtcagcgctcgtcgcgcatccgcgggatctgatctcggtcgttgatttaagatctaacggcagagcaggcccgataccccttcgcgtggtaaaattgctaaagaacccctcggttttccgagaatcaacccgccatccttaggttttgtgcgcaagccnctgaactctaataaacagacccctggccttttaaataatcaaagaattggacctagttttatatttcaaacttcaaaacttgtttattttatatctttttcatatgaactccaaatttagtggttcaaattgcaaaatattcataggaatattctctattcaaataaattagttccatttacattctatgctttctaaatttatggttaactatgaactagtatatgtttagatttgtttatttcataaaataaaaagggaaaccctagagattaaaacatgtttaatcttgtgagattaataatgtgtattacatgaattcatccctggtctaacttttaggtcacaacaaaataaattgaactaggttatgtaattgtgggcaatacttaaaggaataatcatatatttctaaatgaagttagtttatgttataactcatgttatactttgatctcattaacccttatttagtattgtgtctttttaagatgtattcctatctttgtacatgtttggtgcgctgttcaattatactttccaaatgtattgaattcatgcttgctttatttagacaacgagcagtccgaggtgcatgagtgtgttgttggagaccttcctgagcaacaacctggtgaaggcaagtgtcctctgacccattatatcatatctacttataatgcactgtcccgcattacttaattgaaacctaaggattgactagctcaatactataccttatcctcgatgacctgttgggatattatggttagcgttttgctactgcttcaacctaatgcaatgactttgatgtgactatatatgatacgatactgttatcctgatgatattgatgatctaatgatactctagccggctcaaggctgtttcgtagagtacctactccgatacatgggcctgtgtctgttgagagaccacctcgagataacagtgcaaccactgaggc

SEQ ID NO: 22039 - DNA, 536 bp, Arabidopsis thaliana landsberg
gggggtctatgtggtaccaacattggcaactactttttcttttccgtatctattgcctggcttgaagtaatacgtgtctccaagtacacagttgatatggagtgtattcccacaatcatcacatccataaaaccatacactcggatctgtttttccctcacaaatatcacaccacaattgaccgctggagttttcagctccatgatgcaacgataaaaaatgatcgtcgcatctgtgttttatttttcttggtaaaagtggcacactccatgcctaaagcaaactcacaaacaatacaacttaagacatactctgaatctttaccacatgctccacaagtcttacgctctgccgaggtacgatataagggatgcgggtgtagttcatgatgaaaaggctcggaaatggaaccacaccgcgtatctagtgaaaaaaaaccgttacagcgtccactggatttacattcgtacctgaagccatcgaagaattgatgacaatagctacactcgaaaacctctccggcttaccctgaatct

SEQ ID NO: 22040 - DNA, 613 bp, Arabidopsis thaliana landsberg
  unsure (1)..(613): unsure at all n locations
tttacatcacttggtggtgatatagaaaagagtgttagagccagtggtggtcctttaatgttccatattcacggagagaactaccataggatagggagtttgagaccagacaatcatatacctccaaagttcatgcagttatatattgtagacacagaaaatgaagttgataacagatcggaagcactcaggtgactgcattccttatagtgttactaatgtttttttatataacattgatgttgttttaatattggttactgttctaaatttgacttatttgattcttatcagtaatggtgctaatgctgacaagtataaaaagaaagagttgagaaaggaaattattgatgttgtgatcaaattgctgaatagtgtcaacccttacgtatcacacttacggactgctagggacaggttcaatgctaatccagaacagactttgcatatgagaatagttagtaaacgggaagcggatggcaaggtgtataatgtacctacngcatcagaggtagccatgttgattcctggagacttcactatcaatatgccatgcaaagatatagtagtagaagagaaatcanggaaactacaaggaattagtgaaattctc

SEQ ID NO: 22041 - DNA, 570 bp, Arabidopsis thaliana landsberg
tcaaatcaatgaaataattaaacaaaggggaaaaggtctaatttcattcaagagaagtaaaaagacagaagcgaagctggtgttggttcttcggctctcaaatccaagcctccttagaagaatccctcctaccattcacaatctatcatctcctctacttttgctatctacattcatcaatgacttcctcatgagaccccaccaagaactctctttagctcgaatttctgatccgatgtgagcctcgacgggtatttcacactaagcttcagtttcaagttacccttttttccaggttctttagagataggcattccttcgtttggaacaacaatctcatgatcaggtttaatgatctccgtcaatgggatcatgagagtccttccatcaagcgtgatcagattgacagtcttaccagttaaagcttcaagtagagttatctcctgactgaccaaaagatcgttcccatctctcttgtaaacaggatgtggcttctcttcaaccacgaatacaatatctgctggtatgattccaggctcttcattgcctttcttaggaaatgtcagcttt

SEQ ID NO: 22042 - DNA, 424 bp, Arabidopsis thaliana landsberg
ttgttggtttggtttggtgtatgcaagttttatatatggtgattcttgattatgttcttttcaagattcagaagaagcggacgggaaggataccggaactggaatctacgatatctcagcttcaagaagagcttaagaaggcaaaagaagagctaaacagatcagaagcattgaaaagagaagctcaagaagaagctgaagatgccaagcatcagttaatggatatcaatgcctcggaagattcaagaattgaggagctgcgtaaactctcgcaggagcgagacaagacatggcagtctgaacttgaagctatgcagagacaacacggaatggattctaccgctctgtcttctgccattaacgaagttcagaaactgaaatcgaagctctttgagtccgagtctgagtaggagcagtctaagat

SEQ ID NO: 22043 - DNA, 596 bp, Arabidopsis thaliana landsberg
agagatattgccaaaaggaatcacactgagtagaaaataggctctctctggaggtatttttttctcgcataacattaagaaaaggacattagagacctaccgggctttttcttgatgctggttacttctttttcaggtggtgagatcgtcttagtcgtagaagtagcagcttgtacgaagttaagattctgaaccataacctgttatgaacaaccttcacatgttatcaatgaatcaaaggaacatgaaacagattacattgtaagaagtgtgtcacctgaacattggattgagaatatgtcacatttggaggaggcgaatcaataaacagcttcccggaaacatgaatccgatcttctttctttacatgttgaactgcaattttagctaaatctccttcgaatataatcggaatcctgaaaagttgtcaactttgattaatctataacacactcatgctttcaatgaaattcaataagcttaaaagcaaaatgtaccagaaattagatgattttgaaccagaacgctgagaaataactgttccagcccagaattttccattcgagcatggaccgaattgaactgtttgttcaacg

SEQ ID NO: 22044 - DNA, 412 bp, Arabidopsis thaliana landsberg
ccattctagcttcattgcacacacttgagccctgtttttttgtttcctctctgcagaaactagacgatgtacaagagtttctgaaggtcccgaaactagatttaaagagtaggcaagtgaagattcatcatggtccgttgtcacaacacgtacaaaattgggaagaggtgcaaaagacactgaaagggaccggtttcgaaaactttctacttgaagattaccgcaggtgaaattaacactaggagagagtgatgtacataaacctctctcgcagaaaggtcagaccaacttgtaggaaagttttggtagtgccacgaacaggttttgcaagtctttttattttttagattttctatgtttttctttccacgtttatagtttctttaattctttttattttcttttaatattg

SEQ ID NO: 22045 - DNA, 535 bp, Arabidopsis thaliana landsberg
tgctctggtgatacgatgaagatgacatgaacatcgtcttcaatgtaccacaaagattctatcttttttcttcatcttgtaggtctatgatacgattgatgtatcaagaagtaatgacgcacgtgagagggaagctttcttgaaaaagaagatatctctaggatctaaaagtatcttcaacaaactctgttgctatgatctatctaaacattcttgcactacttatatgaaataaatccccaaattgggatttatctacaatccaatgccactggcatttaatattttgacaaatttattttcaaatctaaatctaaatcaattttgttactatggctatggcattaccagattatcagaggctatgacattaccagtgtattatcagtggctatggcattaccagtttatgccatgtcatgttttaaactcacacagtttcaatgtcgacagcatcacaaatgcaatgacgagtttctagtggaattcatgtgaagatcatcggcaaatgcactgggtctcatgggaaaagatg

SEQ ID NO: 22046 - DNA, 3084 bp, Arabidopsis thaliana landsberg
  unsure (1)..(3084): unsure at all n locations
gtctattcattctaaatttgctatatatatatttatatatttcaatttaatgaaattatttcttccatttttttttttttaaaaatggaacccttaagcattttatagaaattcaaacctaaaaaatcggaacaattgaacaaaaacatgcaaacaaacaaaaacgtttgaattggaatttaaagctcccactactatatgttaaagtggtttaaagtacacttcctgggcccaataatacatttaacgggccaccaaatactagtttttcactacgtgtgcatcaccaaatctttaacgttcgctcaccaactttttcccccataagttttggtcttcgtcgtacccaatttatttctctctacccgttttttctcttatttcaaaaaaaaatgtctccctcgttttgctccggccgatgcaccgccgcgctcttcctcgttatctccgccgttccaatagcttacctcatctccttagagctagctgttccttctacacacgtcttctcttaccaaagctccggcttcttccgagagtgcgccaaatgggacgatgttggtcggagattccttgtctccttcatggacggtggcggagtcggcgagattgttcctaaagactccgacgacgttcttgaagaagtcactttggtcaaagacgttgacctcgccggtaacgcttccctaggaatcgctatcgaccacgtcagaaaccgtctccttgtcgccgtcgccgacttgcttggaaatcgttatagtgctttagctgcttatgatttgtccacgtggcgtcgtctcttcctcgccgaacttagtggtcagagtaagattcttaaccgtccgatttcatcaactctcaattagatccgaaaccgaaccgaaacgaaccaaaattcactatcctaaaaaggaactacatctttatctatatggtttaaatggatttatttttctaatttaagaaacagaatccgaatccaaaaccaaacagaaacaaataaccagtctaaaccgaaccgaaaccaaaactgtaccaaaataatccattgtagactaggtcttagtaataaacaaaaaaatgttcaattcgaataggttttgtgaaattattggataatggtttaactctatatgaatatatatgatcaatgtaggtaaagagaaaacatttgcagacgatgtagctgtagatgaacaaggcaatgcttatgtgactgatgcaaaagctagtaaaatatggaaagttgatgttaatgggaagcttgtgaacactattacaagtcctctctttacaccacctggatggtacaataaccttgttgctcttaacggcattgtttatcaccccgacggctttcttatcgttatccatactttctctggttacttatacaaaattgacttaaccaatggggatgttagtaatcaagttagtgtcattgatgtttctggtggtacattgaggtttggagatgggcttgagttgttgtctccaaccaagattgttgttgcaggtaaatctttaacatctttagtatagttatgatttttaagcctatgttaatgaatgtgagtgttttcaggtagctcgtctacaaaactggttgagagttcagatgggtggagaaccgcttcggtgacgggttggttcagcagcggtatggttcatcgggtagtctcgtcggctacagtgaaggaaggaagagtttatttaaaccatattgttggatttgggtctaaaaagaaacacgtacttgtagaagctgtgttttagagtcctcttagttataaatcgcttcttaaattgtgctaatgatctcggtatgattctattgagatctgatgtaaaacttttttttatcatgttttatgttgatttttcattatgatcttacgtgttgaaatttaacatatatatattgtgtacatagattagttgtagatggtatgtcgacgttatcgaaaattgaaaatttgttcaatttttaaaaaaagttggtgctgcaacgcccgacacacacacacaaaaaaaaactcattaatcttactatagttttttgtatatgaaatcaaatcttcaaattaatgattgtgtccggccggcacgttattcttaaaatcaatagttgcacttaacaatcaaattatatcgctagttcatacttccgcatgttttttgtttagttaaatatggaatacacacttgtttttcttataacaaatatcgtggaacttttggagcggatttgggatgacgtcttagattatatagaaaatagaagtagattttgactgaatatcatcaatgaaaggaacaaagaaaaatatttaggttgatttgatagctaattaaactagatgtagactgatttatataacaatattacaaaacaatgatcaacaataaataaatgtctttctaaaaaagtttatgaataccaactaaactggtggaacaaaccattattgtgatgttgtaaatttgtaattgactttttcgataaattaatcgaaattgannnnnnnnnnnnnnnnnnnnnnnnnnnnatctaattaaaatgagaaaaaaaaagtagtggtagtaacttcgtctcgaaccatgcgcgggattaaagagagcgaattatacgatcactatggcaagacacatttaattgaataaataatactagatttgcgcaaaatagttgttatacattttgaacaaaatatataatataaaaatcaaataatatttagatccgtgatgtactacaggttgaatctatagaattttttagaggaagtaaaaaagaatcaaagtctaaagttaaaattaataccttaaattttttgaaaccttagagagagtcttcttcccgtaaaaatatatattttactttatacacagaaagtataatattttctatgattttttggcaaaaaaaacaaagaaattgtatcacggaatctgcaaaacaaacatataatttaaaaaatatttctaaaatagttatttaattgatcgtaattaatatgacccctcatgtcttatccgttgatttatttttggtgacaatccacaaaaatcggccataatctc

SEQ ID NO: 22047 - DNA, 1439 bp, Arabidopsis thaliana landsberg
tcgcgaggtatggagttcatggggtgatctctttgaatcgcttggtggactcttgggtgaggcggtcttggacctattcttcttgatcatcttccttgtcttgatcattgtcatctctcccttgatcattgtcctcctcttgaggtggctcatcttcttgatcttcttcttcattgtcttgagcttgatcctcatcttgggttggtggagatgcttattggaagatgatggttgatcttgtgcttgtggaggctcttcggattccttaggacacacatccccaatggacatgttccttagcgcgacgcacggagcctcttcatcatctagctcatcaagatcaacttgctctacttgagagccattagtttcatcaaacacaatgtcacaagaaacttcaactaatccagtggatttgttgaatactctatatgcccttgtttttgagtcataaccaagtaaaaagccttctacagccttaggagcaaatttatattttctacctcttttaacaagaataaaacatttgctaccaaagactctaaaatatgaaacattgggctttttacgggtgaggagttcatatgatgtcttcttgagaattcagtgaagatacaaccggttgatggagtagcaggcggtgttaatcgcctcggcccaaaaccgatccggcgtcttgtactcatcaagcatggtcatcgccatgtcaagtagagttctattcttcctctccactacaccattttgttgaggtgtgtagggagaagagaactcatgcttgatgccctcctcctcaagaaagccttctatttgagagttcttgaactcggtcccgctgtcgcttcttattttcttgatccttaatccgaacttattttgagcccgtctcaagaatccctttaaagtctcttgggtttgagatttttcctgcaaaaagaatacccaagtgaagcgagaataatcatccacaattacaaaacagtacttactcccgccgatgcttatgtaagcaatcgggccgaataaatccatatgtaggagtgagagcacctagatggggggtgaataggtgatcctgtaaaaacttaaaacttaacaccacaaacttgattaagagttagaacaatgaaatcaagtgagtagagatgagagctcttgtgaagcacaatggatacagtaaggacaagcacaagagacacgaggatttatcccgtggttcggccaagtacaaaacttgcgtactccacgttgtggtgtcccaacggacgagagttgcactcaactcctctcaagtgatccaatgatcaacttgaataccacggtgttcttctttactttactcctttcccgtttgcgaggaatctccacaacttggagtctctcgcccttacaataagaatcaatatgaagcacaagagtaagggagggaagcaacacac

SEQ ID NO: 22048 - DNA, 515 bp, Arabidopsis thaliana landsberg
ccaatcaccattaagaaaatattactcgattgttgcatttagttttaattttaataactgaaatccgacgggattacttaccaaaatcggaattttagcatttagtttttgaattttagatgtacactataaccccgaaaatagtaaaacaattatgtgattatgataattgtattaggaaagaagatttctcattattaattattgattaactgaatcattatctcattaacaattaaaagaagatttactagattagttagtagttagttttaatttttttatatactaaaaatactattcggaattcagtccaaatagatttattagcattagttttaaattttagatatacaccataaatccataaattagtcaaaatagtgatttatgataattgaattaggaaaaaaccaatgcgattatatttcgagcaaatttaaaccgccactttaattttattaaacgacgatttcagtccactttatacaacctaaatttaagcttaaattatt

SEQ ID NO: 22049 - DNA, 851 bp, Arabidopsis thaliana landsberg
  unsure (1)..(851): unsure at all n locations
cggctggtattcaaggaaaccctaagttgttgccgactagacacatctcgttatttcaaagaagaatcttcttgggacatggatatttttgaaattcaaccaaaaattttccaagaagaatcttcttaataacatctatattgagatctatttacccgtctgaaaatgatatgtcatataatatttagacatcgcactatcttgtttggtaacaaaaccaaacatataagtcaaaatactacttataagataatacgaacattagttatagattatttcagaacattggttttacattacaaaccaaaaccgagaggtcgaataatacgaacattattttgattactaattgatcaagacaaacaacacatcaatttactacacgacaacataatgcacattttcaatcttctaagtcggtagaacctgcctcattagcttcctcagcggccaatctaaattgcaatgtaaacaaaatacacgttaaacatttttgaattagactttttaagatatataaagcagtaaactatgcaaaataatacatacatctctaagaattctccaacttcaggtatnnnnnnnnnnnnnnnnnnnnnnnnnnnnnnnnnnatggttcgaacaacatttcgtcatgcataccattatataataatttatgttatcgtaaagatgtcagtacaaagatcatatttttttgtgaataagagaattacgtaaagatctatgagaaaatagagaagttctatctattaaaaaaattatttaggggagttatccgcgccttgcgcggccaagaattttctttcaataaatttttaatttcactgatagacatagttatgagatta

SEQ ID NO: 22050 - DNA, 1780 bp, Arabidopsis thaliana landsberg
agctccttattctcttgcaatgaagaaggtgatctggaatctcctcctcggactctatatctccattatccaagttattcgtgacatttgtatgatgtcctttccctttcccttgacatttgtaacacctaacatcacgaattctagatgtagaaatttcagcctttcctttgtaatcttgaactgcggcatatggttaatttcagcccctgaactgacaatcggcttatagctgctggttctctcctctctttggtaagtaggcttaacaacggttcctgaaccataactagatcatgaagaactctttgtcttaacttgctgctcaaacaaaatcgccttgtgcaacatctcttctatttcaacatagtattgagtctccaatctgttttgaatatctctgttcaaacctccaagaaaccttgacatagttgcttctctatcctgggaaatatcagcccgcaacatcaaagtttacatttctttgtagtactcttcgacataacggttcccttgtgtaatattcctcaacttgagatgcagctcacggtggtagtgactagggacgaacctcttcctcataatagctttcattccggaccaagattccaatggaagttcttgcttacgcctccgtgaagtaactagttgatcccaccaactcaaagcatagtcataaaattcggtagcaacaactcttaccctattgatcgcggtgtagagttgaaaattgaaaaccaattcaatcttcttttcccattccaaataagcatctggatcattttttccatggaatggtggaattttaagcttaagacctccaacattgtcttgcaaaagatctctaccttcattagcacgtctatggtgtctcctttgactattgcgagataaagagctcctatgcccatagtactgatctgtagcttcatctctttgctcaagctgctcatcaactcttctttgtactcgaggacgagtctgccctaattctagtttctcatgaaactctttggcgaaaagcattaagtttggtgtccatcattttctcaaaggcttctaccaaaagtttgttgtttcgttgctagtctcttcctccttagattcagccattctttttgcaatagagacaacaaaacaacaccagtaacttgttcttttgaaacaaacacgaaatgacccttcagatgccctagaaccctaattacgacagtttcatttgttcggatgctaaacattatcaaaacgttcccaaacattccagaaacaattttacaaaatactagactctgtttcaaacctgtgacagttgatttcgcaattttagcacgcacgaaataattatgaaaattaaatcaaggtgacagacggatacagatctgaagatgaaaagacacaaaatgatagagatagagaactcaacttttagagtgtgctctgataccacatgatgagatcctcccaaggactcggcactcttaagttgagcaaaggatagtggtggctgtgaagccgtgatgatggatagatttgaatgaatcgatggatatcacagaagcttgcggaagggcttcaagatatcgagacttagatcctttggatatgcgcaccaaaaaagactaagaattttgctggatatacacactaacaagatgatcttcttataaaaggtttttgattaaaagaaagataagttctcaaaagagaataccagacgcatattaagagaaggagaggggaagatgaaaaggcaagtcttggaacatactccaaccaaggc

SEQ ID NO: 22051 - DNA, 1758 bp, Arabidopsis thaliana landsberg
atgagttatctatcttcagtttcgtgaatatggctaatttgtgcccttttctttcactacagcgtttgacaacccttattttcgacaaagctgtccttgagccgaccttttgccctatgtacgctcaattgtgctttgatatccgccacaaaatgcctaggtttccaccttcagcgcctaagactgatgagatctcattcaagagggttttgctgaacacatgtcaaaaggtgtttgagagaactgttcttaagtgaggagattagaaagatgaacgcgccagatcaggaggccgaacgggaagacgaagtaagactgttgaacctccggactctaggaaatcttcgtttttgtggtgagctttttttgaagcggatgttgacagaaaaggttgttttagccaccggtcaggttaggaagatgactgtttgaatatctctagttccggtcagatgggactacatgcctaacacttgtgttagtgtgttataatttaaatttacttttaccatacagaagcttttggaggatgctgagcaaatgtgtccatcagaggaaaaaattatagctatttgtctctttctcaacactgttggcaaaaagctggattcattgaactcataactgatgaacgagattttaagacgtttaaagaatctgtcaaatcatcctcaattggttatgagcttaagattaatggttgggaagatcatccatttgcactccattggggtcccagcgcgaaagagttgttctaatacccttgaaaacatcataagctttctgagttacgagattaagactttgttttgttgctacttacaatatttttttttaattcaatgttaaattatattcaaaaaaaaataaacgtttatatatgtgaatgcaaagttttcttagcatacagataaagtccgatcctataaacatgtgggaggactccaagtgtggttatatcctcggtattatcttgatgtgaaccacacttggactcctcccacatgtttctctaccttccttttccttagagtactcaatcggtttctcacatttttatcaatcaacttgacaatttttccgttgttgagggtcgctctccgtgtcattatcatttctctccctccatatagaatgtatcgcattctaaaacacaaacctaaggatgaatctcttagtgtttcatgatctttgctttttagttccttcatcacttctagccttaatgatagccttaaaggcaaaaataattttgtttgaatccatggatgtcatcatatgagaatgatagaattaataagatttctggaagattcaatgctaagttaaaaaacgaaaaccaagcatcactcaccagtcacgaagatgatgattcgagcacataaatctcgttttttctcgacaactatgtttactctcttctaagctcgttgaaacaaaactagatgctcgtcaaccgatgtcagtgggccttaaagaactagacccaaattaagaattgaaccagaacttaacatgaggtaacatgaaacaaagactaaaccgagaaccaatacactttggtttcggctttcaattgcatactctatattcttatttccttcatagtgatctttccacaataaagattctctatttcctcattgttcatttgttcttatacgctttatagaattttttaccgtgtcgaatttaccgataacacttgtttttatcgacattccatagaagtgtgaattgtaaaaaaaaaaacattgt

SEQ ID NO: 22052 - DNA, 3869 bp, Arabidopsis thaliana landsberg
taaattctctaatcttcatcaatttaatcttgcaatattcgggattcaaaccgatgtatatttttttgagtataaagtcttgaaaatatattttttaaatataatatatttttggtttttatttattttattgaaactgactaccacaaaaactcgagagcgcgtcacatatgccattgtggggagaaaacgaatctggcgtgccattttataatctgagtgccactataaatgtgatattccgaaattacccttaatgaaattataactggtacaaatgagagattatagaataactagtacaaatgatataagtaaatgagaatataatgcaattggtataaatgttataactgtatataaatagaaacaatcggtataaatggtattattgaaaaataatagtacaactgatacaaatagtataagtgagatataaatatggacaactggtacaaaatgtattaatagtataattgatacaactcagttatacgggacaaatggtacaaaatagtggaagtttaagcgatttgtatttctaaaccctaaagctattatatttaatggcatcgtcgtcgccgccgattttgtgaaccgtatctccaagcgtcgtcgccgccgattctgtgaaccgtcttctccaagcgtcgtcgtcgccgccgattctgtgaaccgtcttctcttttccttcggttatgcataaactgattttgcagagatttagtttggagatatctagggttcgttgagaagaaagaagagatctaaggttttgttagattgcagagaaagaagaagagatcgaagaaagagaatagaaatccatgaaaaagaaaaagatagatagattcatggagaaaaagaagaaagatttctggaaaattgattttgagagagaagagacaaaatctaaaagaataaaaagaagaagcgtgaaagagaaaaaaaagagacagtgttttattttaagttcacaaataaaggagtggcagggatacgtaatatatgaattagattaagggtttttggacttttcatataaatttgatttaaaataaaactaaaattaaaatgaaaaacgtgagagggtataagtgaacaatttaattgagtcagtgacattagtgataaaattcccaaaaactctgacaagaaaagattataaaaattaaagataaaattcccaatattccactaaaggtttaccaaaaaaatatctctttccctaagaggaaagcacgaacttactctctaagcttcccttttgtagaatagtaactcgaaaacttgctccccaatttttctcttctctttaagacacccactcacgtgcttaagcatcatcttcatttcaccacctgaaaactaacagcaatggcgtcaaatctcttcacaaaaatcccttcactctctgcaattttctcggtttacacatctctctctgccttcacgatcctcttcaaaaccattctccatgagttcattcccgtcaatatccgtgactttatcatctccaaattcacagactacttttctttttatctcaactccaatttcacgttcatcatcgaggaacagagcgattacgttatgaatcagactttccgtgcagcccaagtttacttgccgactcttctctccagaatcaccaccagaagtctcctcgtcagttcgagcgacctcaagaatccgatggctaaaccgaaattcggaatcccagtcaaagccaaaatcatcgatgaattcgaagggattcgtcttgaatggactcttctctctgcaaaagataatgataatccttaccagagtaaacaaaaacggtaactttcctctggatgtaaccctaataaacggtaaaaccctaaaatttgtcaacaaaaagggtacttgtcaacataaaaccctaaaatttgggatcttttcactcactctactaaacagagttctaaccctaaaatttgatttttttttttcttttcttgtgatcactcttctaaactgagtctacttacgtttatttgtcatcaattcgtatttttgacgttctattctcaatatagaaccctaaattttgggggtttttgttcacttaagtctagttacgtgttctaatgtctatgctgtgttttgtttatgttctgagttctgacactatttgtaattcccatttttcaatgttaattttggctttcaggtactttcatttgacgtgtaagaaggagtttagggacaagattatgtcagattacttcacatacattgcaaaatcatcggtgaagatattgacacataaagaaaatctcaatatctacaattacaatccagactgtctgagatgggaatcagcaatcttccaacaccacaccacatttgaaaccttagcaatggagcctgagctcaagaacacattgatccgtgacctagacgctttctccaatggaaaagacttcttcaaaaccgtgggacgagcttggaaacgcggttatcttctttacggtccacctggaaccggaaaatcatcgcttgttgctgcaattgctaattttatgaactatagtatctatgatcttcagattcagagcgttaaagatgatgcaatgcttagacagattcttacctcaaccgagaaccgctccattcttctcattgaagatcttgattgcagtggagcagatactacttgtagaaaggaaaataaagatgaaacagagtatggtgagaatcagaacaagaagaagaagaaggatcctaaggtttatgagtttgtatatatatataagcttcactaatttgcataaaacatctctgattttggtgttctgattcttgttatttgttgtttaggtaactctgtctgggctactaaactttgtagacgggttatggtcaagctgtgtagaagagaggatcatcatattcacaacgaaccataaggagaaactcgatccggcattgctgagaccaggaaggatggatgttcacatactcatggattattgcacgcctattgttttcaagaaacttgctgcattgtatcttgaaatcgaagaacacgagttgtttgaccctatcgagaagatgttcctgaggtgaaagcaactccagctgagatcatagagaagcttatggtaagcaaggatccggatgttacgcttaagggtcttgttgagtttcttgaatccaagaagatgaccaaggagagtgttgattctgaaatttaagaagcagaggcatgaagcttcaaggatccatggaagtagtttaccactaattacgcagtaaataacatgtagctctttgtctcattttcatttgggatttagaatgacagatagatccatcatatacatggaagtaatctagtacttatgtggtaacttaatagtaagtaactcttgcctctttgtctctgtaactctgttccatatttgggatattctcgtttagtaattaagtaactcttgcctctttgtctttgtaactctgtttcatatttgggatatttctcgtttagtaattaacagaaagagagaacaattcacaatccgtgaaataaagaaagtaactaaaaaggagcttgatgtgggaaaggaagatgaggatgataaactagtcaatgaactggaagagctgacaaacacagcggacaaagaagcttcttgcgatacgacgtgctaaggataagacgcggaaggcaactggtccacagataggtgcacttcaagatggttatgtagaccatgaattgttctctgatgatgacgttcatacgaagaccaattgttatttcagactctgatgatgacgttcatacgaaggccgagatattggcctgtgccaagaaaatgctaaggaagaagcagaga

SEQ ID NO: 22053 - DNA, 516 bp, Arabidopsis thaliana landsberg
  unsure (1)..(516): unsure at all n locations
tcacgtaagccgatgcgctgagcaaatcctcaagctcaagctcgaatccttcatcaaacgctacgaatttaccttcttgcccttcttcgtcgaactctgaaaccaccgtcgtcgtctttgtctccgaattgtacccatcggagcttcgttttctccggatcagccatacagagagagaaacagctccgattacaaccgaaactccagaaatcagagaaacggttactgaaccggtgatctgctgcttcttctcctttgcgtcgtcattgctgattacactagggtttggtttctggagttcttgagtaccttccggctttgcagcgacgaaatttggggttttgattttttcacacggcgtttgcaatgggaagccacagagatgagagtttccagcgaatgcgtttggtccttgattcaacagagatcccacctgaggtacctttcccgtgagaaatgtgtgactaanatctaagctgacgtgaactcgaaatcgaccgtacgacggtggaatct

SEQ ID NO: 22054 - DNA, 465 bp, Arabidopsis thaliana landsberg
atcgaagatataaagaagaaacatcgtgacgaagagataagtccttacaatgacaaaagtgattaaaaaaatagaaagatgtaccattgaaagtagtaaccaaccctacactgttactaacgactcaaaatttacaatgttaaaaaatatgttagaattagatgcatcaatattgaacagatctagggttaatcaaatatattttttgttggaagataagaaaattaacaagataggaataaaaagttgatttattcacatattgtttttcagaaatttacatttctgtttttttatttctatatatttgctttcttattcttctgttgctttcaaaaatttacattactattctttacatatgattttttttctttattaaatatcttaatatatataatattataatttaaaattctaattaacgtgatgtcaaaattatcaattagtgataagactaatcgc

SEQ ID NO: 22055 - DNA, 3698 bp, Arabidopsis thaliana landsberg
  unsure (1)..(3698): unsure at all n locations
acatcacttttacaaaatatcatcgagtattttgattttcccataacatatttgtaatattgtcttttatttgcgtcatatgttctccatctgctaactatgctgcatccatgtcacctacatcatgctcacaatctctgttgtttatatttgtttctgtcattacatttgcaaaatctgaatctgaaaattttaaaattctgataaaattatgtaatttgattgtagccattatcactcttttttgaatgtgaacattatatcttgaaaaatcagaaagaattctccattttttcttccaaactccgaaagttctctcgataacagaacgtaaagatgcgtgacattggttgaacaattcatatttattccttggaagaggaccataatagaattgagacatatgatatctcacaactcgatttcgtgacgatctataaggagctagaaatccttgtttgtttgggtagccagaatcaaccagataatacttctctgacggaggcaaaggaaactcggaatcactttgttgtgctatttgcagaacagctgtatcgtagcatgaacctggtgctccattccaaatatatgtgaataacatattcaaatcacatattgccatgatgttcaatgatgcatgatcgtgtcgattccaatacattccctgtaagtcaggctttacttttacgcatacatgagtaccatccatagctccaacgaatccactaaaatatggccaatatctttggtctacctgaagtctttcaggaattcgataaatttcttgtcttgtcggagttctaatataatcacatgctaataattcagttgccgtaagaacttctctaaattttctttgcacagtttcttgatttttgccaaatctttaaccaacatctctttgaacttcattgtccacatatccgtagaaacatagcaacactttcttcaatgcttacatttaatgttggctgtagaccataatttgtttgcaacatattacacaatgttgtgaaacatggaagtgacatccgtaataactgaagacatgcagcatcatcttgttgtaatcgacgccaaatatttctccatcccaaacctccatctgtttgagttggtgctctttgaaaatatcgatcatagtatatcaaagctggttgaattactaattcttcaaattgttcgttttccaaattccacaattcgatcctttcttcgtaatttagattgttaagagcttctgatcgtaactgacatgtacgaaatgcctaaaattttaatacaaactatatgttattaatcatagattattttacaataacgtattaaatacaatttaaacataaacaaaaatacataaatatttttgaagcataagcgagattacaaaacacaatcaccacaaaactaatcttcatctgcttgatcactttgatgacttgcatttgacccttgtggggttccccaaatattaaaaagacctcctggtctaggtgtttgtggtatttgtccagtttcaaaataatttgtgaaaccgagaccagatgatgatgtttgttgaatgatcggtggagtttcagttgttacacaatctccttgacttccaactgaaaatccatattgaacatttgttggagtcgttccgcttgaaccaccttgttaaaaattttctgtttgccgccattgtggagcctttggtgatgatccccactgtggaacatttggtggcgtgtcccactgtgcatttggtggtgttttccattgtgcaacgtttggtggtgtttcccactatggataaatgggaccccaaaaactgggtgaattttgcctcccaattacccacagaggatggacttccagatgatatacctcctgaatgtggactcccaaatgaatggcttgaacctaactgttttggcacatcttggttgttacgtgaaacaccagtcatagcttctaacagttggaccttatcctcgtcggtgcttgcagttatatcaatcaaatacttacgccaaaatactagctccttaagtgcattaatgcatgcccaatgaaatctagtgtgcttaggaagatttagcgcgataaatactcgttccgcctttttaaattcatcgtaatcatcttgatcaaaagcaccaagacgaagttgttgaaaactttgtcgttggaattctctgaagccagtgatgctgtcttgtattgttgtttcaaaggattgtcgtctatgacttcttcgtgaaccacttcctatagaaacttgcgcgcttttcccatatcgttgtgaactacttccacgtctacctgttgactgcaaattaggcctaattcgttgttggtttctaagagcagaattttggaacgtttcatcatcaataatggaaacacgatacacttctttttcttcttgtgtcttgggaacttgtgttgctggcacgttaccactgtcagcgtctgagtcatcatcgctttcttcataaattgcttgctcgttgattaattgttctcttctttgccgagatgaatgctgcgattgggactaaacatcatataatacgagacatcatttcatcacgtcccaaaactcagacggctttcggtagaaactttttgttaatttacatccttaaaattatataatcaattagatttttataccaaaattttaaaagatattttgatgagtaaaaaagttatatgtacttacataccgcagatgcaaatatcattgatgtctcaggatcaacagtaatgtcagttttatgtgtaagaaacttccatctcttataacttttttttgaattcatcaagcttgtttttgaagaaaacataagttatattcatgtcaaacgcttgattgaacttttcaaccatatattctctaccgatagaagtaggatgcttaatagtataattattcatgacaattgcttcgttaaacaattgaattaatgttttttcttgaatgtatgaccatttgtacttgtctttgttttacaaatttagtgaatacaatgtaatttattatgtcaaattttaataaatatttttctttagaaaaaatagaagtaaaagtaaatttacacgcactgttgtttctaagggaggagttgaaacttcgggatgagttgaacatgttcttgtggaaggatttgtgttccgtcgacgattagatgacatatctgcaatcactaaaatcgaaataattttccttaaacaaatttgataagcaaatatcatttattttcattttattaataaattcaagtatatatattcaagtacaaaatatatttaatatatataatcgttattttatatcaaataactaagaaatgatacaaaacatttcaaaattgaaattagttacataattaacggacatgtataatttagacaaaccaagttacatggattacaaattagcgaataatattaatttgactaatacatccaaactccgcgatgtatatttatcttaacaattgctatgataattaacgaatcattctttctttctaacttaagttattaagtaactacataacctaataacctattactataaaaaaaaaaaattaaaaccacanatttatagatatgaaatcaatagtctcttttcatttattagacacttaaataaagagnatatatatatatatatatatatatatatatatatatatatatatata

SEQ ID NO: 22056 - DNA, 877 bp, Arabidopsis thaliana landsberg
tattttttagtgttagcgatttgagctccatttgagttgcgagcttcgtgtgttgtgtttcgagctcaagttgtgacttgtgtgcatggttgtgctgcgaatttgagtcttgtgtgtgttgctctccccaaccttactctgtgctttctttgtgatctcaattgtaaggctgagagactccaaattgtggagattcctcgcaaacaggaaacatactctaaaggaaaagaccgtggtattcaagttgatcatcagatcacttgaaaggggttgagtgcatccctcgtccattgggacgccacaacgtggaagtaggcaagtgttacttggccgaaccacgggataaaatcgcgtgtctcttgtgttgctttctctgtgattcgctgtgttcacaagaactaccttcaagctacttagacatactaaccttcataatcaagttttgtggctagtagtgttgaattttacaggatcacctattcacccccccccccgctaggtgctctcactcgcgcggacgggcggttggaggaaggggaggggactgttagttggggccagggcatctaccagtcagcgattgcgcgcgcaacatgcaagcgagggcgcgtcgataggtggggctcgggggtagagagagctaggacgagctcgcgggtgaggccggctcgccgataggccggtcccaccggtcaaagaaagaaggggatgtgcgcttcattagcctattcctcttattccgaattagcgttccttttagttttattaactcttttgaattcaaaatcaaccatgccataaatttaaatttgaacaccttaagcttatgcattatacaatatcaatgtttggagttcagcaggattgcacaattcat

SEQ ID NO: 22057 - DNA, 374 bp, Arabidopsis thaliana landsberg
ctctaccctacaaattttcttatctttatagcttttatagattcataaaaacttttcttcagattcacaatctcatcacaacccttcaaaaagagaaaagatctaaagaataaacaagagccctaatatcaaatcacaaccaaaaaaaccaaagaaagctaattaaagttttctctctagctattcctcttcttttcttgttcttgaaaactagggtttacttcaccaaaagataagatctttccccagaaaaagcaatacccaagtcatgtttctgtgtgtctgtatatagataaaacattacataccctaataaggttacacaaatagctataaaagagggaaaataagatagggattttttgggtgaggaa

SEQ ID NO: 22058 - DNA, 465 bp, Arabidopsis thaliana landsberg
gacttttcacaaataatttgagtatttcactaagattaactgttttcaattggtatcaccgtatcagagttttagtgttcagagaatgaacaaaaatctacaagaacaatcaacttgttgaagaataagttctttaaatcaatttcagtggctaccaaataaaatatacacgagaaggatataattaaaaaaaaaaaaaaaaaagagagagaaagagatcaatcttattattgttttgtttcgaatattcataccgattattacagagacaagtgtataccaatattgctataaagcttattgtgaaagattattttagaaaacataaataaaaagattcaaacagcaaacttggacttgagattctgcacagttgtatcatcagtcctaaacgctctggtcaggactgcgtttggaatctcaggtttcgagccgaacagagtactaggcaaaacaactgctcct

SEQ ID NO: 22059 - DNA, 796 bp, Arabidopsis thaliana landsberg
atcatggaatattgagtcacacactgcacacatatcactacaagtctgcaactaagagactgataataaataattcaatcatacaaattaaattctcacacgtgatctcattaatttcaagaaatggaggctgataagagtcaagagatgacggaaaaaaaagagagtcaaaagatgaccagaagaaccaggaccggtccaccatgtaggaattttgtacgcaaataaaacatttatgccctttattgtttttatataatcacaaataataataatatacaaaagttgtactaaaactttattgaacagttttttttaattttataagcattttgtaagcaaaaattgagaaaaaatcaaaattatattctttaaatatacctctatttagatttttgtctgcaaaaccattcatcaaattcacataatcgaatttttcaaacataattgtcttagtggataggaaaaccaactcatttatttgattaatcaaaacaaaattttttactttgtaatcaaagttcaagcaccttacactagaaagtctttgaatttttattttgtaatcaaagtcttagagtttaagatttatttttcttaagtctaaacttttactaagttcattaaccagaacagtttattacctttaaaagggttaaggaaggatagggatggaaagccttaccaattttaattccttaaaaatggctctaaatggtttttttttaaatatataggacacttaacctctttctaaaaaaataggctcttacagtgaagcgccaaaatgtgtgta

SEQ ID NO: 22060 - DNA, 590 bp, Arabidopsis thaliana landsberg
  unsure (1)..(590): unsure at all n locations
tctaaaacatcttcaaaccagtaaaaatgacataagacatgacatcatattatttattctggtctttatgttcagcgataatgagttacagagataatgagaacaagaacgagagacagagagatacgagatcttacagactccacaagtgaaatttcatggcaagaacttgtcgaggctagatgtgagtgtggttttgggcactgcacctatgattgtatccttcttctcgccaccgacaaagatcatgatcgttgggatgcttctaactccgtactggccgggagtattaggagattcatcagtgtttaatttgtagaacttgatcttcccagtgtaatgctgtgctagatcgtttacaagnnnnnnnnnnnnnnnnnaaggtccacaccatggtgcccaaaagtcgacaactacaggcccagttgctttaagaactagagagtcccatgtcgagtcattgaccacttgaactgcaggatcaataacccaaatcaacaccttattgccaaagcttttagaatcatgaatgaaaacaaaatatatcagccaaggtggacgaataaaacatagagacagctgacccgttt

SEQ ID NO: 22061 - DNA, 458 bp, Arabidopsis thaliana landsberg
tggaaaatggtctgtagaggatgaagatattcaacacatagcggtgtcttattttgaggatttgttcactacgactaatcctcaagattttgaggattctttggcagaagttcggactttaataacagatcaaataaatgaataactaacgggtcccgcgacagaaagtgaggttcgtgcgacattatttatgatgcacccagaaaaggcaacaggggtagatggtatgacaacattgttttttcagaaagcttgggataccataaaaacggatttattatttcttgtaaactcttttttacaaaatggagtattcgataaacggttaaatacaaacatatatgtttgatcccaaaaacaaagcgaccgacacatatgacggtattacggcctattagcctttgtaatgttgggtataaaattatttcaaagattctttgtcaaagacttaagagggt

SEQ ID NO: 22062 - DNA, 143 bp, Arabidopsis thaliana landsberg
aatatttattttgtgtgatgtacaatttcggacaatgcatacgcttttgattgtttaaaaatgtgaatgcattcatttagaggaaaatagattttagaaaaagaaaaccttttccttctcctttgtgttttccttgcccattt

SEQ ID NO: 22063 - DNA, 595 bp, Arabidopsis thaliana landsberg
gcaaagatataatatttaaacaaaaccaagattctagttggtaattttaaattttttatttataacaggaagcaaaactcatcagagtttagagatcgattggttcttccggtaccactcataaatgttgttgcggttgctaacagtttaaaccagtcatacaaaatgctttaaaccgctctagacagctcaaaatctttgaatttcaaaatttccttctcgcgagtactagcagttggccaaaaataataattataaaaccatgtatatgttaaaacaaaatatacataaacaacagataaatttttaaaatattatcaaacccctatttatattaacgttaattctcaaaaccataattatttttgcaattcaaaatcatggcgtcaattcaaaccgaagaatagcaagacacgaatttcagtattgtaataatattattaatcctgaaggtcttaattttttttttttttttatcatttttggtttttggaatttggcatattagttgatgctattttttctgaaccaaatgcatgaagtaatacgcatttaactatgaaattctttaaaaatatttagtatgaaaatttta

SEQ ID NO: 22064 - DNA, 566 bp, Arabidopsis thaliana landsberg
ttttaccaacagatgagacaagtgcttctccagtctccgcaaacctgaaaagaatgtgttaattgaggaaatcaattttataacgcatgctaaggagaattgcatatatataatatacagaccctgttatcacatcgactagattttcaggtgctccaacagcagctaaagctgcctggatgatgcggaagtaaaagcatcccgaccagctagcgtgttctgaaacctgtagaaaaggtattccaacaatcagaaactacataatctcaagaagatatatggttgcactgctcacaatgttgacatcatataaacagtaacatactaagcttattcaaatatggtatacaaatgaatggcattgccttgggaaaaggtaaaaccaaaagtgtcagcgaactatagtaatacatggaaaaaatgagtttgctgctataccttaataacaccgtcattcccagagataactgtagcacgtttaggattgccctgttattcatttgaaatcatcctcctcttcattctttggattcctgataagttatcaatcggacccttagtaccta

SEQ ID NO: 22065 - DNA, 609 bp, Arabidopsis thaliana landsberg
ctggagttcctccctgaaaacaaaaattacatttgtttggaaagtctttcagttgggttttgacctaattggtttacctgatagtcagaaatataggtggtttgactatcccctagcattagtcggaaagcattcaaactcgggacagacagtgtggtgatcattctggaagaagtccactctaaagtatttcggtgcatttctaccagggctgaccgaatcagccgatagagtttataaaaaaaaaaaatggtgtggttaaaggaatgggtcaaactaaatgagtaaaagttttgtcactcttagaaggggattttcaagctcttgtatttactatgcaatgtaagtcaattcgaggtctaagaaaactcatatttgagggattgcaaactaataaacgatgaagttaaaaaaaacataataaataagcctatagataacaaacaatataaaaagataactcgaatacttgggaccaccacatatgttcctctcaatcataaccaccgtcaccgttcataacattctaaccaaaagctagcccaaggctaaagggaattaccaagctgctgttaacaagtatcacaacgttcctgtttccaccacgat

SEQ ID NO: 22066 - DNA, 1361 bp, Arabidopsis thaliana landsberg
ttctccttatcaatacctggtgctatttctccttccccaccactttctcttcactttctccatcgaaccactgctctcttcgctcccgagcttgctcagtatcagtttcgtttcccgcaatctccctccataatcctttttccacgtctcaaacatctgtttcagcctcctcagttctctgtctgggtccaagtttgcttccacctgaccagatttcacttccaccaagaactttgcatcatcaccaaacacttgagctctctgctcgaattcttctgctaaccgcccaatcacgctcagccctgcgctcataggctgtagtcttgaccctactccattgcttgtttggctcctgaactgattactgcttgaatcccaatctgttgcatcactcgcattgacagatgcatctgagtttctcgctgagtcctcaacagctaagcttttctttgctatggaaagactggactgcaacgacctcatttgcttttgccagatttcttccattgatttcatctttgtctcatactctgaccaccggttctcatattgttgaagcctctgctgaagaatgtcgttctcttcttcctttttacgcagagcagcttccgctttaagtcccctgcgttggagctcggaaagtactgatgctttcactagcacctcacctaactcatttgtctgcggggttggggaatgccaaagcaaaaatagttcaaaagtttatgagatgaaagaaaataattagacacagtgagaagaaaggaatgtgatatataacaattattttaccttggcacctccagattttaaccatccaatatcccctgaacatcttctaaccaaccaaccacgaattgctgcaaaaaggttataagaattcagtatcaacgttgaataagcttaagcatttttcttaatgagaagatatgcagcatctaagcaatacaataaacccttttacctgattgtattacagcagatgcatcggctatgcccttatactgtatcctagcaatcttgcttttaacatggctttgtatagcagcagaagctcgatgcctctgcagtaactccgtgtattcctttctcatcttttctccacgaacaactgaaacagaaggatgtgtgaggtatggtttctaacgacataacaaatacaaaccaagatattgaaatgagacaaggggcaatacatgattgaagaatagtaattccggttttaagctcttttagacgacagcgagcttggtgccctctaaaataactttgaagacgtaaaatgccatgcagagtgcgattccttgtatcttcaagaaccccaatctgcaatggtgaagcaagtatactgcagtgagaat

SEQ ID NO: 22067 - DNA, 709 bp, Arabidopsis thaliana landsberg
atttcccgtatccaaaaaactgaactgaacccggcgcgaccggaacccaaacccaaaattttaaaatatccgaagggattctaaacttcaaaactcgaaaacccccactccaaacccatccaaacctgaacccaatcaaatacctaacatatctgaaatatataaacataaaaacaatttattagtaataatcatatttacaacaactcaagtgcttaaaatatttggattttaagttttttttttttttttttgtcatccgattataattagagctcaaacgagccaaaactgaggaatgttgtttacataagtgatatgaagcggttcagtgcgaacttttcgcgccaagctatccgcttttacatttgcattacgagaaattaaggataaagaaaagcatgtgaattcttccctgtcgctctgtagttcctccaaataagctgagaacgccggccattcggttggagaagacaccatcttcaccagatctgaacagtccgtaaaaaatgctacatcttggctgtcggcaccaatcatacacttcatcgcccatagtagagcttcgacttcggtatgtaatggagatagacttcttcgtagattagcagctcccatgtttggtggctctccggttgctgatgtacaaaaccatcatgtacctgaaaacttatcgctttctttccatgatccatccacaaaacaacga

SEQ ID NO: 22068 - DNA, 495 bp, Arabidopsis thaliana landsberg
  unsure (1)..(495): unsure at all n locations
acccccaccagggcgagcgagctgatggacatcgccaccaagttcgcctctggccaggaggcggtcgaggctatcttccgaaaggacaagcagccccagggccgcccatcggaagatgctcccgaggcgtctactccgcgcggcgccaagaagaaaggcaagaagaagtcgcaagcgaaacgcgacgccgccgacgtggaccttgtcgccgccgccgagtacaagaaccctcgaaagccccccggaggtgccaacctcttcgacaagatgctcaaggagccgtgcccctatcattaggggcccgtcaagcacacccttgaggagtgcgtcatgcttcggcgccacttccacagggccgggccacccgcggagggtgcgagggccgcgacaacgacaagaaggaagatcccaagcaggagagttcccgaggtcgcgactgcttcatgatctacggtgggcatgcggcgannnnnnnnnnnnnnnnnnnnnngcaag

SEQ ID NO: 22069 - DNA, 4030 bp, Arabidopsis thaliana landsberg
taaacgaatttctgctaattttgtcatttcgagaagaattgaaacaaccgttggattccctttcaatcaaagcttaataattgaaaaatctagcagattacactccacgtggtccagtccaccatcttcttcgtttactccttcctacatcgatattatacacacatgcgtgtgtattggatctcacgatttcttatcaatggaactcgcttctctttctcagatccccatccaaatcgttttataggtagattagatagataaactacggatatactcgaactctatccatttacggtattgatttggaaaaatggacaagtatgacgttgtcaaggatctgggagctggaaatttcggtgtggctcgccttctcaggcacaaggacaccaaagagcttgttgccatgaaatacatcgagagaggtcgcaaggtttgtttttttcctttttgttcttactatttttgggatctttctgttttgaattggggtttaaagtttttacttttagctcagtgtgtatgttcaaattcattatttcaagtctccttgctatacatttgtaggaaaatttgagaaatttggggttttgataacaacagatcaaaatgatgatgataatttagttttggattgtttggtatatattgatcatggattgcagatagatgagaacgtggcgagagagattattaatcacagatcacttaaacatcctaatatcatccggttcaaggaggcaagtcacttttttgtgtggctctttatagtttatctaagagctgtcttgggatctgattttgattcggttctaggtgatcctgacacctactcatcttgctattgtgatggagtatgcttctggaggagagctctttgatcgaatctgtactgccggtagatttagtgaagctgaggttgctttctctttgtaaagtcatacactttgatccatatattttcttcaacattttctgtgatcttatttatgtgtgtgtataagtttttgcttttgatcttattcatttcaggctaggtacttctttcaacagctgatttgtggtgttgattactgccattccttggtatgtatatagtagttcttagaatatacattaagctgaaaaggaaagttatgtgctgcctaatgaggcattcgtggagtactattgatgtttttgttcccagagtctttgtttgagatttggaatttaatgcctctgtccttgtgtaaccttcccctctcttttgcttctgtgcagcaaatatgtcatagagacctgaagcttgagaacacactgctcgatgggagccctgctccgcttttgaaaatctgtgattttggttactctaaggtctgcacttatccatttcccttttcttttctttgctcagtttttctcaatcttcaatccaaaacagattagcatgttctttaatcaaaagtattatctattcactcctctcttgattcttatatctttgtcatgttttcaattttatttctatggtgtagtcatctatactacattctaggcctaaatcaactgttggaactccagcttacatagcacctgaagttctttcacggagagaatatgatggcaaggtacagtatttttgtcttgttatacatacatatcagtttgtcattaacgcttgattggttgtcaaagtaagcaaataatgtcatcaagggaaaatatgaggatagaaagttatagactgctcaaagatccaggctatagagttcttctagtatatcttttttagtggcatggtctgtgtgaaacttttcaggttattgtacttctaataagatttaagtggggtcttaattaaaaaatttgacggggtgctaatcgatattttttccatgattgtcataagagcacatacactggttttggctctcatatatatgactgcgtttttgtagcacgcggatgtgtggtcatgtggagtaaccctttatgtgatgctggtgggagcttacccgtttgaggaccctaatgatccaaaaaacttcaggaaaacaatccaggtatgaaccaaatcctcaaatttctcacagcgtctttttcacttcaattcttctactatagggccttatggtgctgagaaaatgttctgcagcgtataatggctgtccagtacaagatcccggattacgttcatatatcgcaggagtgcagacaccttctctctggcatatttgtcactaattcagctaaggtactactttctcatttatctgagttgaagctgtcttttctatatttcaatcttttgatgacatgtcataaatttatgcagagaatcccccttaaggggatcaagaagcttccatggttcttatagaacttgccaaaggagcttacagagcctgctcaagcggcgtactacaagagagaaaccccaagcttttccctccaaagcgtagaggacataatgaagatcgttggagaagccaggaatccagctccgtcttctaatgccgtcaagggctttgatgatgatgaggaagatgtggaggacgaggttgaagaagaagaagaagaagaagaagaagaggaagaggaagaagatgaatacgagaagcatgttaaagaggcccattcttgtcaagagccttccaaagcttaagaaactctcactctgttgtgtaatattcaatctccttgtatctttacgtttatgtgaattcgaagtttcaaaactttatctacgcaattgaccaattagttatcatagcatttgaacattcggcttcaatacacaaacaggaacagtaacaacaacctctgtaaataacatagctcaggtttgaacatagtgaaaggaagtaccttttactcgtatacataatcagatctcatcgtgctacattctaaattcacaacactagagacgtagaaggagagagaaagagagagagagagagaaataacagcaacacacaacacaaactttttcccatctgtaaattaacaaaacctaaagaaacaagcgtgaaagaatacatatatatgatgatgagagctttggttgtttcagtcactgaagtctacgcttccactgcgtgagctgctgccatcacggctatgcaaagaaaggcctcgcatatgacctggtaaacccaaggcaccgtcacctttattctccttgaagaatttttccctctcaacgtgcttcgcaggtggtggtggaatcacaacaggtggggattgcgaatggctatcaccaccgcgtgatgcctcctctgatggtaaaggacggataagtggacggttaagtctttcgttatgtattgctgatccaggcaatccttgtggaggtgatggctcttcttcatcctcaggccttgctctagctttcccttttcgcaatctgcaagtatatattcacatagatccttagtcttagcatcaaggataaccatcttttattccaagaaccttatgagattatcaactttgtaatctccgatttgagattgagtaatgtgaggggacagaccttctgaataactgctcaggctcctcttcctcatcttcttcctcaagcttaagatgggctcggttagaaatgaagctgcttgattcggtgtttgcattagaagcctttagctcgcgtttctggtcaccatttgagataggacggacaggttcgagattggaatgatatccatttgatgtggtagacctgctaggaacagtgattctaccagacagcaaatcttcgtgtctattgagaattctctgaagttgctcattcaattcgattgctttagaaactgctttttcatccctgcataaacaaaattggttgatatacttgaaaagaaaaattcttttaacatgccctctaaaccaagagagaaagaagatttgcctcgatgtcatgacgaggtgcattacgcgctctttctgaaacgaacattgctcgacaagatcaagagtaaactcatcttttgccccctggatgaaaaaaagtggatcaaactggagtcattctcaggttaagagc

SEQ ID NO: 22070 - DNA, 494 bp, Arabidopsis thaliana landsberg
tttgttctttacagaagcataacaaattttcttcctggtagagaggtttggtcagtttctttaattaattccaaactctaggatttaaaacagaaagcatagggttcaatatttttatgtgatactccataatattttgaatccagcaaaattgggttgactaaatttggttgaatataactcaagatataaatttcctaagttctctactgaatttaaaaagaataaaaagaaaatggataaaggaaaagggttttgcactggggtccctggcgaaagatttaagtgtattacagacaggtccccggttcactattcatctgagtctatgactctgcagaaaaccccctagggttttatgaaatcgaacccacgatccttcccctaatggaacagtgaccgcgacggaagaaaagggtggaggggctttccggcggcaaggttgctccggtgaggggtcggatgaagtccgggggtctctggcgatcacgtcg

SEQ ID NO: 22071 - DNA, 560 bp, Arabidopsis thaliana landsberg
aaaatctctatatataactcataatcacaaacgggtcttcctgctaatggttctaacagaagcccttttcaactaacgaaaaattaccaaactcttcatctgaaccactccactctttttagcaatgactgacaaccacattcagacaaaaacacaaataacatagcatttgtaaaagcccatacttagatcccaggaaaagttaattacatgtttccatgaagctgctccatttgagctccccacccgccaatcttttgcaaagcaactccttgatatctagaattattccttgagaaaccagagctctgtcgccgaagtacttgcacaacttcctctttggaaagattcgccatctgtaaagtttgaaaaccagataagaacaaatcaaagcgtacatgtcttcatttgtacatctgtaatcaaaacctgcttgagatcctcttcataatcgccaataacgaaattgatgtcagcttccagaccgcggtatttgacagcagttcgatcatacgccctacaccaacgaaagttgaacttaggaaacaattgtatcataa

SEQ ID NO: 22072 - DNA, 3379 bp, Arabidopsis thaliana landsberg
aagactgaccgaatgatccgcatgccatgcatttccctccgtggatcattaaccagggttcaagccttgaacattagatgtgggatggagaatttcagtttcaaaaataaagtgtatgttcaaatgcagtaattaaactccttatgatattcaaatagaactacaagaaaaaagttgggcttgaatggctcacaagttcttccgggcaaacaattctggagcagctttgtttatgtatgtacgtcgtttttccagtggtaaaggccttaaccgtttgacaagttggtggcagtctaatttgcagtttgtgcaaattccatgttctatctgaaaaagttcctgagatttgaaaccttacacctgttagtgatgcactaaagatatacttgatatgaaactttgttaatcaacactcatttgcattaaataatgaaagaatggccaagaaaaacctggcgaatgtatctgctgcttgttcttgtccggtagtcttcatagcatgcaagctcacagaaaagatcctctaaatactcaggctctttggcgttgtatcccctagatcaaacaaaaaatttaaagttaattaaaaacagtaaccaaaaactatcagtcagtaaatacaccatgttttcactcacgcgcagggcttttgacagagtttacagagtggttcgttgctcatactccaagcttgggtgtattctttttcctttctttggtgaccacttcgaaggttgacctttatccacactgcattttcaggtaaaggaatgctgatctcagaaaacggtgtgtttcgtcttttgctccctcccctaagcaatccctgatacaaaaaactcttaataatggttttggaatcaaaatatttggtaagcacttctcagctacaagatatacctcgctgttgtgactagtactttcactcaggtagctcaactccagtgataaaggtagttgcaaaggctttccaagtagtttccgcttttcgattgcccgtagcgatttccactctttcataaattctaagatagcaagtacatgaaccgggtcatctgtaatggattcaggatttttttctttcgtggtaccctgacttggattgcttgcttcaatctcctctggacggaagttttggaaatgaggccttggtctagcatctttcccaggaatgcacgagtataaatgaattcttccagtgttttggctcacctgaaagaatttaagatctgatttatatgcgttttcaactccaaacaagtaaagataatgtcatttgtaaatttcccaatagaagtaagaatcagattgcagcgtagatccaataaacttagaaactgacacgagattgaaaagtatgcagtggattcaccaaatttggcctccttgtaatgattgtacttttcatgaccaccaaggcaacaagaataacagatgaaatataaagagccaatgcagactttgaactttacctcaaatctcagagaatctatgagtggaaaaatggaactggaatcaacttctttcacaagcccatcatcagcaataagctgcatcataagaaaatgtatttacattttaggacatgtcagagaagaaaaatagacctttcataagatttaagttcatacatttttaggcttatgattttcttggttttcctgggctaacatagtcaaagaaatggtgccagaagacctcatgccagagccggaaccattctcaacaaaaggacagacttctaatatttccaattgagaagtcatgtcgtcctgctaggccaaaaaaatcaaaaagcattcagccaaatgtctccttgattatggaactcagatattcatggtatacgaaagataaattccgaggtcataaaggtccaaactatttgatcaatgaaaagtcaagagataaaccttgagatcaatagtatttgacacatctgtctcagttcccggatcgtcacagctttcaacaatcttatcagctactacagtatttgattctgatggttgcccttcaagaacttctctttcactgctttcttcagcaggcttgaaaatagatgctccttcaatctgcccagacaatttttttatcatataaactaatggttgtcatgtgaataaaattaagcctatgacatatgaataaacctctatgtggtgtgaacatctaatgggaaggacaataatctactgagaattgagaaaaagagcaaagatttgagaggtacttcgatttcagtcttcccatcatattttccatcagtggtagatgaaatacggtgcaacttcttgtttagattttgccaatttgactcgtccatagtatcctgttacataagagtcgtcgctattcaattatagtggataagggaaacttcaagtaactagtataacagcagcaaacgagtttaccttcgcgcagaagatgtatacatttactgcacttgtttggcctcgcctatgtgctctatcctcagccttcaaaatgtaatcaattgattatgcatctagcagccttaccgcattttgcagataggtttaagaacaagaacaagaagttaaaaagtataaaaagagcagtacagggaaaatacctgaagcaacagagacggtgttttaggcaattcaaggaacacaacattttgtgctgctgaaaaatccagtccaactcctccagcttctacaccaattattgcaatttttacctggatgggaaagccaaagtataggtcaaataccacacattctaacaagcacaataaattcaagagttgataaatgtatagaagatattgtgcatacctcactagaaaactgaaaaagctgtacagccaattgtctatctcttggcaatgtcgtcccatcaatgcgaacaaaaacccatccctttatcacatataaattcctgaaaagcaataatcacaagaaaaaatttaaaagcaaaatacttgttcgaatatgttaaatgagctagcagagatataaagttttgaattttcaaagagttaatgacgagaattaaatatattaacctgaattccatccagaaccttatggtgatgtgcaaaaacgaccattttagttgagcttctgtctccatcaatttcttctggggtataatccaatcctgatagaagtggatgtagagataaccattcacgaaaggcagaaagctttgcaatgccaagttgttgataggaaagtttcccacatagttgattctctttgtcagctaaagcacaacaaaaggaaaaaatgaaaaaaaaaagagagagagtcaaatatatgcaaagagaattgtctccttgacatctatggaaagaaaacagtcaaaacatacagttagggccatcagaattctctgcgttgtacat

SEQ ID NO: 22073 - DNA, 405 bp, Arabidopsis thaliana landsberg
cagaacatgctataatgagacgcgagccccacctcgaggggattcatgaaattagaaaaatggctgaagccattatggacaaagttgtcgaccagctactgaacgaagctgcagaaatagttcttaagaaggattaaatgccattgtagaaacatttggaacgtaatatgtgtaatatattgtaactttgaatgtaatatataatctatttgtagtttaattctttacgatgcatgaaattttgcatacataccatttttggagccttcggcgaaaaaacaccttcccttcttttcatgcttcgtgaagaaaatcttttctatatcacaagaatttgcatacttctctgatgaagaaaatccaagcttcgtgaaatattttctgaagctgaaaaagttttagggt

SEQ ID NO: 22074 - DNA, 623 bp, Arabidopsis thaliana landsberg
attaagagtaggcctaaatggtttctataaactgaatgatatcaggtggtgaatcaaaacaaacccaaaacttgttatcatcaatcactttgacaacaaaaccagcccaccacgcatctttgtagtcagcgtcgacgaaggtgcctatctcgatatcgatgcaagcttgtacattttttggaggaatgggtcgaatcaagactttgtgtctgagttcgttaagaggaatcgagaagtcatccttaagcaaacgaacacagagttcttctttgaatatagaattgggttttgcttcgagaatggctttgtaccaaacgctttcattgccattgtttttgtaagagatttcgacttcacaaccttcgctcagagataaactttcactcggaacctgcctccccatgctgtgattgattactcacagtaaaaagaaaaattaacttctttaaacaaaaaagatccaacctttttcgtcgaaagttagaaacccttaaacaaattgaagacggcgggatgctttaactgtgggaagtgggaatagtgggggttttctaaaatataaccaaataatttaattttctttatctacctattaggtttagacattaaaaaaatataaattt

SEQ ID NO: 22075 - DNA, 1356 bp, Arabidopsis thaliana landsberg
tcgcttgccgaacttgttgaggtcattgtagagcctcagttttagtccctgtagaagcataccgttggcacgctctacctgcccattcgtcatggggtgagctacggcggcccagtccacacggatgtggtggtcctcgcagaagtccaggaacttcttgccagtgtactaggtgccattgtcggtgatgatggagttcgggaccccaaagcgatggatgatgttggtgaagaatgccaccgcctgctcagaccggatgctggttaggggtcggacctcgatccacttggagaatttgtcgatggcgaccagcatgtgcgtgaacccccgggtgccttctgcaagggaccgacgaggtcagaccccacacagcaaacaaccaggtgatgggtattgtttgcagggcctgagcggacaggtgcgtctgccttgcgtagaattgacacccttgacaggagcgtacaatcctggtggcgtcggcactgcggtcggccagtagaagccttgtcggaaggcgttcccaacgagggctcgaggtgctgcatggtggccgcaagcccccgagtgtatttcttgtaatagctcctatccttcggcgatggatatgcattgttggagaatgcctgaggggctgcggtggtagagctccttttcatcacccagtaagacgaacgacttggcgcgccgccgagtcgccgagcttcggccttgtcgaggggtagctctcctcggtggagatattgcaggtacggggtttgccaatttcgattaggcgcgaccccattccgctcttcctcgatgcgcagtgcctcaccctcggcggacgaggataccttgggctgggccgaggctcctcggggttggccaaggctcctcgggctcgggcgtgtcgtcggtcttgacagagggttgatgtatgtctcgggagaagacgtccggggaaaccgttgttcgccccgaagctatcttagctagctcatccgcagtctcgttgtagactcgggcgatgtggttgagctcgagcccgtagaacttgtcttccaggcgccgaacctcatcgcagtaggcttccatcttcgggtcgcggcagtgggagttcttcatgacttggtcgatgacgagctgcgagtcaccgcgagcgtcgaggcgtcggacccccatctcgatggcgatgcagaacccgttgaccagagcctcgtactcggccacattgttggacaccgggaagtggaggcgtagcacgtagcgtaggtgcttcccgaggggcgagatgaagagcaggcccgcgcctgcccctgtcttcatcagcgacccgtcgaaaaacatggtccagagttccggttggattggaactgt

SEQ ID NO: 22076 - DNA, 4361 bp, Arabidopsis thaliana landsberg
  unsure (1)..(4361): unsure at all n locations
tgaaaattctgcatccacatacatgagcctgtgttaaagctggagaacagatttgcccaccatttctcactgccaaagccatacccatatttattctctctcgctctctcttctcagtctctcactcccacagcctttagttcgagaagaccgaaggggacttcattctcttgtacgggaattaaaatattgaagattgacaaataaaaacatgaatcttcagaggagaaaatttgttaggtagcttcttggaattttgatgaacaagtttaacatagcttcaatctagtatttttatatttatttttggcagtagtgatcatatcttgttgatacaggcttgatagtacgggagttgatggaaaattcaaaagtgttagagggcgcttgaagaaggtttacgggaagatgaaaacactcgaaaactggaggaagaccgtcttgttagcttgcgtggttgctttggctattgatcctttgtttctgtttatccctttgattgattctcagagattttgcttcactttcgacaagacacttgtagcagtagtttgtgtcattcgtacttttattgacacgttctatgtgattcacatcatttattatcttataaccgagaccattgctcctcgttctcaagcatctttgagaggcgagattgtcgtgcattctaaggctacactgaaaacacgtctcctctttcacttcattgttgacattatctctgttctccccattcctcaggtattgctctcttcgttttgtgtgtgacatctacttttccatgctttttattagagatgtacatgcgtaattataggtggtggttctcactctcataccactgtctgagagaatactgaaatggattatacttagtcaatatgtaccaagaatcattcgtatgtatccgctttataaagaagtgacaaaagcctttggtacggtagcagaatcaaagcgggtcggagctgctttaaacttcttcctttacatgctgcacagttatgtaagtctttgctcttgatcccacttcccacccactgttggtgttgttgttgttgcaactgtgcatgatggatggctactatgtatataggtgtttggggctttttggtacttgagttcaatagaaaggaaaagcacatgttggcgtgccgcgtgtgctaggacatccgactgcaatctcacggtcacggatctgctttgtaaacgagctggtagtgacaacattcgttttctcaacacctcatgcccattaatcgaccctgcccaaatcacaaactctacagacttcgactttggtatgtatattgatgcattgaagtcaggggtgctagaggtgaaaccaaaggattttcccaggaaattcgtctattgcttttggtggggtctccgtaatattaggtactaaattgtattatgctaaactctctgccgtgagacatatatcaatccacttgatagattaatccgctctacagtgctttgggccaaaacctggagacaagcaactctgcaggggagattttctttgctatcatcatatgtgtctctggtctactcttgtttgctgtgctcattggaaacgttcaggtaatgttcataccttagaactaaagtttgatctcataaagctgattcttaatagatgtttgtttttggtgatcgcagaagtacttgcaatcatctacgactagagtagatgaaatggaagagaaaaagagagacacagaaaaatggatgtcctatcgggggataccagagtatttgaaggaacgtattaggagatttgaagattacaaatggagagaaaccaaaggcaccgaagaggaagctcttcttcgtagtcttccaaaatacctcagactcgaaaccaaacgctatctttatctcaagtttctcaaaagggtaaccttttattttgtcccatcataacttaaccaactcctcttgaattcactgttttgttttgtttcaggtgccttggttccatgctatggatgatcggttactagatgctctatgtgctcgtctcaaaacggttctttatacagagaaaagttacattgtgcgtgaaggtgaaccagtggaggatatgttggttataatgagaggaaatttaatcagcaccactacttatggtggcaaaactggattctctaattctgacgacttagttgctggtgatttctgtggagatattctcacttggggattagatcctctcagttcccagttccctatctctagtagaaccgttcaagctttgacagaagtcgaaggctttgttctctcagctgatgatctcaagtttgtcgctactcagtatcggactcagtatccccgcctccatagcaagcaactccgacacatcttgaggtaagactttcaattggaaaaatgcatgttgagttaattataaaagttaacatatttggtaatgaggacatatcatatatctatctcgtttctcaagttaccttcaacataataacccaaaatctttttatcacctaccttgtatcttgtttctcaagttacctttaatattataacctaaacaactttttgtctccaggttttattcagtgcaatggcagacatgggcagcatattttatacaagcagcatggaagagacattgtagaaggaagctctcaaaggctttacgtgaagaagaaggcaaactacataacactcttcagaacgatgattcaggaggcaataaacttaacttaggtgctgcgatttatgcgtagaggtttgcttctcatgctctgaggaatctaagagcaaatgcagcagcccgaaattctagattcccacacatattaattttgttgcctcagaaaccagccgatcctgagtttcctatggatgaaacctagttttgtatagttgttgactctatctctctgtaatgtgatcgctagtgatttcttgcaaataacttttgtgtaaaccagtaaagatatttttatgtgaaataataatcaataggaaaatttcttatagagtttagtaaaaaaacaattttaatggagacgttttagcgaatactcaccacctcaaccactgtaaatgttttgttatccaaaaacttctaattcctaagcttttaagttttaaagcatctctcgttcaacaatttgtatttttttttgcaaaacaaaaaaaataaaacgctgtgtttttaagaatccttaaggttgggtattttaagtgaatcaaaaaatccaaccaaagtaatggaactaaaataactgttttattagaaaactgaaaacgtacgtaataccagtactagttctattattgattaattgatatatatatataaattaaacacagatttaggttatatttaaacacatagctaagagtatttactagagacagtagacttaactaggtctctatattggtggtgtagcttggcttcactctcgaattgaagaggaacaacttatttgtttagtctttttaggacttacaattacttctctgttgtttgatttagtataataaaaataatgatttagagcatctccatcaatagtctctcgcatggtttcttcttcacaaaaaaatataaaataataataaagtaggagagagtgagaaaagtttctctgcacagaaaccatgaaatactcttcttgccacatatcatattttaataggttaaataattattttcggaataattatttaaataaataataatattatatgagaatgattaaaaaacaatattttgagatactcttaccagttttaccgatgaagatggccttaatatatttgaagatggtacaaaatgggcatgttgtgaaaagaagacaagtttagaaattggattttgtgaatattattgtaagttgtagggcaaagagagtgagactgcagagcccccaccgtagacgactttactttctcttcaagtccatttagcttaccactctgcatccacagtttaatattagtgttgaaaattcnnnnnnnnnnnnnnnnnnnnnnnnnnnnnnnnnnnnnnnnnnnnngcccaccatttctcactgccaaagccatacccatatttattctctctcgctctctcttctcagtctctcactcccacagcctttagttcgagaagaccgaaggggacttcattctcttgtacgggaattaaaatattgaagattgacaaataaaaacatgaatcttcagaggagaaaatttgttaggtagcttcttggaattttgatgaacaagtttaacatagcttcaatctagtatttttatatttatttttggcagtagtgatcatatcttgttgatacaggcttgatagtacgggagtngatggaaaattc

SEQ ID NO: 22077 - DNA, 859 bp, Arabidopsis thaliana landsberg
  unsure (1)..(859): unsure at all n locations
aaggtaaaagaatcttgtaaaacttccataggctattttgtttcttataagaactacaaactcaaaagggaagggaactttgatttcatttcctaaaaaaagaggatcataagagttaagggaagataggctcttagcttgaaacatagtatatgcagtaatacaagaacaacaaagtaccttataagcaagatgagtttacttatacagaaaatattaatcacattcacaattgctgatcaataaagaacattttatacaccttctcctaaactgcctaatacactcaattttaacgggaaaaatgtcatttaaatcatcactttaccattttcgttggtttaaagcataaattctggacttggtgatttaaaccttcaagtttatgttgactttcaatttaatcacgaattttcgttgactaagccaattaaggcacatttttaaaaatccttctaatcaaattttttgattttgtttctttttttctttggaatctctcatcttcttcggattttctcttcttcttcgaatacaaagtaatttctcgtcttaaagtcgactaatggcgccaaaaaagtaagaatttgtgtttcaattggcttactcaacgagaatttgtgatttaattgaaagtcaatagaaaattgaaaatttaattcaccacgtccataattcatgatttannnnnnnnnnnnnnnnnnnnnnnnnnnnnaaatgatatttttccccattttaacacctaagtagaacatttattaatatcgaccagcctactaatctaagtccaggcccattattattaggagatccgcgagacataaaagtngtgaataactagattccaatttacccttca

SEQ ID NO: 22078 - DNA, 517 bp, Arabidopsis thaliana landsberg
tagatatataggtcttaaaaacgtgttgggccttctttaataataggagaaagttctgggtcgaacttggaaatcttcaaaacttcaataagtttcgtctttgaattgacgtcaggtattggtgtcgctcgccaccagggatggtgtcgatcgacacctacgtcaagtttcgtctccagattgcttctacagcataaattctctgttttactctagaatgctccataatctccaaatgcatcccaaatatgtaatgacctaactctagaaataacaaaaggactctaaaaagtatacataaatcgtagctaaaagcagtgaaaatagggttatatcactttgaaggcaaaacacttttcttctagtagtctaaacacttgtacgatcaagcacatctttatatcaataatatcaacaataccatctgtggtatataatagcttatgttgttctttgagattctcgcaaagtataatccctcagacgaaccctaaatacaatttcaattgtgtagggt

SEQ ID NO: 22079 - DNA, 798 bp, Arabidopsis thaliana landsberg
tggagttgtactaattattaagttttttaaaattataatgtttctactttttttccaattttttttttaagaactcaaattaagagtccaccattgcatattgccaaaatttcaatctcttaaccaaattcttaacttcaaaattttcaaaatcaattataaaaatattcataaaaactattaagattatgctaagaaactactattaatgatgctcttatgatggctatatgatataaaaagattgaccacttaccaggtgtgtttgctacgcgtgacttgaaagctctacaaaatgtttctcttaagtgggagtcgtggaggtacaaaaagcttttcacctttgcttttaataggatgaatgaaatgatttacagttatctgattaggttgaatttgtctcatggttttctggtaaaaaaaaaatgctacgcgtgaggcttctttattgtgtttctggtcagacgtataaaaggttgaaacttcaaattgaaaatgtcgtgatgagctaatctagattagagtacgtttaattcgtttgaactcgggatgagcttaaaccaaactaaagatctttgtgccttttgggatatgactttttgttgtggactgttttttgtttttaattagtatgtacagtgtatgtgaacaaaagaagtaatcagtgtattgggcttggaaggctcattcttgggatgggccttagtactaacagatctcagacatcttctatttgatcccattaaagttcaataacatgtactgtatttggtgaagaatcaaatatatataagtata

SEQ ID NO: 22080 - DNA, 561 bp, Arabidopsis thaliana landsberg
acttaattttttattttttctgttaaatattctattcgttttatgaactttaaataactataaaagtggactggggtaataaagtataatattaataatatcctaaaatttctctttttaaagtaattagaattgatagagatatattagataaagaaatgctagtaattaaaaatattaattaattgataataattaatgccaatgtcattccttgtaaataagttccaacttgagtatttatttcataaaaatgttccaaaaatgtatatatagattgttaaaatccgatttttaacaaaattgttaattgttaattgttaatgtggtttcatttttttgtaaggaaattttatcaaaagatatataaacaacaatcaacgagaattaaggaaggagtatattatctacgatattaaggtaagatccgtttcaatattttcaaaattatgtttactaaatcaatcaattttgtttgtattgtttttaggaaagtgtcacataatttaagatccgaataacttagatccgggtcaaaaacttaaaaaacaaacccgattc

SEQ ID NO: 22081 - DNA, 1704 bp, Arabidopsis thaliana landsberg
  unsure (1)..(1704): unsure at all n locations
ggataacaaggacctggtctaccaacctgagtcagatggagatctgagcctcttgatttttctttgttgtttgtgtcgaatccttgactgcttttgctgaacgttagtactgaaactaattgtttgattttgatggtttgcagcaaggaccaaggaagttactctctcgcagacggaactcgagctgttaacccttctccgacgtggtcagactgactggtccacttttagcagagatcgcatcatagctgctcttgccgtagctccagcagttcccacaatcgtccctccagcagcacagctagatccgatcgaagaggtccttcggattgaaccggttcctgaggctgatctgcctataagtacgagttccgttatattttcttgggtttaaaaaatgtacgagttatcgagacagctgcgcaactcaaattgctaactaacaaatgtcatgctctatttgttcagttcctcctgactccagctccacttcagaactcccgctcattagaagaatgagatgnnnnnnnnnnnnnnnnnnnnnngccaatgccgaggctcctgctcgtgccgatgatctgtcggctgcggtgaccgcggctcgaaacactctagctgtttcctgcgcatctgcctcagcatctcatccctcccttcctgaggtcaacaccgggacctctactgcagcaagtcaatcaggtaacaatcaggtcgctcaggtatctgagccatctgcagttgttcgttctgatgtgcaccgtcctctccgaagagggctcggacccagccggaggtgaatccagcgactgagttggtcgtgagcgaccagagggtcacctctcccagagaggagaggatggaacctgcggctgctactccggaggcagctgcgtccgcggataggggaggtcccatggcggaggacgaggctccagaggtgggggcaggtcttcaaaccggtctcagaaagtgaggcagacgtccaactctggtggaggttccgcgggaagcgggcctttccactggtctaacactcacgaccgtgatcatccgatcgttgaggacgaggctgggttggcgaacctgcttcgctacatcaaagggaggaactgccaggttcctggagtgaagaacatggccaaggcggcatcttatgctgacatgatggcgaaggagggccaggtaataaccgataactgcctcctcctgattccattcttatgctagttataactttctgttttgcctttggtaggcgatagctgccacgaataagctggttgctctctatgagcagcgtttgagtcaagtcccctcggcgagcgagcttgaagaaggaaaggccctcatccgggagctgacgtcaagtgtgaaggctggtcaggatcgcgaagtctcgttccaggtacacctgggttttgacttgcttataaataattcgtcgatgatttgatgattctgacctgattgtaatttaaggcggagatcgagaggctgaaaatggagttgtccacttcaaaagacctcgagaaaggttttgctgagaagatcgggttcatggagatggagatcggggggttgcaagctgacaagcagacagcgaggagccagatccatcgcttggagcagaagagggaagagctctccaaaaaggtggtggacctgactttggttgcacaaggggcaaagaaggcggttcatgat

SEQ ID NO: 22082 - DNA, 2545 bp, Arabidopsis thaliana landsberg
tcatctccacccccgccttacgtatactaatctccacctccgcctcctccaagtccaccaccaccgtgtcctgaatcatctccaccaccgcctgttgtatactacgcacccgtgacacaaagccctccaccaccatcaccggtatactatccaccagtaacacaaagccctccaccaccatcgccagtatactacccaccggtgacaaacagtccaccaccaccatcaccggtatactatcccccagtaacatacagtccaccaccaccatcaccagtttactatccccaagtaacaccaagtcctccaccaccatcgccgctatactatcccccagtaacaccaagtccaccaccaccatcaccagtttactatgcccccagtaacaccaagtcctccaccaccatcaccagtttactatcccccagtaacaccaagtcctccaccaccatcaccagtttactatccatcggaaacacaaagtcctccaccacctactgagtactactattcaccaagccagtctccgccaccaacaaaagcatgtaaagaaggccatccaccacaagcaacaccaagttacgaaccacctccagaatattcatactcatcatcaccaccaccaccatctcctacgtcctactttccaccgatgccaagcgtctcatatgatgcatctcctcctcctcctccgtcttactactagtttcaaccattgagtaaaaaaatgcattgccttatgattaacgagactactcacaattatattcttttggctgcgagactttaatttgtgtgttttgttgatttaaagaaaaaaagacattccagttactttttcttgtaatatttttttttcttttggatattatgttcttttttccctaacacagagctgctcattagcagcaatggagtatatagtttcagtttatttaatttgatactaaaatgttctgtataaataataaagaaaataataaatcctttcacaaaatccatttttatctcaaattaaaattgaatatttaattgaaaactgtaaagatgacgtcaacttctcagtcatcatctcaaaaacggaagcttaagaaaaatctatacctaccacttcgaactaactctcctctctcgcttactggaatttggggattagcttgggaaacttcgccggagattcatacgtcgtcgtcgtctttagtatctgtatcgtcaatggcgttgctgaagtctttcatcgatgttggctcagactcgcacttccctatccagaatctcccttatggtgtcttcaaaccggaatcgaactcaactcctcgtcctgccgtcgctatcggcgatttggttctggacctctccgctatctctgaagctgggcttttcgatggtctgatccttaaggacgcagattgctttcttcaggttcgtttttccgattcctataaactcggattactatgtagtagtaccctgggaatgtttccgtaaatgatttcgaatttgctatttgaacctgatctctgaagtttgctccatggtttattggatagatcaatcccgtttagctcgaaaaaaatccattgttctactcaattgctcgttgcttcgattcattatctgttacagtttgagttttctgttcacgattttgaacttttgcaactatgattattgctttatgatctgacggtatagtgtattgcttacacttagtgatgaggaaaatgaggttgtgtttattttctggtgtgtttcttttgatgttaatattgtttagtttctgtgctctgtttgcagcctaatttgaataagttcttggccatgggacggcctgcgtggaaggaagcgcgttctacgctgcaaagaatcttgtcatgtatgctctgtttgatcctattgatttatttggatttttatggagttttgttatttggcttcaaggttttggttttggtatgttttcatgcagctaatgaacctatcttgcgagacaataatgttttgaggagaaaatcattccatcaaatggttagtagtgtgaaattgttttttgcttaaactagggaaattgtttgtatatctgttacttacgtttattgctgtttgatgcaaatttgcagagtaaagtgaaaatgattgttcctatggtgattggggactaatacagacttctttgcatctatgcatcacgcgaagaactgcggacttatgttccgtgggcctgagaatgcgataaacccaaattggtgcgtttatgttacttttgagctgagagtttcttcatgaaatggtcaagtcgaaaggatgactctgtattaacatgacattaccatatttttcaggtttcgtcttcccattgcatatcatggacgggcatcatctattgtcatctctgggactgacattattcgaccaaggttaggaaattgtgtattattatctggtttttggtgggctgagaatggttgttaagaataattcacatgtcatatttaaagatcatgcatcatgcaaggttttatgctttgacaagaaatatagtttt

SEQ ID NO: 22083 - DNA, 478 bp, Arabidopsis thaliana landsberg
tctagcccttgacttcttactgcccaggcaaaaatccccatccttattatggcttcggtggtgatctggtgaaggaagatttggtagatcttcaggacatcaactacaaacttactcaaagggaaccgaagtccagccttgaagaagcttcgataaatcacaacttcattttcttcaggggcagggatgttgttgtcttcgccagctcttacaatagacatatcccgaaagtaccttcctctcatgttctcaagatgactttgtttgatggtcgattttccaaaaattgaatgacttggcctccagggccgatcctcagaatcttcgcccccactttccacatcatagctatcactgtcaccagtatcttcagacaggccttccagtatctccttagtaatcttctctgtatttgtgtttgccatcgactcaacaaatccagcaatataaggattcatagccttcttctcctcaaaaa

SEQ ID NO: 22084 - DNA, 584 bp, Arabidopsis thaliana landsberg
ttcgggaactacgcctagtgtatctgggcttgaaatcagatgatgatgttcaaatttacattaaaaactcaatccttgagacagtgattagtttttcctcatctcctcttgctgatgatgaaactaaaagactaatccttcaggtgatactttctttccttcatgtcatttagtgtttggtcttccttattcaatatcaatataaggttaatgctcataatgtatttatttggtctgtaaactatgggtatcttttctaaaccttcaagcccttaattcaacgctacataaactgtcgtcctttcacttttcaggttgtgaggaagtcagtcaaattccataagatagcccgacatctagttgaaaactgtggtctgttttcatggtgttcgtcgtttatttcaaattttactacaaagccgattggagacaaagatctgcacttggtagttgtcttggaggtatgtacagtatatccattaatggtattaatttagtcattggacaagcgtgcacactgtttaagaatatagattctgtgttataaatatgaagatgaatgcaaaattaatgaaattttctca

SEQ ID NO: 22085 - DNA, 580 bp, Arabidopsis thaliana landsberg
ctcgctacttccagcaatctaatcaaaggaccagttcacgtagaaccaaatcttcaacaacaaaagagaagacagattgaagaaacagatcgaaaaacacgaccactaactctgctattcataagctaatgcaatgaatgattcaacaaagcttcattcacaatccttcctcagctttaagaatgcgctcccgagatcaactaaacctctctactcttcgacggcgcagctcatctaaagggagatcattagaagaagaaagtgctggtccctgattcagtgaccatccatttcctctagcccgtcccgagccacacatctcgcaagcacttaaccaaccagaattgtcatatgtacacgactgacatctccaaataccaggtcctgctatcccagtctgacctcttcccactcttcctctccccgtaatcctccttctccgagacctaaccataccattcagaaacctcaagggccacgtcaccaatcgagatacacctctaaccgccatagtgactggatctgagcctgagtaagaacctttcagcttcaaatagataataccagcaaggattccacc

SEQ ID NO: 22086 - DNA, 595 bp, Arabidopsis thaliana landsberg
  unsure (1)..(595): unsure at all n locations
gatgcatcttgatcattctctttgctccttttgatctcgtcaatatatgacataatttttagaagatagatagacctttactttcatgtctatcttttgcgtgttctttgctgcttcgttaaacacattttcatgggaaaacccagtaggacaaaaaaccatgataagagaaaaagagtacaaccacgctcaacatcatgtgtctccctcggaagcatcttcttcaaaagttgcattttgatatgtgaagaaattttctgaatgttttagttggaagcgactttttgctacattgcttcttgagcaaatgtacagaaatcatcgtcctgattcttcttgacatcttgaatgtaacagaagaatcttagagaaatatgtattgtcatgtcgcttttgacatagcttcctctgaaattggaaaacatatgcaacattatcttgttgttggctcttcattggtgactatattgcttttgcttcttgtatatgttgatggcattaatctaagccatacatctttttgacatatttcatgaatcacanataatttggcatgacttgagcaagcaatgaacaaagtctgctactagaaacg

SEQ ID NO: 22087 - DNA, 545 bp, Arabidopsis thaliana landsberg
tctaaatctctgcttcttcggggcgataaaaccactgtcccagaatcatcatgcttccatctttagtttgggtaatatcctgtcaaagaagcatgtgtcattatttcaaagcggacgacacaacaaaaactaaaaagatgaatacaaaatttagcacaccagcaccttaataattgcaacatatggtttttgacttttgtcctcaggaaccagcaacaccggaacctcctacacaaaaaaaaaagattataagagagactagaagtaaatggtctctaaagtctcaagctttaaatcaaccagacactatgaacactcatgaaaaacaagtatacgatcctaaacattcaggtgcaagagaaatcatgatgcaaaaaaaaaacttccgaagtctcaagacactgtgcagtcagaactagaaatctaaacaacataagcgagagagaaacattcctctgacacagcaatggatgttcaacaaatgacaacaaccatgagcgtataagaccagttattgacaaaagtttctgttcaaaacccataaa

SEQ ID NO: 22088 - DNA, 458 bp, Arabidopsis thaliana landsberg
accaaatctgcagaattctctattttaaaatcaattatagagtagggttggaaattttttttgtttttttactctaagatagagtaggttagagataccctaaccaatagaaatatggagtttttgaggaactattggagtaaaaaattgagatttctatttttttctatatttagaagaaaaataaaaacaaccattgagatgggattagagcaaaatgcctctacaataaagtcatcgttaaaatggagaaaagaatatagatgttcattgaagatgttcaaagaacggccgacttacatattagattgatattgtttattactcgaactaaggctacaccgacgacatgaagtaacgttggtgggtatagtagcaacaaatctcttccctcgacatttgaacaaatttacgtggttagttatggtatttttttaacatgggctattaaatttttt

SEQ ID NO: 22089 - DNA, 430 bp, Arabidopsis thaliana landsberg
cccgtggtgtacaagtctcgttctaatatcgaccaaccccgtcctattataacactctgtcctatgaaattattttattattatttattttttaaaataatactgtggtttaaaagacattgtatatatgttcttcttaaatatatctaaatactaaatctgttcttcttaacatatttttaaaatgatcaagaattaccaagaacatgccaactataaaacataatttgaaaaataaaataaatattatgtgaaaaaatgaaaagacaaaagaaataatattggtattttcgcgacgatgttatgaatattcattttatgcaaagctatacaaaatatatcacattggtatttaaaaaaaaaaaaaaaaaatccccacactacttttctggtaaaacgtttgtcattttcctgtcttgagaatgtcatt

SEQ ID NO: 22090 - DNA, 2862 bp, Arabidopsis thaliana landsberg
tagcatataatctgaaggcatatagtatagatgggattaaaagaactaatttttggttttaaacaaactaactcagacgtgtggttatatgtttgtttaaatagttttgttactttgcgacccaattcaaatgcataatccgattaaaacaataagatgtctcaagaaacaatctagtaaaatttataaccaaaaatgaaatatcaaccaaattagactcttagaaacacattttaatctcaaagaagtgaaggttacattccaagaaaataaccacccagttctttgaaatagacttcaagtttgaactctttagtttcaactacccagttcgtatcgtctttataattttagtgaaaatttcgtgaaaaaaaaagaattttaaccagtggcaattatatcgaatgaaattgaaaatcttcgattttgaaagtttatttcaaagaacaatattgtttggcaaacatagaaatatgagagaaatggatgaagacaatcttcataatgtgataggtgcttgcttgacaattcatatacatcttagaaaatagaacccttttcgttttgtaagaaaaagttgaccaaaataatatccaaagttccaaaccatgtgggttaaaccgttaaggtaagttgaaaaaaaaaaaaccgttaaggtaaatgcgcgcgtatgatttgtcgtgtagtgaactatgaataaatgctaaatatggtcggccactacattatattctcatattccagaatcctttgttatatattgctgtgtcggcaataatatgaatgactttgaaaagtatacacaataatgcaatatatatgtaagtaattattttcattagggaggagacccgcgcgttgcacggggtggtttgtttttggttttgttagtatgtaattataacttcgaatttttttactgatctttgattaaaaggggaatatctttgttatttgcacccctcattttagttcggcccaaatcaagaataaactaatcaacatcaagcccaaaaagcccataaaagttggtccatatcaccagcttagtttttctataaatagagaggcatctcaaggaaaaaaggaggaagaaatccatattaaaacgtcttcaagctcctcagctcgttctctagctcctctgctcgtcctcaagcttatccgctcgccctcaagctcctcagctcgtcttcaagcttctcagctcgttctcaagctcctctgctcgtcctctagctcctctgcttgtcctcaagcacttcagctcgccctcaagctcctctgctggtcctcaagctcctcaactggtccttaagctcctcagctcgtcttcaagctctccaactcgtcttcaagctattcagctcgcctttaagctccatcactcagcgaccatctcctcgcctagctgtcagctagtcagctcgtgcaactcctcatctagctatcggctcatctctcgactgcaaaactcaagtaggacgagcttctcaagtagcttgctagctcgctcttcttcgttaagctccagtttaagctcttcaagctcttcagctcgtcctcaagctccttagctcgtcctcaagctcctcagctcgtcctcagctctttagctcgtcctcaagctcctcagctcgtctttaagctttccagctcgtcctcaagctaatcagctcgtctttaagctctccagctcgtctttaagttcttcagctcgtcttcgagctccacgactcaactaccatctcctcgcctagctgtcagctagtcagttcgtccaattcctcacctagtcgtcagctcgtccctcaagtgaactcatctatctcctcgcctagcttacagttcgtccgttgactacacagtccgcctatctcgtctcccagctcgtctagactttcaccagaactcgatttgtccgactcgtctctctactacatttcgtctagcttggcacctggctaccagctcgtcactcaaatactcagttcgtctaactcgttgtctatcaaccagttcgcctcgtaactaagttcgtccagctcttcgcctacctgccagctcgtcaaacatctgctagctcgtcgcctagctgccagctcgtcaccaacctgccacctcatctctaaactgcctatctcaatatacgacctacctccaacgatgacctagctcacttattataatatgaactacgtatggcttgatcccttttctaagggtacgtaggcagccttttacaaggtgcagctataaaactaataaactctatgtttatcgcaagaacgacctaactcccgaccttcaacgcgatgagaatgtttttcccttatcaaagaacttagaaatatactttgttgaaattcgtgcatcaacagggcagtgactgaaacactctttttctctttcgtcgtcctctgaattgcgtcgatcgaataggagaaaatgaaatcaagggtttgcaattttaactgggttttcttaggtcatttcggttcataggttttttgactaaatcttggcccgataaacatcactaagtctatttggttctttggctcatgggctttttgaccaaatcgtggccccataaacattactaaatctatttcacgcataaaaaaaaatgtgaaggcgagtaaaaacatgtgggctccacattaaaaagatgtagtgacgtggacacttttagaagagagaaaactctgctattatatatatgatttgtttattttccatcaatatacgaatatctctacttccttttttaaagactctttaaatcttaatcaatcgttcataatatatctccagttgcattcattatccttctaaatcctctcttattagtctttaatc

SEQ ID NO: 22091 - DNA, 1061 bp, Arabidopsis thaliana landsberg
cacatcaagtacacaatgtacagtaggtcacacaattcgatcgaagtgatcttacatttagctcattcattgcagccaaggcgaatctatgactcgtgaatgttgcaaatgccacaacctgaagatagtaacttcagaaagcttaaacatcgatagaatcacaaagtatacagcttttctaaaaatgggaataaaaaaaacagaaattggagatttttacaaacctggtcaccgcgtccagtgtacttgagctgacaagattcgaatccatgacgacgacggaagagattgtggatctcacgagccttaacgtcattaggcaagccagagacaaagagagtgttaatcgccccaggttcgtcggcgagcagtggcagctgcggcggaagatgatgaggatgagaatgaagttgatagacgtagaaaggatcgtacggttggtgatacgccattttcctctagccggcggcgaggttgacggttgtattaagcgccggcgaagagagctgacgtgtaaatggaagtgtgagacacactgtttaaatgtaaaaatatgttcctttttgaattttatgggctgatactattgggccttaatgaatggcccaataaggcgccaaaaagtgataaaagtaagcagcccgccaaaaacaagaagcgaagactttgacagttattaagtttgttcatacttcaaaacttaaaaacagagagagaatcaaaccaaacttacacggttacaccataaactataattacacataagatgatcaaaaacaatagaatatacataaaaatggagatcaatcgttttaagacgaagggtgtgacgtcagtcctgaagtctcagtcgtcgccgcttcttcatccaaaaaaagatcatccgtcttcctaatcaccgcatggatcagaaccaacacagctccggccatcaacgccgcaacaatattaaacgtcgcgttggtcaatagaagtagaacgatggtaatcaccgatagaccaatcaagaccgcacgatcgtcgatttgaaacctgaacagggatgtcgacctgcagacctg

SEQ ID NO: 22092 - DNA, 2767 bp, Arabidopsis thaliana landsberg
gcggtcaagcttctcgaagctgaaaagaagttggccgctgcggaacttgctctagttaacgcatagcgactatgatgtttccagaaaaggggaaagccacacaggatgctttcacccattaagagaatcccatcctactatccgaggccaaccttgagatttcgtcgacaggcgagaggtacaagcgtatgttgaccgaggagagaggtctcttggataataaaattgctcgggttcgtcgatcggtagcgcgagagactgcagctttgtttgttgagaggatgaaagctgtcgaggcgaagttagctatggtcgatcaagctagcgaccactggatgtatttggcgcatgctaaggcaaacaccgagctgattgatgcgcttgagggtgggaagcatttggaggacgagaaggagctggtagaaggattatgtagtcgccgaggcgacatataccagtctccttaaagaagttatggaagagttggccattccttatgttccttctaccttggatccccagagtcgtgcaggcaacagatcggtggaatgccaggtggatgagatcggtattgccaaccaagccggttcgaacttccgtggcgatgcctcgcgaaatgaaggacttgacaagtgacccgaaccagctttccttttatttttgtgtacgtaaagattggcgcttggatggctttatcctttttggtttttgtaaacacttatgtctggattgctttatccacaaatttcaccttttgaaaatttggcctctcataagatcccgatgcgttttattcgtttgatgttaccgtaacctaattgagtcgctctttcgcggaattgctttctaattacgaaccgttttattggttagggccagtgtgaatggaatagacttaactttttgcattggtgaaatcttctcggttgcgacctgatccgattcactctttcaccagcgtttagaaagaagctggggtaccggtattatgatataactgggttttctgaagatagaacgagattctgcgcgaagtttttccggcaggttataactcgaatttagatagtgcgttgtaaccaagtaggtttaaaagatactctgagccgtcgctcatcgtagtatttgaaacaggtacaaactgtgaaaagtagaacttttattcatgccaaagtgaaaactcacaagataaatgaaagtgggagtatggatatacggacccactcccccttttttaatttgggggtggggggtagctgaactcgttcgaagacgagctgcctaagtacccttcttagggatcaaaccacctcgtagttcaagtttatgcttctcacacttagttatagtatttcctgaggtgcatggcattccaggatcttggaatgactttgctgcttaaatcggcgagttcgtaaatgtctggtcagacgactttcgagattaagtatggtccttcccagtgtgccctgagttttccagcgttcggttcgggggtgttccgaaaaacttttcggagaacccgatctccttcgtggaatctacgctgtcgaacgtttgagttataatgaagagccgtttcattttgataattttgtatgcgaaccaaggctgaatcccttcgttcatcgatcagatcgagttcgtcgaggagcctctgagtattatcaggggtgttctcgggggatagactccggcgtaggctcggtactatcatttcggctggaattacgcattcttttctggagactattgcgaaaggggtttcttttgtggctcggcgaggagttgtccgatgcgaccagagaacacctacgaggtcggcccgctccctaagatgaaatcaaccgcgccttggatggtgcatctatggaagtagtgtcggccatccgagtcccacaaggtatcttgaattccagcaaatcctaccgagtaaaaagccgacttatcaccgccgataaatgctgccacggccggaactctagggttcttgtttattttcccattgctagggaagttgtaggaattctaatatattaaaagaaaccctttatatatatttaataaaaagaaggaatcatcataggaaatgccataatataaagtaaaatcacagtacggcgaaagtgatctttttaacgacggtgttatcagctagagtagcaaaggtagggctttgtgcaagcgaggcatggtcgtcccattctactctcgttgaccgtttcccagctcccacgattactatgaaaggttttttttgcggtatcgttattttctctcttgattttacaagacatagagaaatgacattagttagtaaacactttcacatatgtaacttccctacaagccatatgtaactttatttacagtcaatgatgtatgttgtgctacactgacctgtaaaggccggctttaacgttgatgaagaaccaatgagtattgttgattgggaccgaatcaatagctttttgtatggtcgtgaaatttccatggcccgattgatcgacgatcacttagaatggtttagcttcaatgagatgaggtagacaaaaacaacaaagagcggcgagaccaaggataattcgatgagttcccattattacagcttctgattttgatgagatgatatcaaaacgcaagagtttgtaagagaggtaaggtaagcgagagtattggaggaaatggattatttaacaaggtcgtgagatttaatgcttttgaatcaattgtagatattttgatgaagattttattactttatttt

SEQ ID NO: 22093 - DNA, 839 bp, Arabidopsis thaliana landsberg
gctgtttaaaacattgtccaaccgccagctccaatgaagacacatctaaagtagcataagtagcttcttctttttcttcttcgatgaatatacctaaattttggagtagtaactgaggtttttcttcttcttcaggtggaattccgtacatgctaaatttctcatcttcgaaatcgattccgtcagaatcgtcgcagtaatcgaatctactttcatcatcttcaccatccacataaatattattaacttcagcttcttccatgttttcactggataaatcgatatctcattctaccttatggaatatattacttggtcgtaaagaacttgtcaaactgcactcaacgaaaccatcaattccttcctttgtggattgaactataaatttctccttcacctcaacacaaagtcgagtggtttcattcttcatatgcccaaaaaaagctgaaaattgtctattattaccaataataacatgtggtgtatctgcgggtaattttttggatattgagatcttgaaaactacttcgaatagtctattatccaaaccgtaatcatcatacaccattggaacgaaatcatgaaaattggtttgactgttaccttcaagaactcgacaacttttactattatcgactacaaaaagccatatggttttctcaaagatcgatctgccacatacgagaataatctgattcatacccaaaccgcttattcttgttttgcctaaaacattatagtctgaagaaagcattattagacaacatgaaaaagtcgaaactcaaaaaaagaaacaaaaaaagaattgtcgatgagatcaagagaagaaacaaacgcat

SEQ ID NO: 22094 - DNA, 628 bp, Arabidopsis thaliana landsberg
cgaggaggatggacggcaaattgatttcccctaataggtgcaagggcacttgggggtcgccagaaatgtctggtaggtgccattggttgagggtggatacatttgcctttttcgcagacgattttgggcattttggattatcgattcggatagtactgaaggtgtacaaatagcgatctattaatgaaaatttttgtaactttgagatcgtgatagaatgggaaccctaatactttgtcacattgaagagggtggggtgtggtggtgagatgggttagtggcgacgtcgtgagtcctacaaaatttttaaaaaattagacatgtgagtaagttttctcatgtccaaaataaataattgtgtgtccaaagtttgttgtccaaatagacacagctttatggtatataaaatatagacgtggaatcgaacagggactcatttatgggggaacaggttctccataaacaatcaggtaatacatacatagactgtaatcatgaaacaccaacaacaaaataagatggataagccttagcaaatatataaacgaagattgaatagcaaacgagaatataacattaaaaagacagactagcagaagcttaaaaacagaaaaacaagttttagaaa

SEQ ID NO: 22095 - DNA, 529 bp, Arabidopsis thaliana landsberg
  unsure (1)..(529): unsure at all n locations
actgctacctncctggaatctgaagaaccccggagttcctcttttcaggtacaacgataaagaaccttattgtcacatatcccagtgcggtgcatgcagagggaaaatgctcgacacaggcaaagattatgcatgtctccaatgtcaaagaaagttccacagagaatgtgttgagtctccacttgagatcaaacacccttcccacccctttcattcttttcgactttacggactttcaacgtttcagaagtgcttttgttgtgaaacatctctctacgacatgttttatcattgtgctacctgccatttgagtatgagtccggtctgtgcgttgaagccggtacccattgtcatagaacaatcaagaagtcatgaccatcctctcacctttttccctgcacaagctttaatttgccatatatgcgccgtgattaagaagtatgatcccgcatacatatgagtgcaatgacgttttgtcgtacacaaaaactgcatctgtttttcacattgtataagaatatcacgtcac

SEQ ID NO: 22096 - DNA, 435 bp, Arabidopsis thaliana landsberg
aaggaagccttcgtgcttagagatgggactgtacccgatgttgacgtgaacaaaggatgtaagagtaaaagacctagggctctgtctagcacgttagatagacggttccactttaacaagaaaaccaagctacttgttggtcacccgtctcctttactgagggttggaaaagttgttacagatccaggagaacgttaccaacattctctgtccaaaattaaaggcaaaatgtaacaatgttaccttataaacccgttaggggggtaaatggtacattatggcttatttttataagataatatttttttgctactaatggttaattcaaactattttcatgttttttgcagttctattagcattgttggtaaagttttcctgtcacccaaagagatttctgacattattgagcggaagaaacaattcaccaacaag

SEQ ID NO: 22097 - DNA, 1170 bp, Arabidopsis thaliana landsberg
  unsure (1)..(1170): unsure at all n locations
ttcgatgcagataccctacgctgagaagcatcccattcgttaccgctatggattaccttgtcatttatgggataaactagagtgggtggagtttaccgagagagttgaatttcttaaactggatagtgaagatagcagggattttgcggtgctttttgctggaggaatgagaaatttggtgatgtatagaagccgtaacatgagttggactcgagttgtggagtatcctgaaacgtattcatatcaagatctggttgcattcaaaggaaagttttatgctcttgattcaagtagaaggggacgggtctttgttgtcgaagtttctttggaagttacggagatcccctcagtcggaggatcgcaacagtcttctaaagaaagtctggttcagtcaggcgaggagttgttgctagtgcaacggttcacacctgttgggcggcgttatgatgaatatatatatatacatggttcagagtgtttagacttgatgaagaaagaggaaagagaaagtgggttcaagttaatgacttgaacgaccgagttatctttcttggagctcagacgaatctctgctgctcggtacataagctcccatgtgcaaaggagaattgcattgtgttccttgaatcaaatgatggtttcatctttgacaatgactcggtccttttgtttgacctaaaaaccagaagaactagtactgcgtttaatgaatgcaaaggctacatgggcgtgttcggcgcaaatcttgaatctttggtgtcttgtggacttgtgaccattccaaacccaacggaaagctttgatttcttttataattatgaatggtagtcttttaaacattataaggttctattaacttcaaataatgaaaaagtaaggtccaaaatatgtctgtgaaataaacattataagatgttacatcttgaaacatgaatttattatattagtattntaaagattatttttaaatttgttttatttattttcatgatatcgatatgtgtaaatcaaatctatatatacatttttgcagcacttttttgaagataatgtttgaaatctgagctttatttcatcactaaattcaaatgggtgagttttatccactttaattccgatcctggatttgcatagtttatggaatatgctnaagggaatatatctaatact

SEQ ID NO: 22098 - DNA, 634 bp, Arabidopsis thaliana landsberg
acaacgttgtgaatttgtcaaagaagaatggaagacccatttctcctacgaggggccagagtttagtcttacacatttaggagcggctcccatgatacttggctcacttttctgaagaataaagcccaatcggttgggcctacatctttttgttttttctgcaactttatagttttctagtttgaataagtcaccacctatgtaggagaaagaatcgtgacattagtttagttgcagagtttcgtagcttcagttgctttctttgtaaggtcaatttattgagcaatctgaatttaatgcaagtaagagttttcagtacttgttcttgcaaatctttgtttttccttaaagtgagatttgataaaacaaaattttctttgtagcttcctttattaacatgaacaataaggatcacattcttttggtattagatgtatcaatatcgttgaataacatattactttattttctatctaaacattatattaggttatgaatccttaaaacaaaaacgtaagatactattatctgatattttcatatattaaaacattttaatatttatattattacaatattacatataaattatttataaattctactcatttagcattattcgcactattatcac

SEQ ID NO: 22099 - DNA, 880 bp, Arabidopsis thaliana landsberg
  unsure (1)..(880): unsure at all n locations
gtcgatgatctcttctaaaaattcactcttcgtctcagaacatatccgtaaggtttgatcggaggaaaaagcatcttctgtctccggttaatcgagaacgattaaaggtcggatctttaaattaacttcccctgttattagtaattcgttagcatggacgagcagcagtttcgattaggattccatttttggtctgaattcttgtatatcttgaggattgaaattaggaagattttgcgtttgattaggatattgagagacacacttaggttgctgatatctggagcagtcaagagaggtggagacggaaacctaggcctgtaattacgcggatgctgcattggacggaaaccgttattattttttgacgatgcagagtctctggtcgaggaggatcagagttagggtaaggttatctaggagggaaaggaccaggtcgaggaggataagtgattttgattctgaggattagtcatgacattaccagggaaagtgttagcattgctagagggtaagttgggaggatgtctgctagtggaaacagatggctcgctactgcaaagaactcatgtgggtctttcttaaagtgtatcctttgagtgttctgttgttgctgacggtaattattgttcggctgatgatttgatggttttggaacatatttgaccttggatttgttgtcaaagactctcctggagtcggaatttgaattcagnnnnnnnnnnnnnnnnnnnnnnnnnnnnnnnnnnnnnnnnctttcggctcgtgttagagggattactacagtatgagaggcttgtccaagccacccctttttgcagcatgataacattgtaccgttgtacagatgctttgagacgctttgccaaaaaacattgaa

SEQ ID NO: 22100 - DNA, 482 bp, Arabidopsis thaliana landsberg
gtctcttgtactgatatgctctgcaataattctgaattcatccaacgcttgttgggttggaccttctggtgtcatgttgcaacgaggtcgggtttctccgaagattagttcaagtggactttgcacaagcttctccttgtcgtcatcaaccttgacatagaaccactccgacttctagcctgctgcccatttgcttcggtaactgattacaggaaactttgtggttttccgataagcaaaattatagcaaccaaaattgtcatgcaatccatattttctagccttcgtctgatagtgcagctcgtgaactcgacaaaagctgtccgcaaacggctccaccgcttggcttcggagggcccagatataaacactaagcctaacgatagcgttaggagtcaactgatgaaagtagataccaaacctcttcagtacctctgcaataatcccatgtagggggaatcttaatccagcctttagagggt

SEQ ID NO: 22101 - DNA, 524 bp, Arabidopsis thaliana landsberg
agtgggattcaggttggatagtttattgatattaagcgagattcgtgctgataacagcaagatgagtctcatgcgttatctttgcaaggtaaaatacaatgcgaaataaagaaacatgcagcgtctttgctttagaaatcatgaaatcctcctctttgcttttcccaggtccttgcttccaaggcatcagatctactggacttccataaggatcttcaaagtcttgaatcagcttcaaaggttttcctttctacttactttttccgtcctgctgtaagtggctcatcatttgattgtcctgtctattgcagatacagttgaagtctttggctgaggaaatacaagctataaccaaaggattggaaaaactgaagcaggagcttaccgcatccgaaactgatggtcctgtttctcaagttttccgtaaagtatgttgctggttttctatcttctccatcttttgcatatcttttatcaatcatgattcatgaatttgagattaggtcctgactgtgccacataac

SEQ ID NO: 22102 - DNA, 557 bp, Arabidopsis thaliana landsberg
caaaggaagaaggagaagatggcccggttggccgatcttcagaagaagattgatgaagctactgaagaaatgtgtcatcttactgaagatcaccaggaccgaagcctcaacatagggagcttcatcaagggagatcattcaacgaagatgagtggtatgatgactttcatcatgataactttacctttgatgatgcttctcctctggcggcagaactgcaggctatctcatggccacaatcgtacaagccaccccagttgcccatgtatgattcgcactcggatccaaagcaattcttgatgagctatgaggcaacaatatcctcatatggaggcaatgccgatgtcatggaaaagtccttcgtcatggcagtccgaagtatagcccaaacatggtactcctctctttggccaggacaaattacatcatggcagaagcttaaggatatgctggtcaccagcttccaaggtttttagacaaagccggttactgcctaggcattgtttcaatgcacacaagaccaggaagaatacttcaggcgtatgtcgaagatcctg

SEQ ID NO: 22103 - DNA, 549 bp, Arabidopsis thaliana landsberg
cagacactatggttccgtgagttttataatgtgaaaaggagatttttacttgagatcaccacaatgggattaaaagcagaatgttggtctaatcatacttttaagttgaatggctcaaaagttgacaacaaatccctaagcaaaaatttcctttggtaacaataagaaatttgaacaaaaagaattataaaagaagaatctacgtagatgctaacaagggaatactaaacacaaaaactgattttatacaagaaaccagaaggtgatacagtttggatcctaggattatgtcattagcaagcaacaactacaagctttttgatcttcaagtgtgagtttgctgcaattcgttaaatatgagacatgatgtgtcccaaagttccttagccattttcgggtcactggaaagtgctgaagattcaatggtcctcccgccaaagaaatatttgcctgatatttcctgcaaaaacagatcaacatagagctcttcaaccacataaggttgatgcagataagatgaagaattccaaaagatcatatcttacaggt

SEQ ID NO: 22104 - DNA, 406 bp, Arabidopsis thaliana landsberg
gagcaacaagaagaattcacaaccttctctttatacttaatatctcgtagtgcaaatataaaagcggacaatcccgcaggaaaaatttgtactcaactgcgtcgtattacttatgtaaacaatattctttaggataggctcttctaagctcttaaaaaatatgatgataaaaaaaaacttaaattagggacaaaaaaccgacatgtacaagcgaataaaaaaaatagttttattgaaaaatggaagaactggataaaacaaaacataaaaaggtcatatcatcttagagaattctcacgattactattaatttttactcttaacatgaccatgaacataaattagatacactgaaagaacttaagaggactataacttcgatccttaatcccattgaattcctaaa

SEQ ID NO: 22105 - DNA, 1309 bp, Arabidopsis thaliana landsberg
  unsure (1)..(1309): unsure at all n locations
cttttctcttctcataccaagggggccttgggggaggttttcggcaagcatcggcgcctgtgcgataaaaggcagcagttgggcctcaaaaggcaaaacgcttgaggccagaattggtcgtgtgtaaaggaaagtgagggccatggaaagtgatcccttccgatgggagtggaggaacttcgactgtgtggccaagatcccaaccatgctcaaggccaagttcctggtcctgtgaatgcttcggtcgaagtgatcctatccaacagcgaagaggatgacaacgaggaagaagacagcaacccctagcagcgcgtgaagaatgacttcgaggcggatgtcaagaacgaggcatccacttcgaaccctgaaccggcgatgaaggagcctgttcctgagccagattcttaagtgtcccccgaactcgaatactttctctctctttttattttgtttggacttattatggccccgacccatttttatttaaggaagctttcctattcttcctgatttcgaaaatattcgtttcggagatacgttttaaatgcagggcagtccggacggcgtgaatgcttccgcgaatcactccgaccttgaatgggatcgcgtttctcaaagctatgagtccttctataaattgtccctccaaatcttctttaactttcatctaaccctcttctttcttgcagtcatggctttcaaccttcgatgctcggaatccatgcaagatttctctagggccggaatgattgttcaggacatcccgaatgtgccagacagaggacgttccccacctcgaggtttcttcagatcccagatccgagctccatatgcactgatcaaggatctttcagacagagaccaagaaatcgcgatgtccttcatcaaggctctccaggctcaacacaaaaagcgttcttcagaaaagaagaaactccgagagaagatcaccaaatgctgtgaagagtcaccgtgatatcaagggagttacacaccctcaaatttcaccccggagattggatcgaactcggaatcacagattttcttgcatcccgaattttcttgcatcctggactgtatgatgcccattcttgacatcaccagtcaaggggtcgaagtgttctgcaagacgaggaggatttcctagttcaaaggacttcggcacattttttcttgttttccgctttgaataaatttagctntgcttccnnnnnnnnnnnnnnnnnnnnnnnnattccttgttttcacttgttcgtataattgaactctcttttcatcatggaataggacaaatttaattaataggctg

SEQ ID NO: 22106 - DNA, 479 bp, Arabidopsis thaliana landsberg
  unsure (1)..(479): unsure at all n locations
agaaagcaaagccaattttctattctaacactaataggaatagacagttttttttttttatagaatttgaaattatcctttgtcttcatgtttgcttttcgtctcatgaaaaggaaactctttagtcttctagaatcttctccaagtttctagtatnnnnnnnnnnnnnnnnnnnnnnnnnnnnnnnnnnnnnnnatgtttgcttcacgttgctctgttctcctgaactacttcgtgaggtattttgacttaggttaagaacaacttcaataacttcgtcttcattatttgtcatccataaatttcgctttctgtttctctttctcttgatataaaactcattaaaaatacatcaacacaagtctcaagtctcaagactctcaactatgattaatgtaatgcaaataagttaggttaaacattcaataactctttctttagattttctttgtcatctgttatttaagggtcttaaacct

SEQ ID NO: 22107 - DNA, 779 bp, Arabidopsis thaliana landsberg
tgcataaaattctcatatacacaaaagtcaataacccaataacattctacataaacaaattcatagcttctatcacagtatcatcaaataggatcgagaaaaataaacgcataaccgagagggatagcgaagatttataagcaggacagtgaggtgatgaaattgcagagaagctgctatgtaaggattctaaacgagtttgaggagattctgcttcagaaataccagcagcggaacatagagcgagaggaagccatcctctggagggggaaagcggacgtctttaaggctaccttctccacgaaagacacatggaatcatatccgaacatcatcaaatcagagggcgtggcatacaggagtttggttcgctcacgcaacgccaaaattctctttttgtgcttggctcgcagttaggaatcgactttccatggttgatcgtatgatgacatggaacaatgggacacccacgacctgtgttttttgctctagccctatggaaacacgagaccatctgtttttccaatgccactattcttctgaaatctggacttcaatcgcaaagaatgtgtacaaagatggtttttccacagattggtctgctgtggtgaattacatatctgattctcagcctgatcgcatccagaatttcttatctaggtacgcaatccaagtctccattcattcaatttggagggagagaaattctcgccgtcacggtgagcgtcacgttcagcttcaaaccttatgcgacgcgacagatagactagacaattagaa

SEQ ID NO: 22108 - DNA, 1146 bp, Arabidopsis thaliana landsberg
  unsure (1)..(1146): unsure at all n locations
gcttcgattcgtggaattcagagcacaaagcttctacaattgttgtcggcacctatataaccatccaatttcagtcgatgctagggtttgctctttttcatttggggtttgctaattagatagagattacatcagtttgggttgatagaagggaccatagttgtttatatttgtgtcctcttccctacaaccaccgaattgcagtcccaattggtcgcagcgaagggctccatcaagaaacttggttgctcttatatccgggcaggcagtcggaggtatgaatagtactattttgtcttttagactaatcaatagttttattgataggaatgcatctcataaactcggattcgaggaattgtatttcgggaatccaagttattccaaatttatttgtgtgtttaattacttgggtttttgttgttgaagacaacaattgtttgccgttaaggtagttttagggtttactcctttgtgtatgtaatccattttttatgaatgtaacttaatgagaattgggaacatattgcatgtgtcaggtaaccacatatattgacatctattgaactatttttttcaagttgtattatgtgctttgtatattttgaatttgggtatttataagcagcaaatcagtgatgattgttcatttgattttcaggctatctgttcaatgggggatgtcgagttgccagagcgtttgtttcggcttggtgttgaacccgaaggccgaaagcggataaacaactactttacccttaggtggattgagatcatcaagtctgctctagatcaagagcatttgaagcagttggagggttcacaatttggaagtctcttgaaaatggggacgaatcagttttcaataatgttcttgcattatattctatcaaggcaggtggtgacagattagaagtacaaaatgtggtgggtgtttgtagggaaaccaattcgattttacattgatgattnnnnnnnnnnnnnnnnnnnnnnnnnnnnnnnnnnnnnnnnnnacaaaaaagatgcaagaactagagggaagatgaaagcggttcagaatccgacgaggttctacaagtcactatttgggaaagagagaaacctacttgaaaatggattgtaggaaacctcactatggggaagaaa

SEQ ID NO: 22109 - DNA, 545 bp, Arabidopsis thaliana landsberg
ttactgttgtgtctcaagagacaatcagattctttactctttcttcggtggagaccaaaccaacgagagtcttgctgctctgtgtttagaaaagtctcctccttttcatacttggtactttgaaactattggtaaaagaagatttgggtttttaattggagatgggtttgtttatttcgccattgttgatgaggttttgaagagatctagtgttcttaagtttcttgaacatttgagagatgaatttaagaaagctgctagggagaattctagaggaagttttactgctatgattggttctattaatgttgaagatcagcttgttcctgttgttactagacttatagcttctcttgaacgtgttgctgagagtagtagtaacaatgaattgaagagtagtaatcttggtgaacatagcgaaggttcgaattctactaaagctccgttgttggggaggttacgtcagcaagagaagaagaaagggaaagatcatgtgattgagcctgaggaccacaggaagtctaatgatagagggaacataaccg

SEQ ID NO: 22110 - DNA, 1221 bp, Arabidopsis thaliana landsberg
cttctccaccctattatatattagattctaaacaaagttttctttaaaattactttatatatagaataacggtattctttactttattttagagttaaactttcttatttatactttagttcctcaaattaaacttttttatttaatatatatcatcattttacaaacaacaactacaacacatagttttataaaattaacaagcaaacaagtccgaaatttaaaataaacaatataagataactaaaacataaaactaataatataatattccggtaagctgcttgtagatccgccaagatagttaaaatattgtccaaatgaagtagatggagaaggagtttcttgatcttgatcttgttgttggacacgtcgtttttgtaaaatttgtgcttgttcagtctcaaaatatgcccgaacatttgggttttgaaggaattcaaatcacaaaaaaaaattttgttttcttcttttagctcattcaaagcatacttttttttattctccaaatgatattctcgttgtgctagtgtcttctttagttgttctaaaagttgtttatttctttcttctaaggtgttgataaccgatgttgattgatcaacaaattttcttttcattttagatttatttaccccatttgatcaaggagatgaagatccactaataatctcattatcatcattaggggtgtcaaaatgggtcaaaattcatgggtcaactcaactcaactcaacccatgaaccctaatgagttattttttttgactcaaatgagttgatgggtcaaatgagttattgggtcaattggtttgatgagtcaaatgagttgggttgtaatggtttacccaattaacctatcaagttttgtaaaattgaaaaaccaactaaaatctctaaaccaatgtcaatttaaacttaaccaacacatctaaaccaatttaataaaatcaatatttttccaaaatttttaaatgtacaagcgatgaaattgagaaaaagtaaactcgtaattttccaccaaaaaacataaacccgtgattttcccgccaaaaacgtaaaccggtgattttcccgccaaaaacgtaaacccgtaattttctcgccaaaaaccaaaacctgtggttttctcgcgaaaaacgtaaacccgtgattttcccgtcaaaaacgtaaaaagtaattttctcgccaaaaacgtaaacccgtgatttgtcccgccgga

SEQ ID NO: 22111 - DNA, 603 bp, Arabidopsis thaliana landsberg
tctctcatataattcaggttaatatacaaatatattatatatataaatatatgaacttaattagttttgtctaaattataattgttaaaatagaattcaattccaacgaaacaaacggggccttagtctaattctggatctgccattgcttgtagcgtgtcatttagcctatctatataatagttagctcttcggtatgttatctctcataaagctccttcgtttttgtgtcaaagccatatgtaaatttatagtccgcttctcctctcttctccatctcattatttagccagtttatagccttttattatgcttgctctaatagcccagtggtgggcttcggctcagattcgagcgccacacctaggggtgggcgttcgggttaccgaaaaattcgggtcggttaattcgagtatttattaaaatttcgggttttgagaatcgatactcgaaattacaacgggttttataatacccgaaaattcggttaccggaatttcgggttctggtccgggtattccgaactaccgaattgttgtgcggctttataaacacatacacctattaaattagtataaaatacagctgaaaatgatataaatg

SEQ ID NO: 22112 - DNA, 603 bp, Arabidopsis thaliana landsberg
tttgcaaaaattttatatataataaatattcttaaattttaaaagttactactttaaaaaaaatcacgagacgggtaaagaaattacagaacgaattttattttggaattgggttatatggtagatgtatttgaatcaatatttataaaattttaaaatattattaatatgttgttttaataaggattaaaacttcagttttttaacaattgtctcatgtattcgtagtataacgttatttaataacaattataaactataaaatataaatattttataaaaataaaatttacaaattttaatatatattatctttaaaaaataaatcgtcccccggtataccgcgggttaaaatctagtacttggtaatgctatgtttttatcaaaagtcaacgagattaactaagcaaccacaaaataggaaaacgcatcaaacgcacatatatatgagatcatgtatatgattatatcatgatgatactcatgggcgtagtcaatttacattgtagaaagtcttgtcttctttaaacagttggtcaatttaaattgtccaataaataaacaaatattatcacaattcacaacttcttcgtcacaaagaag

SEQ ID NO: 22113 - DNA, 497 bp, Arabidopsis thaliana landsberg
gtcacaacatatagtagcattaggcaagcattcaaagtcacagaagggtcggctaaagtatcacttaacaacaccgggtatcatgctttaaaagaatgactgggctttccatttctaactaatctagcgacctacagtcacattgctcttataccatttgtaacacctcgtccactctcagacggtacttactcttagcagccctcttggaccatagaccatccccacagtccaacacgagtctcttgtgcacactttgtcctcactcgtgcgcacccgcgaagacttcacggtcggtcacccatcccaaaatttctccaagccaagcacgcttaacctggaggttctttcgagacaggcttctgaaaaaagatgcaccttgttggtatgagtactctattaattctataaagccttgggtccggatatcaccatccactagggccaggatatcacactgccctctctgtcttgcatgagcattattagaagaagag

SEQ ID NO: 22114 - DNA, 2440 bp, Arabidopsis thaliana landsberg
agcccacgtgcatcactttgacactctcacctgctgacccagatcttgccacctcagatccaattaatgtctcccgtgaggttgatccatcgggttagctttttccatgctattcatctttccacctaatattacccaacacattattctgtcatcctatgtctcttataatcttggtgatcttcacaggggacagaacatttggtgtcttgacaaagattgatcttatggacaaggggacggatgcagtggaagtaagttgaattcccagtttatagaacatctgtactagaatttcgaattactgtgaataaaatgtgttgtaattagtctatgatatgatgttggagctataaaatgctaatttgtgtagtaacatcataatacttatgttccctcattaatgtttattgcgtgcaccgctacttaccaaatgatattttttgctcagattctggaagggagatcttttaaacttaaatatccgtgggttggtgtcgtcaaccgttcccaagcagatattaacaagaatgtcgacatgattgcggctcggaaaagagagagggagtacttttccaatactactgagtataggcaccttgctaataaaatgggttccgagcatttggcaaagatgctctccaaggtacgtgctttcacgaggctaggggtagttttcttcaccaggttttttataataagtaagttggcgttgtgaaatttgttaggagtggtaaataagagtttcagggccagtgttttcacgattgctgctaattttcttagcagccgacagaaaatactaagaaactacgaagttattgcaatgcttaacacgtttctctgtataaaaccatcaggacagagcctaattgcaacaattttatttgttgcgcagcatctagaacgtgtgatcaagtcgagaattcctggcattcagtcacttattaacaaaacagtattagagctggaaactgaactaagtcgccttggaaagcctattgcagctgatgcaggggtaaattgagtattcttttatttttgattgaattgcgctatcaagatttacttaatgttctgatgcaggggaagttgtactcaataatggagatatgtcggctttttgatcaaatattcaaagagcatcttgatggagtgtacgttttgactctttttacttcaaatgtttaagattacaccatgagttgttatagcgtctgagttgatatttctactcttgaccttctgaaactacaaaaggaaaattgtaatttaagactatggttgattacacaggcgtgctggtggtgaaaaagtgtacaacgtgtttgataaccagcttcctgcggctctgaagagactccaatttgacaagcagctagcgatggacaacatccggaagctggtcactgaggctgatggttaccagcctcacttgattgctcctgagcaaggttaccgtcgtctcattgagtcttctattgtctccatcagaggccctgctgaagcatctgttgacaccgtatgaactctttactttcatctctaaaaagatgtatcaaaaacctaacacaaaacaataagcttctctctccgttttttttttttttctatggttaaatattaggttcatgctatcttaaaggatctggttcacaagtctgtgaatgaaactgtggtacgttcttttttcttttagtaatatatatatatatatctccaacaactagtacttttgtacaatgttatagacggtttgaacatgtgcaggaactaaaacaatacccagctctgagagtggaggtgacaaatgcggcgatagagtcgctggataaaatgcgggaaggaagtaagaaagcaacactgcagctggttgacatggagtgcagttacctcactgttgatttcttcaggaaacttccccaggatgttgagaagggtggtaaccccacacactccattttcgaccgctacaacgattcctatctcagacgaatcggtaaggttaacccatataaataaataattatctggtaccgtatatctcacaaattttagacatttggcaacaggatccaatgttttgtcttacgtgaacatggtctgtgctggcctgcggaattcaatccccaagtccatcgtatactgccaagtccgagaagcgaagcgcagtctcctcgaccatttctttgcggagctcggtaccatggatgtaagtgctctctgccttttttcttaacctaaagaagtgtcattcgggtaaacactgagtcaactaatatggtgatatccaacagatgaagaggctctcgtcgctattgaacgaagatccagcaatcatggagagacgcagtgccatctcaaagcggtaagattgtatcgagcagcccaatccgagatcgatgctgttgcttggtccaagtgataccggcatgtcatg

SEQ ID NO: 22115 - DNA, 1551 bp, Arabidopsis thaliana landsberg
accgctcaatggacagtctttggagattagtggctgttgaatgatcattaagctccttcagatttctggaacaagggaaatggagccactcgagatttctaagcggctgcagtacaaaaaccacaactagaagtttagaagtgtgaaagcgtttcaaagccgttcgtatacatcaaataatccattcgaaaaagaaaaaaaaatgaaagttggagagaagtaaataaagagaacaaacagttacttgaattccttcccacaacttctcaagcttgctgtagggcatgcatagtttaacaaggaactccgcatgaaactcagagggcaaacttgtcatcggaaattgttgccaatgtaataacctaagttttccaggtaaatagtccagacctcgcgggaagtgcaatttactatcataatccagagacacgcggtgaccgcgaccgccaaaatagtatactccgtgacggctaaaaaggtcaccataaattcttatgaactgaagattagacattcctcggaaggctttctcacttatatctaattctttctccatcgtattgaagtcgaaatctatgcctattacacttctactgccctgaagaaattatatagtttagttgtcaaatgataagaacaataaaggaagaaaaaatatatgtcaaaacttactgtatcatcagtgagtacttcacgaatatctgttgcatcaaccaaaaattgacgttgtccaggctcatgaatggattgtttacgaacaatttctctaccaagttgtgccagcagaacatgcatacgtatcagtcttaaatccatatgtataagcgatttctcagctaagacgtgaagcccttgcctcaaatccgagaacttctttccaagctgctgttctactaactcggtatcatcattgtggaaagagcaagctagatgaaggaacaaacttttatctacatcacataaggcatcgtaactgagttttagaatgctctcaatttttccgtcaaggtgagtccttacccttggtagtgccattgtccactcctgcttggtcattccccggaaataggatcccataaccttaagtcccaaaggaagtctacccgaaagtgttgtaacttgttgagcaagctcctcaaaaccatcatatggggacttttgaccaaaagcatgcatgcaaaagatttgaagggcctcttcatagttgggataatccacctcgtaaatatgttcgatcccatgcgccctcaaaattcctcggtcttgggttgtgatgataatccgactcccaggacctagccaatcattttctttcgccaaggcatctacttgtactgactgattcacatcatcaataacaacaagaactttcttgtcgttcaacctttcttgtgcaactcctaaatgtgggatctggacattttcctggttggttatttgagacagaaaccggtgttggtagttgcaacttttcatagtagatcatcggaacacgctggtatttgtgtaccccgtttttgatactctccataaagacacttcagttgaaat

SEQ ID NO: 22116 - DNA, 624 bp, Arabidopsis thaliana landsberg
gttccaaagggggagaaactaggaacactaagaggagaacttcatttagggggagttttgtttagtaaaaggaaaagcatttgaaacagggggagaaaaatttcaaaacatgaaaatgcttcgcaaaatcttattcattcacctttgactatttgcaaaagaactttgaaaaggacttacaaaagaatttgcaaaaaaaacaaaacaagtggtgcaagcgtggtccaaaatgttaaaaataaagaagcaatccatgcatatattataagtatttatattggctcaattccaagcaacctttgcacttacattatgcaaactagttcaattatgcatttctatacttgctttggtttgtgttggcatcaatcaccaaaaagggggagattgaaagggaattaggcttacacctattttcctaattgattttggtggttgaattgccaacacaaataattggactaactagttttgctctagtgtataaagttatacaggtgccaaaggttcacacttagccaataaaaagaccaagaattgggttcaacaaagagagcaagggataaccgaagtgtgccctggtttggcgcaccggactgtctggtgcccaccggacagtgccgt

SEQ ID NO: 22117 - DNA, 645 bp, Arabidopsis thaliana landsberg
agactcagttagtggtttatgacttgaaaggaaatgatgattttgaatatagaagttctaccggttcaatctcaggctttgtgatctagaacacagtgtccctctatcggggcatttacggttcagtgtgcaagttgtttcaaatggagactcatgccttcaatgcagaagtatgaagagattagggaacagcttcttgaaaacccgtttttctgcgatacagcgcgtgagtggaagccggatatttcttgtgatgttcctgctgatatctatcaagatggaactcgtctttgggctattgataaaccgaatatctctcgtccacccgctggctggcaacgtttactgcggattagaggtgaaggaggtaccagatttgctgatgtgtatgtcgttcgttaactcttctctcatttatgttaatattagtctttcttctttataccattgtattggctttctttatcattcttttatcttggttgtttcagttattatgttgctccgtctggaaagaagcttcgatcaactgtggaggtccaaaagttagtttctctaccactccatttccacattttcgttttcacatttaacaaagtgttccttacttttatgtttgatgaggtctcactgtatcagtcttac

SEQ ID NO: 22118 - DNA, 396 bp, Arabidopsis thaliana landsberg
gattgtcgtgtggagtgctttatcgataagttctttaatggacattttcttaatgttcgaatctgcccgatcattggggatcaaccccggctgtactaccttgcgggtaactgtatcggatgattactctaccaatcaaaaatctataactcttcagtcaacatatccacccggtgtataccgtaggtcaaagatcctatgatttacggatgagttcaggtgaattaattggtgataccgagcatgtgtcaaatggccctaaatcaagtggccttcgttttctaggagagttctatttgccttaatcggaattatacattttgtataatattgctggaggttgataaaaaagaagaattctttgcttattctgaaaatagatctgctcgctatcat

SEQ ID NO: 22119 - DNA, 2830 bp, Arabidopsis thaliana landsberg
aacaccctcggttaagcacctttaaacttcttgatctgctctcttctcacagcagcatacatcttatcaccctatatgacaaaactaattttaaataataattagtaaaggaaaatgatgcttgaacacactataaggtttacgaaaatataaagttgaaactataatacgtacaacttcatcaaccaaaatcatttcgatggattcaccagcctttacagaatattgcctccaaacatgaagcaatttaacctgaatacgccaagcgttcttgtaaggttttagtgatttcaagggagtgaatggaagaggattggcgagcatcatttttaaaaatgaatttggaaatgaaactatgtgagtgtaaactgagtgagtagattgaaatgaggcgtccgatatttataagaatgagtggttaggtcaaaacaatatgcgcaaaaactattatccttggaattcaaggttattccatatcaaaaatccgaaacattataagaaaatatttattattttccgtaaaagtaggtatgaatataggaaatacttataaaaaatgtaagatatcacgtttcatatatagaattatggagaaatgtaaaataattccaaaagaaaatggcaaagaaatattagatgtgctataattatggagaaaatataagataattccaaaagaagatccaaacgaaatattatatgtgctataattatggaaaaaatgtaagataattccaaaagaagatccaaacgaaatattgtttcatggataattatggagaagtgatatatacttaattgttaacaaagatacgcaaaaaattgaatgaaattaatacgattagtttcctgaaatatagtcggatgaatttatgcatgaaactacaaaatcggacggcttgaaataaatctattcaacagctaggattgaaaggagaatcccattttttaaaaacaggataaaaagaagcgcgtgtttttttttgggaaatacgaaattgaacggatacaaacaattcaattcaatggccaagattagaggcgaatacccattagtttaaaaccgggtaaaatgatctgcgtgtttttttaagcgaagctgcgaaatcgaacggataaaaacaattcaattgaatggccaagattataacgtataacccaaaagttgtaaacccgggtcaaaaggatccgcgtgtttttgaagtgaaggcgagagatcgaacggacacaaacaattcaatcgaatggccaagattataacgtatgacccaaaaattgtaaacccgggtcaaaaggttccgcgtgttttttaagtgaaggctcgagatcggacggtcaaaacaattcaagcgaacggccaagattataacgtaacttaagttattctcagtaaaaggtaaactttttcatgacattaaccatttaaacatatgatttaaaggtaaaaaaaaaatttaaccgagaatcacttaacgtacgtctcaaataatagagtagatataatgttttttgcatatatatcagtctttgaaatctaatcattggttcaataactgagaatttgtttatagtcaaatatattattaacatagtaagttggtttgtaccccaagtcatttcatccatacatcaaaccctatccatatttcgctaatgatattatctcgataatgcattatctgcttaactatcctgatttttatcatatctccttgtagggatatatttgtcatatagattctagatgaaaaaattaccgaaataaatggttttcatgtgtagattcttaattatttgttgtgcatgtataaatttttaattcacccaaaagttaattatactatgaagaccatcatatatatatatatatatatattttccttccaaaacatttattattaacccgcttgagcgtttacaactgttactagaaaattaggacatgaatgaaacaaaaaaccatcatcaagactacgttgagcttgtctggccaatatgtctgcacatttattctgctctctatggtggaaagtgaactttgtctctgtgaacatggaccgctagtgccagatctcatcaagataatgtcgtagtcggggagttacatctttgccattgattagtcggattatgttgagattatctccatcaaactcgacctttctgtagcctaagttccatgatgtccgaagtgcccatatcaatgccgtacattccgattcttctaccattgcccgtccttggaatttactcatgccacattccatgaaagtcccgtaggaattgcggattatccaccctataccagacgcacttgttccttcatggtgagatgaatcatagttgcacttaacccagcctctttgtggtgttgtccacttcgctctagaggatagatgtataaggatatagaaagcttaaggatctacttgtaattacttataagttaaccctagtctaaacagtatatatgttgtaatcactttctctaatcaatacaattcagtccttgcttataagatgatgattaatatcggttctccggagttcagcaatcgtccgggtttctagccatcttcttgagtcgatgatggccattggcttgttatgcagcaacctccacagtgatcaatttgcgattaaatacgagatcatttctgcatttccatattcgccacattagctagaatgggagaagacattgactcttgctgatttgttgagtcaatacaagatgatgatatcagtcaatagaggataatgatatcccgcagctctacatatggaggtggcatgtgagcaagtgagttatcagaactatagtttatca

SEQ ID NO: 22120 - DNA, 1441 bp, Arabidopsis thaliana landsberg
  unsure (1)..(1441): unsure at all n locations
ctcaaattccagtttaagtctaacttctattttgaacattaatgtctttctttaaaattttattacttcatatatttatttttttattacttttttttcttatacaaattttgggctttacactttgggcaccagactatccggtgcgcaccggactgtccagtgcaccctctaccaatggggccagcctggccacgggaagagggttccctgcgcagaaatctgagagcatgcagtttgggagttgaattttagtggcacaccggacagcgtaccggactgtccggtgcgcaccggacagtgactgttcactgttcggtgtgccatctgtccaacgactagctgtcagaactagccgttggagtcgaccgttggcgcactggtggtgcaccggactgtccggtgtgcccatgcttaggaaagttcctgtaacgactagttggtgggtgagggctatttataccccctccacccaccatattcaatgtcttgcactccacatttattccagcacattgctagagcattgcaagcaccaaaagcctagtgaggagattagagaatcataatccgcgcttgttcctcattagcgctagtgagagccacctagagcacacaccacttgcattaggcttctcttggtcaagcgaaagtctacggcttgttactcttggtgatcggcaatcacctagacggcttggtggcgttgggagctcggtgatcaccgtgaagatcttgttggtgacccgactcaagtttgtaagcggtctcgagggatccaccgcgccggagtggcaaaggatcatctcgtagtgagcacttggttcttgcgaggaccaagggggagcaatactcttgcgcaggtgctccaacgaggactagtggagagtgccgactcttcgatacctcggaaaaaaaattggaggagtcttctaaactttgctttacattccgcacttaattcaagctatttactttgtgtatttgtttagcaagtatttgaagcattgttttagccttgttacatttctagtattattttcttagtgctagttgttggggtgaagttgggctcttgtttagctcttgcttaggttttaattagtgttgatttttagaaaagcccaattcaccccccctcttgggcannnnnnnnnnnnnnnnnnnnnnnnnnnnnnngttgctcatagattagcttaaccgctagagttacgatgtccggtggggatggacctcctcccgtttttgatggtgacgattttccttattggaaaattcgtatggaagcatacttagaggctatagacattggtgtctataaagccgccacacaagggtttccccaacctagagatcccacaaatcttgtaggggatgagttcaattatgagaaatggaatgcgaaggccaaaaacaccctttttagaggcctttgcaaaga

SEQ ID NO: 22121 - DNA, 563 bp, Arabidopsis thaliana landsberg
  unsure (1)..(563): unsure at all n locations
aatgacagataaaaaaacatacatttttatttatatgatcaattttagatttataaaatttacaaatgaacatttgaattatgaatctttgaaagaatgaaatgtagtaaagaaagaaaaagaaaattaaataaaaaatctcacccacatttctctcttaccctctcttctacatgtcataatagtggcatgttggtaaataaagttgttaccatggggtataattgattttctgatttgtggggtcataaggaagtggctaaatctccaattataaatagtaacctgccctatttcataattaagttttggaaagtgagtagtttgcaacttaacccaaaaaaaatatgactgaaagtgatagaagaacactctttccaaaagagtacaggtgtgatggtggaataaaataaaataaaaaatattgaaaaatgtattttcttaagtaaatatataatttagtaccttgcanaaagcatttttcctattagtatctaaatttttggcactaactagtagcatttagccatttacgtatacttgactagtaaaaatggattcta

SEQ ID NO: 22122 - DNA, 589 bp, Arabidopsis thaliana landsberg
cttagttaaggtttccatctcactccttttctgtagctttattttttttaattaatatatttgaatatcaaaacaagtatgtactagtacttttttgggctgatgtttcaattttttatcataattttctttctaatatgctctcaaataccgttgttgcagagacaacttttaggttctttattgcgaatccttaatgccaccccaatcttaaccatcaaggtaaacctttttaattcttcatatttctgtttaatcttttttcagatcaataattaatgatggaggtcaaattgccctaataccattctctcaaaataagagatcaattgtcgtatttatgggttgaattccacaaatctctcggataacacaatagactaagatttcgaattaagctaaacaaaagataagaaaataaaaacaaaacaaagtaagaaaataacagatgatgggggttgtaagacaagataataaaacataaggtttaaggtattctcaggaaaaaggaaaaaatgattagtagatctagtaatagctaagttgttatcgaaccattcttaaacccaaactctaatattagaataat

SEQ ID NO: 22123 - DNA, 637 bp, Arabidopsis thaliana landsberg
atttccattcccgaaatcattatcttttgtctcagttaccagattgtccactttcaaaaatattgattgataatctgaaaagtcttggagatacgatgagctgcacttgctgattcgtttttacttactaatatattctttacgtgaagtgggtgctcttcacatcatgcaaccattaacaaatcggcatatacttcataatacataaacacgccaacatgtgttagtcatattattatattttgaaactgtatcttataacaaaatcaagagtttcagtttacagttttttaggacaaactatagtactagttgataatacgtgcggtgcgaatgtgcatgtatcttgaaaatgtaaaaaaaaaaaaagtctacaagactacaaacattatcaacttacttgcactcatcagatgtaatataactaacaaagttaaattaattaagtcttagacatgcatacgtgatacgtcgtttggtatttgattcaattacagtctataaggccaaagtctttgttcatagatcgatttccactttcttttttttttgggtatataagataatctattttcacttgatacaatatatgtttggtcattaagaaatctactatattttggaattgtttcaagct

SEQ ID NO: 22124 - DNA, 559 bp, Arabidopsis thaliana landsberg
caaaattaaaattattttctctacttaaagtaattggatgtttgttctgatggtaaatgcttgatttgcttctttgattgattgaaatagtatagcagggcattctagcatgtaccaccataaggtaattagtatgagtaggtgacacactaatctacttagacccccaaaagattctgcctcgcaattactcgtcttgtctacaattctatcttaccatgtatttctaacccagatgatcaataccaggaagggaggcagaatcgatctacctgccaacccccacattaggagaattgttagacaacaagaagaagagatgaatcctccaaatcctccactggccgagacttattcgtttgttgcagcccagatgcagatgctgcaacaaatggcaaatactatgacggatatgcaagctcaaacgcagcaggaacgtcaagagatgcgccaggagaggcaagagatgtgggaggaaatgagacaagagtgaatgctgcgacaacaacaagcaccaatgcctccatcaccacttccacccagggacaagcaccgggag

SEQ ID NO: 22125 - DNA, 712 bp, Arabidopsis thaliana landsberg
attttcttccgctggtgctcttctcgccaaagttgcactgtttaacgcagtctgattcgctgcttttctcgccgtttaacgcagtctactcagcctctgcaattgacgcaacgaacaagagaaaatgataatttctcatgattcattgtaacaagattcatcttggctctggtcctctcctctcctcttaggtttgttctctattccctaattgcttgggttccctaattacaatccttagtgtatatatttttgaaaatgcttacctccatagaacacatgtcgtctaagtcactttctcctggggttccctgttttccaattcttagggtttatatttgaaattctcaaaacctccatactgtaacaagatttacagtttattcacatttgatgctctcttttacacttatgtctaccaatgtcattgtcttcacaaaagcttctctcacgccgttcctcaatagaacatctcacgcgaaaacaaagatgcctctttcaagggtaatttagtctttccaggttgttgaaagtgcccaatctcataagcccatttggattatgccttatttcaaatttctgccccaaaaagtgcatcatctgtaatagccccatgaatttttttatcattttcaattgaaaagtaatctaaagacttggcataagtaatttagaagaaaaatatcttaccattttcccttaaaattatata

SEQ ID NO: 22126 - DNA, 602 bp, Arabidopsis thaliana landsberg
  unsure (1)..(602): unsure at all n locations
accgtcactttcttcttgttttctcctctgctttagtctcctttagcctttgatttggttaactttggatgattccaaagaaccaatggaacggattggtctttatccatatctcttcaaatagctttaggacataattggtctctcaggtaacaagctgtcattatcatcatactcatcatgttgctagtagaccaacctaattggcaactgtttgttggttttgcaactgtgtaatctgctttgaattgtgaacaaaattattgatttatgttgattacattgcagtggacatggtagtttctcaaatgatccgaagttgaacagtgtggtcggtcatcttcttcattcctcaattctggtcccataccatggctggtgagttttgctttcagaccattcttctctaaaaccacttgcagaatctcatcttcttcatgtaaaaatatgactttgcaggagaattagtcacagaactcannnnnnnnnnnnnnnnnnnnnnnnnnnnnnnnnnnnnnnnnnnnnnnnnnnnnnnnaacgtattcttttggttatcttgtttagtcctgggtgtttttagatgcagtttattaactgttctg

SEQ ID NO: 22127 - DNA, 629 bp, Arabidopsis thaliana landsberg
gtaatcatatggattgattgatatgattctctgtaatatagactcttataaatatgtttcactatctactctctaagatattttatccactttggtaactatctttttataagaatcttctaaaacttcaagaagattcatttaaatttccactaatggtgtgcaatacactgtgtatagtaaaatatatgaaatatcagaacagtgacagttgactaatttatcgatatattagtttatagagaatttgttgtggtaactcactgaccacgaaaatttaaagtaatatactaatgttgaatttatatgtaacggaaaaaaagattcgaacaatttctgataagttttaaaataaaaatgataagtcgcaatgcaaacttcacagacgtttgcggaatattaccaaaaaaagaaaggaagtttgtttcgaaaaactaaagagctccttaagctgagagacttgtaccactaccaccaacagagttgttatccatcttaatcttcttagttggaggttcggattcttcttcttcttcttcagaaatggatgcatcagcctcttcctcactcttcttaaaattctctattatctccacatctctctgttcacatgttttattatacatttg

SEQ ID NO: 22128 - DNA, 506 bp, Arabidopsis thaliana landsberg
caagaactattgtctgcactggcaaaagaggaaaattggaaataagattgcacaatttggatcgtgcaccttcacaccgaggaccagaaagacttcggcggaagtcgtggaaatagttctttgcgctcggaataagtggggcaactggtgggactattagttttatgtttcaggaggggaaatcgaagacctcccagggctccctgcggcagtcatgtgctcccactgttacgtggcattcccaccgtttgaggtggcggaggacgatgaggacgaagtggccctccggtatgctgcccgcatgagtagcgggcgtgatttggttgaggaattcatcggttatggagtatggcccttggcgcacggctgggtgcttggcgatgtgtgccctcgccagatgcctaccttgggcgagcagttggcgcgaagtccggccttcactttggatctgcgcggccggaacccagctgcgttcgttcgtgaagtagaggatggagcagtgagga

SEQ ID NO: 22129 - DNA, 519 bp, Arabidopsis thaliana landsberg
  unsure (1)..(519): unsure at all n locations
cttccatcttgttacaaccttgtatggaagaagttgtatccctttgacatcaggatcatcaaatctgtaacacaacacccaataaacataaacaaaaagctcaagatatattatatatggactagacagacactatgacactaattactaaacacttactttcttccaatcagacgtttcgggtcgaagatggttcgctccgggttcttggctgcttgattcttagcagcttccccgatgagacgttcggtatcagtaaatgcaacccaagatggtgtaattctgtttccttgatcgtttgctatgatttccacatgtttgttatgatagacaccaacacatgaatatgtagtccctagatcgatccctatcaccgtccncagtttctgctcttcgccttctattgccaaacttgacatcaaagctgctccaatattcattaaaaaatcaagcactatagcataaataggagagacgtcaaattccaataaatgtgtttntatgagaatttaccagtca

SEQ ID NO: 22130 - DNA, 4878 bp, Arabidopsis thaliana landsberg
taattttaaattataaatcttaattattcaagattttttcaattacttactagtaaatatttttcaggggataaccacatttgttgtctaggcgataagcaataaaatcttctagatattttaaatataatatttatttgtttttggtaattggtttagtatctccaattttaacaactggatatcaatctctctctctttttttttttgaaaccacaccaagtggatttcaatctaatatctcaattaaaactatatctgtatacttgtcttaatttgtcaaaatgtaaacacgtgttaacttcttacagattttatttcatcatcttaattagttaactcatatggttatgaaataatgtattcttctgaccctttttttttgttaaatcttctgacattttccgtaattagatttcacctgtcagaacttagcaaatcacatggattatcatttatgtaagaaaatcataacaaattttgtccaatttgtctgattatgatttttacaaaactcaagtggaaagtagctctggttttctatgtgtgtccatgttttgtggtacccaacattatatgcatcaacatcaaataacaataacgcattttgaattatatatacaagtcaatccttttgtccaaaaaaaaatatatacaagtcaatccatgtatgactttatgattttaagaaatctaggaatgcatatgtatttgttgtcaatttaactttcgggtattagcttttgttaacatgttataatagaatactttttctttgtttacatgtaaattatttcactatgtggtgtttttctgtgtccgaccgtgttgcaatataaattacggtagcacacgttattattacttttttttttgacaaaacttaaattcaaataaccactaaaccgggtccggtacaattgttttaaggaacacttagcaatctcatcacgttcgcgattgtgtttccgagagatgaaagaaaaactagattgcagaaaagtagaagataaactcaggatatcgtgtagaatctcgtggagttccaatggagatcccccaaattgattgcgttgatcaactgcttggaatcggacgctattgcattgttttggatacccaaagtcgatgcatggcagagagcttcgtggatggcgagagttccgctaaaagaggtgatcgaacattccttcttgaattagatccaatcctacttgtttcagtgatggtgggattgaaaatccatcctaaaccaaccaatttatgttctttgttccagacagcgtcggtttggcagatagtagtgttgtttgagattgaaatgattttccctggggtttgctgcagaggtcggatctgggttgtattctgagctaaaagccactctcgtgctagactgattgctcgagccagagtttcagagggggagctgaggcgatccttgaagattaagtggttcctagaaagccagatcgaccagagaatccacggtaggagaggtcccgttcctacgccaattggtgggaggcaaacgctcagattaactttctcaattagatccctaaaggacacagtggtattgggatccaagggctgtttaaaaggcgcgttttgccagattcatgtagcaaaacgacaggtgaagaacaggtggaaagatgactcctcctctccgcagaaagggcatctcgcttcttcattgatctgtctaaggcgcaggttttctccgactggtaaggatcctctcatagctttccacatgaaaaatttcatctttggtgaagtgttaattttccaaatttctttggtccacttgaaatcagtcaccggagacacatgttggggacttaatggaattgaccttatgctttcatagtaaccggagcgtgctgagtatgccccattctttgcagggagccgcgcataagagtcctctgctccaagcttacttagatggatctcaagaatttctatttcaaattctgggatggtttgctgaattagacctctgtcccactcaagtgttgtaggagaaatgagctgcgatactgtccacttgtgtgaggatgcatgaggagggcccataggggtgataggagattgtagggatagccacggttcttgccacagagaggtttgtttgccacacccaatgactttaccaagcttccgttttagtagatctctaccaatacatatgcttctccatccatgtgaaatggtcgcaggtggtttacaatctaagaatggcgtaaaatggcagtatttcccaagaagggttctagcaagaaggcactgcggctttgtgagtattctccagcttagttttgccaacaaagcatcattaaagcattgtaagtccctgaaaccaagtcctccctctcctttagattttgttaagtttagccaggagatccaacacattttcttcttgtccatactagaatcccaccagaaccgtgtcaaagcagattggatgcgcttatatagagagcagggtagtttaaagcaggacatcgtataggttggcattgctgctagaacagacttcagcatgatcaacttcccagctgaagataggaatctagatgaccagctgcaagccttttggcgaatcctgtcgacaatcagggtgaataaatccttcttctttctaccaaagagctcaggtaaacctaggtatttgcccaagcccccctctttttggattccgagtagtagcttaactctatctcttgtctctacacatgtttttgcagagaaagtaactgctgacttttgagggttaataaactggcctgaagcttgttcatagtgctgcaggatgagcataagagtttcacagtcttgagggtcagatttgcagaagaacatcgtatcatctgcaaatagtaagtggttgattcttggattgttcttccccactttaatgccagtaagatcacctctttcttgggctttgttgcagagaccagagagaacttcactgcagaggataaaaatgaagggtgataggggatcaccttggcgaatgcccctttgtggtatcactgaaccttgagccgatctattaaggaggtaagagtaagagaccgttgttatacattgcatgatccaattgatccaagtactgtggaagcccatcctctccataactagttcaatgaaatcccactcaactctatcatatgccttactcatatcagtcttcacggccataaagcatctttcttttgcctttgaattatgtaggtagtgtagagcttcatgggtaatcaatacattgtcagcaatcgcccgttgaggaacaaaagcagattggttttctgagatcaggaagtgaagaattggctggagtctcttggtgagtacctttgctatgattttgtagtagatagagcatagggcaataggcctataatctttcatagtttttggactcgtgatttttgggatcagtctgacatgggtagtgttaatgttccttggcaggattccggaggagaagaagttctgtatttccagaatgatttgagctcctactgtgcgccagttagtctgaaaaaaacttgcagagaagccatcaggaccaggggctttgtcagcatggatggagaagcaagcagtttttatctcttttgcagttggcattctcgtaagtttcctattggtttcatctgagatgcaaggttgtagggctgcagctatgactgaccttctttctcctggttttgtagtgaaaattttctgataacctcctggatattcctgagccttctatcatatctgaacagaccttttctctttttctatttttaggtcaaagaaagtgatgattggtcgatggtcagacccttcgaaaggtaaatattcacttctgcctgagggataactaactgctcattcactgtttaacattgctctgtcaagtctgcagaacacaacatgatcatttcttttgcctctccaggataggaagttacctgagtggcgaagatcaaagaggtcacaagtggacataaaggttctgaggtccacaaaggatccttcagggcgcgtaggaccacctgacttttcattggagtcaataattttgttgaagtctcctataaggaactagggatcaattctatctttcccacgctccgttagcttgtcccagatggcttttcttttggttttatcaggttcaccataaatgaaagttgcaaagaaggtacgcccttccgcttcaatggtagtatcaataaagttctgactctctgatagaactttgatggctatgtttgtgttccagagaagagctagccccccaccaccaggactatagggagcagctagcagagattccgtgtaatttaaacatttaagcgccttgagaacaaaatcatttgagttttttgtctccatgaggaaaattatatccggggagatggtcttctgcatctccttgattctgtgaattgtcatgggatttcccaaaccacaacagttccagctagctatctttaaggaagaggaggaggtggactttgaaaatccaccttctttttgaccattgcagggatgatggtatgagtaggaggtgcagaactcgacgcaagcagagagttgttggatcttggagggttctgctgtttagattgtttctttttgattatttctctagcatcaccagtagaaggtcctgcagtatctgtgaccgtcctccctttaggagagttttggactcccaacatgtttctcttgctggatttcgcacctgccagtcttaaacgacttctattctctggtttgttagatggtttgataattggggatctacttctttccttttcctgcttggctcaagcgcaggtgggagctcagctggatgga

SEQ ID NO: 22131 - DNA, 1752 bp, Arabidopsis thaliana landsberg
actacttcgcccagttcagaaaagagataaaaagctcaccttacgcagtttatccaaagcgccacttgtgtcaaaggtttcatttccttcttcatccattgtaacagctgcgagcttggccaaggtgatgcccgcagcaaaggggtgccctggattactagagcaaatattgttgaaataagaaaaaaagctagcaagtatttctgagctgtctctaataaacaccaacaacaagacactaaaagcgagcagaatagctaaatatggccacaaaatcagaagggaaaacagaaacaaaaaaggcaaacagccacaaacctggtagaatcctcgtatcttatatgtacattgctgatggatactttcagattaccaataattgtagcaataattgagcctagccatgaattcccttgtggaggctgaaaagaaccaaccatcaaagattagttataaaatgcttagcgtgtgagagttattttatctagtagttagcaaggagtgcatatatcgttcgtaaaaaatcataagttatcctctaatcagattaggaaagttccagcgtcacacaaaaaatacatacccctgaaatgaatataagaagatagccaaaaataaagtcatcaagtttagagacgtacacttcccagcttagactttgcccttgcttcaagagttgctgtttctgcttcctatgtaaaagacacgagaatgataactcagaataacatcaaaccttgtagatgaaaatgaaaatccaagtttcatgtaacggtcatatatagacgtatccatgaagctccatcagccagaaatacgaagtacctcgatctgctgaagcttggtttctagaagcttttccctgtcttcctcctggtatgtaattagtgtaagcaaattcagtaccaaccaaagtgaaaaacttaaagagaagacaagcaaacataaataacaatttcaacagaataccttaagtgttcggtcatcaggggcaggataagcaagaacgaagacacgatcgatcagaacaatgactggctctttgcctaaacttttccaagggacctgaaacaaaagtttatatgagtcactttcaaattttagatttaatacctagccataactacaagagtttcctgacaaaagtagcgtttgctggcattaaacacaagtccaagttcaaaaattagaatatcactctgacttgcaacctccgtgacatttgactttttatcaaaagcttcaatatatgcaacaaacagaatcacatgcatatatatttcatttttatccaatattccaattaaacattttaacttgtatcccagaattcataaacaatgacctaaaattttccactttgatcactattaccaactaacatgttcttcataatccaaaatgaaatcaatttccaacattgctattgtatatcaatacatgagaccgtcacacatgcaaacagttctggtcacgtgagcattcagagctatgtaatcacaaagtgatttttcggctctctaaatcctcaaataactttaacatagatcgaaatgagtatatgtatatgaagaaagaagctgcaagtaactctgtaaaggattaccaatccagcataaagttctcacagctcaagtacgtaaacttttgagaaagaagaaatatacttcttctatcaagaatccagaacgggaacagtggattttgagggaaatcatcaaaattctaccacgagaaaaaaaaaaaaaaaaa

SEQ ID NO: 22132 - DNA, 235 bp, Arabidopsis thaliana landsberg
  unsure (1)..(235): unsure at all n locations
ggaaggctcatgacctccagtccctatggagatcaagtaaatggcaatgaagaaggctacttcgtgtgcttttctatgttcaacgcacacttcttggtgacaaggttttaagcctggtatgaaccaggacattgttaaaaggaccaaaccctgtttaaccatcaagacacagtttaaggttgtttatggaatctntaaataaatnggattaggatatatcagaggtaagaacata

SEQ ID NO: 22133 - DNA, 3810 bp, Arabidopsis thaliana landsberg
  unsure (1)..(3810): unsure at all n locations
atttctatctgacacattaacatcagctaagagaattctcaacttccagtgacgtcccttaaaaggaagattgctggccttgtgggaatcaaacaaatcgtgatctgttttttgaagcccatgatttcctttggtctttaaacaaagttatcgttttgttctatgcagcaaaacatgtaggttttaagtcacataaattgtcttcaacattgtttgtctcttcttggtattttgagtcagaactaattttagattatcccagctatgatatatcccagcctcacccatgggtctcttcgtcattatactttatttataactacctttcaacgaaggttaatttgaaacaagaaaacacagtcacttgttctacattacttttgttaaaccctaacttgagctcgaagccacgaccactgttctgttttcctagtaaaataatggcgtcgttgatgttaaccgattgctccttctccacgacctcgcgtctcatcgatttgaaccgcctcaacggtgctttcctgccccgctggtgcgtcagccaactcaagctttcccaccactgcgcccggacgtggccgcatgcgctcctcttataccactgtgcccggacgtggccacattctctccattcgctcctcttgtatagactaaaccttttcatccaattgcttacgtattttcagatatccaactcttaagattttacttttctgttcagctgatgaggcgatggtatttgatcaaacggctgtggaactaagtatcatgcaggagatcagagtcgaaacttcaagaatggagaaactaatcagtcctggtttagcagtaatcctttttggggacagagagttctctgaagaatataaagaaatttaaactctagcatctttgctccaaaaacaaactctatagagtttaaatttctttcttcttttttacaaaagagggattatagtattatacaccataaaccccgtaaaattaaaagaaggtattcagttaccaaaatcggatttagtagcatttagtttttttgaattttaaatgtacaccataaaccccgtaaaattagtcaaaacaattaatgtgatttatgataattgtaattaagtaaaaaagatattactcgattagtaattactgattaactgaatcattgatctcattaaacaattaaaaaaagattactcgattagttagcatttagttttaatttttttaatatactaaaaataccaatcggaaattcagttaccaaaattagatttattaacatttactttttgaattttagatgtacaccataaaccccgtaaaattggtcaaagatttatgatacttgtaattaaggaaagaaccaaatgcaatatatggtttcggtgcaaaaccttaaaactgaccaacttctcaattttttatttaaaaaccctaccaaatttctctctcgtttctctccgatggccaagaacaagacnnnnnnnnnnnnnnnnnnggtgaagaagtcatctgacgtcgcatctacgtcaaagaaactgtcgggagtcgcatctccagcgaagaaaccgtcgggtgtcacatctccggtcaagaagccgttggaagccgtcgcatcaacttcatctgaggaggaggaggaagacgagccttccagcgattcagagtcgggatcggagagtgagtctgacactgaagctgagccgatgactcttgctgctgctgctccttcttcttcgaatgagaagagacaaagtgaaggagaaccagaggagaaacgagccaaaactgaaacagagacggggaagaagccactgttgtttcagagattgtggactgatgaagacgagatcgtctttcttcaaggaatgatcaaatttgctaaggatacaggtaagaatgtttccgaggacatgcatggcttttttgaaaaacttaaagattcgattagctttgaggtgaagactgatcagttcgttaacaaaatccggtctatgaagagaaagtatattgagaacaagaaaactactacagagcatgataagaagtgttacgaattggctgagataatttgggtaagtgatggtgatgctactgctcttgtgaagccaaagaggaagaagcttaagttgatgaagaaagtgattggttcgagaggtcgtttgttggtggtgcgtttaaggaattggattcgggggttgatgaagagacatggaagaagaattggagtttggtaccagtgaagaagaggaataggatagaagaaaaggtgaagtccgtgcaagctgatgagctcaaaacgatgtgggagaagattgacgttgtgcatgaagcgagatctttgatggctaaatatgtttagtctttatctatttagagatgcatttgcctatgtttttctttttggttttgtgttggaacctttatgactttcaggtttatcttcttttggaacggctaattagttagtatctattgcatctttttttgggtctaagtaacagcaaacaatctcatggctattcatatgttttatgttaagatgttttttggataatctttgctgatgactaaagttagcttctctgcatctctagccacacagttgaactgtttttaaccaaacagagagagcaagagaaacatgggaatttaatgttcatcgttctgcttatatttctctcttacatcttagaaagcaaaatcttcatctgcaacaagaatgacacttatgaaccagagagatccatcttcaagctctacagtctctgttttatgtttagttatctttgttcttgctcttatcatattgtcttccaaggtatcctctatttgatatcaaaatttctcctcgactttatttcccgttccccttttcttcatcctcacctcagctccatcacctcttcttcctccatgacttaatgggctttctaagcccattccaacttccatttagtatgatattgtcctttttgggcttacatgctcaagcatgcaaggatttgttattgggctccttcccaaggcctcatactagttggagttggacttggattatatataagaaactctttttctaaacttccgatatgagaactttactttgtaccaaacaatctccccttcaaaccaaagaccacgagcttgggtctcctcttcaacgaaactgtagcacccttaacttggcaccttcttattcgtgaaattcttgagacacctttttatcgtgtcatgtttgagaggttttccccacaccgatcatagtccaagccctagatccattttttcaacctaggttctgtttaataggctttctaagcccattccaacttctatttaatatgatattgtcttctttgaccttaaatattcaaacctgcaaaaatttgttattagatttcttataaaaaaatctcatattagttggaattgaacttgatttatatattaaaatctaaatttttaaaatttttgatgtgtgacatttggtctttgtcaaggatactaattgatcataagaatattttgattgacacacttatggaaactgtgtaaatgacgatagtccagaatcttcctctgtaattcctttataaaggattgtacattctcttgtgaataataagaaaacatatcttcnnnnnnnnnnnnnnnnnnnaaaaagataccatagaaacctctaaattcttttttttttctcgcagccgcctctctcctctataatctcttttctttttcttctcctctgggttctatctcctgttcctttctctcacacaatggctgctattgatgcaatcgacactactc

SEQ ID NO: 22134 - DNA, 865 bp, Arabidopsis thaliana landsberg
  unsure (1)..(865): unsure at all n locations
ctaccaccattcaagattgagcaaatacagacactaactacgaaatgagattcattggatataaccaaattccaagcactcctagtcctcttggctttgggacacttttaagctctgtcaatctttatttctgttttgaactgaacgtttgttgtcattggctgcaaaagctgtcatttggctaatgatcgaattgtggaaacaaaggataattatagaatggttcaaagaagttggtttcttcttggtttaaatcttgtttcttcaatgttcaaatacttttgatgtcttttattaatttttatgaaacaattttttttttcctaagaacctaattagagagactaaccattggactaagaaaacttaaaataaaaaacacaaattctcatctaacanaatttcaaataatttatactaaaacaattggtgagagcccatgggggactctcaccgttggagatgctctaaagtttcttctacgtttgaaataatacattctgatttgtggacttctcctattcctagtctatccggaattcgttactatgttttgtttctcgatcaattctctcattttctatggatttatcctcttcgcaataagagtgatgtgttctcaaaatttctgcaatttcatacctatgtcaaaacacaattcgagaaacacattaaatctctacagtgtgataatgatggtgagtataaaaactcacagtttcatgatttctttgctaaacaccggatacagtttcgttattcgtgtccatacacctctcaacaaaatggccgattggaacgcatgatacgaacccatcaacaatgctttatgcactatgctgcttcaagctcatcttcccatacg

SEQ ID NO: 22135 - DNA, 544 bp, Arabidopsis thaliana landsberg
gagcgacgtttgggagtcgctgcggtcccggtggccgtgcttaccgaggccaatgagcgcctcgcccaacggagcgccgaggtggcggaccttcggctgctctgcgatgagctaaagtcagaggcagcggcgaccgcggcagaggcagcgttggcacgaacggaggcttcgtcggcacgggagcaggtggcttcccaggccgaggagatgcgtcacggctagctggagcttggccaggccacaagcgagcgggaccaattccggagccaagctgccgaggccgtgagccaggccgagccccttaggggacaactggctgagggtacggagcggctaccgaggcgaccgctcggggcgggaccctggcggagggcctggccgtggctgttgggtctgcctagtccgtccgagtcgtggcctcacagcagcgtgcccgggccgaaggtatgttttgcctgctttgtgatttagttttagcttcattcttctcctcgtgtctgaagaatattgttcggctatcttcagggttcgagacgggggtacg

SEQ ID NO: 22136 - DNA, 620 bp, Arabidopsis thaliana landsberg
cataactcttaaaaagctttaaacattattgagataaccagaatgcgatataaaaacaggtacctggtcacaaaatttgtagcaccctagggaaccagaacaagatcttttctactactttgacctggacagacacataggcatttattttccagaaacttatccatatccgcaagcatcagaggccgtactcaaacaccaccttcaagcactattcaccatcacaaacaaacacatcataatctgatccataaaaagtaccataaaagatggcaccatcataaacaaacaaatcataatctgatccataaaagtaccacaggagatggcaaaaatggattatcgaagcagctaagaaaaccattaatatgttcgaggcactttgagcttttctggcatttctttagttagctacctttacctggtaattgtttagcgactacatactttcagagatatacggagtttcagctgcaaggcaaaatcttatttttagcagcaatatctcacttgagaattcaaattgaagtgtgtgatagtggaggaaggtgcaacctttgtctcaggatcgttgagcttggtgacagtcacgcggcaagcatcgcagttttctaggtgga

SEQ ID NO: 22137 - DNA, 848 bp, Arabidopsis thaliana landsberg
  unsure (1)..(848): unsure at all n locations
ggtttacgcaacgatcgaatcgtcatctctatggttctcaaatttcattaactcattttctttttcccctgcgtgagggaataaactaaactctatcaattaagcataaacctaaagcagattcttttctttggatcaaaacataaaaggttccaactttaaattcacatcaattccaaaaacgagaattgagttgtttaacgactaaaccctttgaacccaattgagaatcgcaaacaacgaacacaaaacggagataacaaagtcataaaaatggtacctttttggagattagcttggagattttaagtgtataagattaagaaatgagaacacacgaagggttgtgatatctgttttttgacaattcgattgattgatggaagatttttagctgaaagaatcagatttgggatttgtttgtgaaaagctataaaagagagagctttggaagaatgtaaaacgacagctaaacctctctcgctaatctacgcctagccacagatctttatcgaaagaaaacaaaagttaaaacggaatataaatatactgtatcgaaactaataatagaataaggtcatgatgttttccagttttcaattgggttttgaagttcggtttttaaattttttggtggagattttagttttaattnttttattaattgtagcttgtttcgtttttgaactttatctatagntttttattattataactatattttagttttctatttcaatttttattatttgttttgtgttgaaaatttactaaaaatattgataataaagaaaaagaatgaaaaaagaaaatgtcatgccaatttgtttgaaaactcgatagaattt

SEQ ID NO: 22138 - DNA, 455 bp, Arabidopsis thaliana landsberg
atctttgtaccgtataggatacaactccggtactaactacacttctcgctcaccgccttctgcaaaagtacaaaaccaatcctttttaaacgcaaaacacatgaattggcgttttaaaacgatagtagaaattatatatacctttaagttgagccaaaccatctttagcatagagttcacacataacaaagcgacaaacaaaagccgttgcacttgtagtacttaaaataacattacgaagcttaaactctttaactgctacttcaacaaagtacatgaactcgtcgtagataacacaagcgatctcttcttcttcattaaccaacaactgacctaacaaatccttaaagctaacataacactcattagctagcttaatcagaaaccgtcctggtcctagattcttaagatcagacactggtaagttctctgggatggttacaaactgaaaatca

SEQ ID NO: 22139 - DNA, 1261 bp, Arabidopsis thaliana landsberg
caggttatatcccagttgtgcaaccaacggatgttagtactggtacaggcaaggtattattgctagatactaagcggtatggatactggaaagttcgtatgacacaaatcattagaggacaaggtgaagatgcttggactgctgtagaggaaggttgggaacctccgttcgatctaacagaagatgggttcaaaatcactaaaccgaaggcaaactggactgcagaagagaaacttcaatcaaagtttaatgcaagggctatgaatgctattttcaatggtgttgatgaagacgagtttaagcttattcaagggtgcaagtcagcaaaacaagcatgggatacgttatagaaatctcatgaggaaacttcgagtgtaaagagaacaagactggatcacattgctactctgtttgagtatctcaagatggaaccatatgaaacaattgtgaagttcagttcaaagataagtgcccttgcgaatgaggctgaagttttgggaaagacctacaaagatcaaaaattggttaagaaactgttacggtgtctgccaccgaagtttgttgcccacaaagcagttatgagggttgccgagaatactgataaaatatcatttgttgatcttgtgggaatgctcaagtcagaagaaatggaacctgatcaagacaaagtcaaaccgtcgaagaatattgcatttaatgcagatcaaggctctgagcagtttcaggagattaaggatggaatggcactgctagctaggaattttgggaaagctctgaaacgtgtagaaagaggtcagaatcgtgacagtacgccctggagcaataaagatggagagagatcacgtggaagattctccagatctgagaatgatgactcaagaaagaagaaggaaattcaatgctatgagtgtggtggttttggtcacattaaaccggagtgtccagtcaccaagagaaaagaaatgaaatgtcttgaatgcaaaggtgtgggtcacactaagtttgaatgtcctaacaagagcaaacttaaagagaaatctcttataagtttcagtgatccagagtctgatgatgaaggtgaagagctgttaaacttcgtggcgtttatggcaagttctgattcaagcaaggttatgagtgacacggatctgactgtgatcaggaagtgaaccccaaggatgaatacccagccctatatgacagctaggtgcaactaagaaaaaacaagctgaagttggtaaaggaaaagctaaccctacaa

SEQ ID NO: 22140 - DNA, 1726 bp, Arabidopsis thaliana landsberg
cgtatctcttatacatgtaagataaatatcttgggtgtatgtatctatcaaaaaaaatagtatatacaacagataaactcggctcaatcttttttttatcttttaccagtatttttaacagctacaaagttaattgttgttttctgtcactaatagaatgttgtcgtacgaattaaataaagaagatgtttcatgctttgtggtgcaacatgaattattcgggatcatcgttggtagtacgtttccatattcgatcggagatccttctcgtcgtattggaagcagaggtttagaatctattctggacgatcaatagacatcatccgaaatatgagtatcttcgatttgttttcaaacaattgataagggctgttctcatgttcataatccgaaaagatgtcatgtctaccacacgaccttggaagaaaacagacggacgttattttcagttttcgaagattgaagcatcgatgatgtccattacaaagcaaaaaaacaaagtggcattatattcgagattgtcagaactctgaagtatcatggagatgataaaatccaatcatacgtgtgccggaggcaacatacaagaagggggctcagtcgacccccataaaatttatagtttaaaaaaaaaatatagggtatatcttctaagataattatatgttttgggttaaagtactcacaatgacctcatgttatgtgatttatgcttgtctttgaccccatgcatattcattttgtcatttaatcttaatgcctttttgcatttttgtttggctaattataaaaactataatatcttattaaaaaccctgtaatattcattaacaaatcaatacttttttcttctttttagatatccagttttagtttctacattcttttcaaaaaaaaaatctaaaatatatattctaaaaatcatgaatcaagataaacacaacaactactcaatctccacaatatattaacaaaaagagtgttgatgagaaagggaatttgatgatacaactaaaaaaagataagctgagagtatgtttattttgaaagatgaaatatgaaacattttaggttaaaatgtatatatatataagaaaataaaatatttagttttattttaggtttagaaaaataaatgttttgtgactcttataaatgaaattcgtggctccgtcatagcatacgtctctaaagatggaccaaattaatagggaagatgagaaggtttgtttggtccacgtgaacctaccactgatatcgacgctagttgcggagggagatgagaacacgtgagtgagttttgatctggcactgcaattatctaatctttgtgactattttttgtcggcatcttggacttgaggcagaggcatatagtaggaactaggaaatctgattttaactcgaaacccctaaagtagaaataaattaagaaagtttaggttatagacaaatattatgtcctttcattttgcatcactttagtttttagttctccgatttcaaaagtacgtatgctatttataaggtttcgtttcgttgaacaaggagacaaagaaaaaagtttcgctttgaagtttagtctacactctataatgttaaaacaattcaacgtttacatagataattgattttgcgagtttatgggcattaattaaattagatagtagctagctagttagagaggcattgttttagttatcagattcaagttaatactactaca

SEQ ID NO: 22141 - DNA, 621 bp, Arabidopsis thaliana landsberg
  unsure (1)..(621): unsure at all n locations
tgacgggtgaacgctcttgggaaaggtaaggaattcagataccgaacttgtcgagtgatcaggtgcacctgtagggttgtctgaagtctgttggacaaggacaactgtaggtgggcctaatgacttgggaggttctgtcactgctactatcggagcgacccatctctgcaaatattatgagacattttcaaaaaagaattttcaaagacttatctggaaaatttcttcccttcttatctaaccatcttctgaagtacttattttaaagaccagatagtagagtgcaatgtatagaaggtgtgaatcaactaaggttgattctgtaattatacatgcatcatgctaaaaactatgctaataagattcccccttagagaaatgccgccgcgcacaagaaagaccgcgcgcaagtctacaggaccgattggcgtacccgccaacaactagccccacggcatgaagacagtagcagtggtagcaacgatccaatcagggnatctggaagcccaagtcaacaacttcgatcagaactccgtcataggaatgatatatgggtcgcggatggttaaagaataacaaattgagaacagcatctacacctgcaagaccacatgctgacag

SEQ ID NO: 22142 - DNA, 631 bp, Arabidopsis thaliana landsberg
  unsure (1)..(631): unsure at all n locations
agccattcgtttttcagatgaactaatatagttgggtttttcaaaaacatttacaaattatatttatgtttcaaaacctatggagtcaactttactttatatgaacagacattatataaaacaatttgtaaatagtaatacgtaaacccgcacgtagtgcggatattcatctagtagtaattaaacagaaaagggtgcaatctaataattggatacctagcctaatataaaaaacagtcctgaacaactctggtcaatgtaataaagtttttttttgtcaaaagagtcaatataataaagttttaatatagaatttcatgaattctcacattttatttattgatttacaattaccataatgtatgtagattaacacacgaatagtaagtttttttcttttcttttctgttgaccattaaaaggggaaaattaataattaaacagaaaaggtatgaaatctaataattaaatacctagtctaatatgagaaagtcttggacactctagccaatgctaataaagtttaagatagaattcatgaatttttcacatttaatttattatcattacaataatgtangtatatttaacacatgaantagtagtttttttcttatgttgaccataaaaa

SEQ ID NO: 22143 - DNA, 825 bp, Arabidopsis thaliana landsberg
cttgaccttcattactttctctgtaatctcaaattggaccatttttctaatatatgtgtgtatgtgggtgaagcgatcaacctacaaataaaagttctaaactttactatctaaaagtaaacattttgtttatctttccttcagttgaagtgagctcatttggaatatgtgtgtgtgtttgtgcagatagtgtgataaaccggtttgatggggatgtgacttcgggtcatgtagatggtaaagctggtaacagccggttcagcaaaccccgtggttttgttgttgataagattttgatcaaaatctctctgttttattttgatctttatatgtttcaaaatttataaattgtaacaattattgttttttaaaattaaaatgttttatttgaacaattttttttcttaagaactccaagctaagaacccaccattacatattaccaaaattataatctcttaataaacctcttaacatcaaaaatttcaaaattaaatatatatatataatcctaagaactaccctaagactaatctaaacaacccccaataatgatgctcttatgatcattacatgaagtaatcatgtttcttttttgtagtgctatggaattgaggttgattctctttgggcagcaccacaaggccattctctcatccctgtaaactcagcattttttgtttttttggtaagtcataaactctgcaacttaataccactatttcagtttttatcaactgaaaacatgaactcacattagataaaatggtgtcttttccttttttatcgacaggtgagcatatatgattggttttgagtatatga

SEQ ID NO: 22144 - DNA, 756 bp, Arabidopsis thaliana landsberg
cgaactgttaccggtttgtttgttgtttctagcttatacactaccatttctatcactgcatttaatttctcttcttcatggtttataacatttgttgattgtgactctcttgtagatcatagagaacctggatgatcgagaaatcgacactgatgggatattagagcttgtgaaggatttgttacctcctctgcctacaactgcaagtcctaaagatgatgatgaagaagaaacagagaatggtgaacagtcgtgacgtgctaatgaagttgttgagtttatgttttgattttgtaaccatcctcttaaacgcttattaactagattgagtttgttatcttttaagttaagaagataatcgatcgaacaatttacgtccattcattaacaaagaaaaaaaaaacaggtccatactaaatgatttaaactttaaaatatagaggtacgacccacaaaagtgtagaggaatatgttctataattatactaaaggagaataatacaacttatttaatatacttttcttgtcgaatattatttcaaatttcgttggataagcataaggtttgacatcttgatattgagcaaaaataggtatctcaacctttatgaaagcatatgtaatccattccattgtttcactgagctataatgataaatatatggtagaaatattcaaattccgcatacatatggttgagttgaagcataatcagaataacattcaagaagaaatacatagacagaattttgaata

SEQ ID NO: 22145 - DNA, 591 bp, Arabidopsis thaliana landsberg
  unsure (1)..(591): unsure at all n locations
gagagaagagataatttgtttaaattgagtcataaataagcatacagagagcagatttatgttcctagtgtcagcttgataaataaatttggttataatattaataacaccgcaagagacatcatcacctacctagtacattatgatgttaaccactatcagacgcattcctcacctttaagcttcttccatttataagcagcttcaagaatcttgagattcgtcgtccctgattcttcagggaacagataatcaaagtattcttcatacctgccaatttttttttttcacattgagctttaacattcaaaagataatagtcgagaaattatatgtatgtaatgcctactctgtagagccgtcttctctactggtcatctttctcttcttgagcttcttcgggagctttgattgaacgacactaacatccccgagctcaccaaagcctgtctccatgttaagccaatcctccaaaagcgtagcacgctcttctttcagctccgggggtggtgtcttttgaagtatgtattggcttctgcgaaagataanctgagtagaaagaaagaaaaaaaaagcagaaccaaaattaat

SEQ ID NO: 22146 - DNA, 330 bp, Arabidopsis thaliana landsberg
aagttcagagctccgacaccattgacaacgtcaaggctaagatccatgacattgaaggcattcctccggaccagcagcgtgtcatcgttcgctggaaagcagcttgaggatggacgtactttggccgactacaacatccagaaggagtctactcttcacttggtcctccgtcttcgtggtggtttctaaaccttgtctctctctcttatggttactgaaccaagttcatgtatcgtttcatctagtactttggtggtttatgttttggggccatgtaaaaaacctctgataaataattgatcaactatgtttccgtttctttcatctctc

SEQ ID NO: 22147 - DNA, 573 bp, Arabidopsis thaliana landsberg
  unsure (1)..(573): unsure at all n locations
agcgaagagctgatcgacatttcgaagaagaaggacctattttttgtgcttctcttgatggaatgaagcttccatcagttccctgagtatgaagttagagtcaggttgttaaatatgtttcctttcgtctttatggtttcggatttcgagtttttgactaaaggaagtttttggttgatagatatgcaacggaacatagatgtggagtggttgtaaaagggccaaaacttagtgggaatatatctggaacagatccattgaaggataatcgtttgcttcttgaagctaaacctttggatgaatcagaagaagctaatcacacagccaaagtcgtgaacgaattatcccgggagatatcgcgcattcttgtttcccacccggttaatgtaaagagagctgcacaaggcaagaatattgctaatcttgttcttttgagaggctgtggtattcgaatcgaggtttgtgttcactgtctcttacgaatgctnttaatgaatctatatgctccatctacttatctgttatgggttttgtatataaaggttcctccttttcacgagaagcatggtttgt

SEQ ID NO: 22148 - DNA, 588 bp, Arabidopsis thaliana landsberg
tggaagaaaacaaagaatttatgctgctaaagcaatccggagacgaaaatgcacgtaggtgtcgtacgacacacccctggcgtcgagcgacaccaatacatgacggcaatttcgagacgcaacttattgatgtttcgaagatttacaaattcggccctgaactttctcttatttttaaagaaggtccatcacgtttttaggtcatatatatagttttaaaggacattgtttagacctaagcttggagaggctaatctccttatctcttttgtactttgggagcaagaccttgtggagactccctttggagaagatcttcattactatttctcttgctattattgatttcttattcagactatgatttgggtttctttgatcatgtctgagtaatccacttgttaggtttagggtttctcattagggattcatatggtttagtagatcgcccctttgctaggtttttatgtagaatttttcatctttaattgtttttaatgctagttctagatagatccctagaacttgaaccagacaatagatatgccatcataggtatttgtagttggatctattattgggtacgag

SEQ ID NO: 22149 - DNA, 857 bp, Arabidopsis thaliana landsberg
  unsure (1)..(857): unsure at all n locations
aagaaagatgaaatgttaagagtaaacccaagaaaaaaaaaagtgaccttttgaaatcttgaaagcagaaaaatgagtctgagaatctggtgcataaaaggaaacaaaaatagatggatttaagtctactactagctagcacttaagcttctcaccttgatatacgttggtttcttcggacaaagaaagaacccttgaaagttctctaaaatccgctggaagaaaaaaaatgaaatgttaagagtaacaaccatggtgaaaaaagtgacctttttagatcttgaaagcgaaaaaaaataaaaggattaaaacctatagctactaggtcttaagtttctcaccttgatatacagtggttgcttcggagaaagagccctggaaagctctccaaagtccttggacgacaataggaaagctagagaaatgtaagagtgactactgcaaacttgaaggagaagaatgggctagaaatgacgataatacccttgatctttacaatccttatcttgttttagaagccctataacacgtggacaaagagaagcatagaaaaaaccctacttacaactatatatttaattaaatacactaaaaatactaaactctatatttctaaagttacgttctttctgttttcacgtatttgttttttgtttttttcttccctcaattgttaaaagcatctttaatatacaatttttttctctatgtcttatgcataaatatgttaaattctaaaattagttnttgtcatgacaccagtttaatttattatacttctaaaattaatactagattttaacatgttttgtttaggagaaaaaggaagaaagaaagactaatagtatatgagtgga

SEQ ID NO: 22150 - DNA, 600 bp, Arabidopsis thaliana landsberg
taaaggtatgtttaatttgtcctctcttctaattttatccggttcgatgcaattttcaaattgagatatagtgaaactggtcatgtaggagtgtacaaatagtgtttaggaattgttttgcggaatctaaataattgggtttctcttgttatacttcagaattgacttcaatgctggcaaagaagacgttttgggtacgcatgagaagccagttcgatgtgttgagtattcttatgctgcaggttggtaaaaattggttatgatgttcgtgatgttttggtgtttctaatcatcccatggttttgcttgaacactatgtttatgtggcgttatagggcaagtgatcactggaagttgggataaaacgattaaatgttgggatccaagaggtgcaagtgggactgagcgcacacagattggaacttatatgcaacctgagcgtgttaactctctttctcttgttggaaatcgtttggtagtggcaacagcaggaaggcatgtcaacatttatgatcttaaaaatatgtcccagcctgagcaaagaaaagagtcctcacttaaataccagacaagatgtgtgcgttgttatcccaacggaac

SEQ ID NO: 22151 - DNA, 1117 bp, Arabidopsis thaliana landsberg
  unsure (1)..(1117): unsure at all n locations
tgcatctcaggctacttttttgtttgaaatacaaaagacattcaaaatagtaaacatataaaaccattgtaagatttgaaatcaaattttttatttcttaacaaaaacgtgaaacgttnnnnnnnnnnnnnnnnnnnnnnnnnnnnnngtgtgacgcaaaaaaagtccattcacatcattattacataatttttgtcataaggaaaattaatttgatttttccaaatttttttggttcttcctcttcagaatatctgacgtggcataaatatcgcctttttcacatcgcctgtcttcttttctgtctccattttgggaactttcatccataaacttctattgttctcatcgcaaacttgaaccgtcgtaaccctaaatcgccatcttcatcatcggcaaatcgaatctccgattatatatcaaatagcttaccaaatccgacatgacccaggccctcgttttcggaggactataatgatcggactcttcgtgtcccgtctcgattgcatggggtttgagctatgccggagcttcgccgtggagtccgccgtggccgtgttactgatgctgtagctcccaatcagcttccgcaaacacctacagaaaagaaaccgaagaagagtaccgttaaagctccaaaaccggttgccggcggagttacaggagttgcagagaggccgaggactagattagcggcgaggaaattaaaggaggaagataaagagatacctcaggagattccggttgttgtgccgtctaaggatagcgatatcgataaaaacaagggtaaagaggtagtcgttgaagaagagaagaaagatatggctattggtaatgatagtggtggctctaacaaggcggctgctcaggaagaagaaggaaatactgctcctttccctgagagggtataattgatttgcatagtttttgtgttgtttggggttattgaacttttcattgtaggcttgcttatcatctttctatggtaatgactaacgattccgtatcaggttcaagttggaggatcaccactatataaagttgagagaaagctggggaagggtggttttggacaagtatttgtcggacgtcgtattagtggcggtaatgatcgtag

SEQ ID NO: 22152 - DNA, 581 bp, Arabidopsis thaliana landsberg
ctgagctcgttggcgagaaacgattaaaataatccgcgcacgaggtggccccatcttgtagcagctacgcgcgccccggcgattcaccttctcggaccctgtggcccaccgttcagcgagtgcgggtgactgtttgttcggtgcgggagaccttgacaattcaccttcccacctgcggcactatataaatagacgggtaggtgtgaagttaccacaacattcattgctattgcactgttttgctgccaaaaatttaaccatagccgaagcttgatcatcgtgctcaaacaaagtgccgcttttgattctgcttcgtcacaagagctttggaaaaatcaaaaaagtcaacaacttcaaaaatttcaagaaattcataatcaaatggcaagagttcgttccactgccagggttgatcgtgagggggatgaaaccgaagctactgagactgttccgatttctgaagcgatgaagcggtctgggctagtaacatcggaggatgccctgccgatgaagcagactggctgatgttgaggagactgagtctgaagatgactatagcagcgtagtccaagtaaactagc

SEQ ID NO: 22153 - DNA, 595 bp, Arabidopsis thaliana landsberg
gattaagttaatagcaaaacgtaatcaccatagatgtataaattttttttatattacctaaaacacacagagttccaggaaatgttgtgacttcaaattttgtatgttattttattgacaaaaaaaagattcaaacttatggatttaagaaggaaaatcatgaaattcgaataattgatagtaaaatcatgagactcatttgttgttcttaaacaatataaaaagagggtaatgcaaactatatatatccattcaaacaacataaatcatatttcagtttctaagaagtttttctcaactctttattgcttactcaacatttcaattgtgtttttgttctcctttctctataaactgatgacaacctcgatgtcgtcactattcaaaacagaagatctttgatcattttaattgttatattattcccatttttctatttgatttttcttttctgcatgtaaaaaatatgagttatacgtagaaacatgacttgttttatataatgcagatttaaattccattgttggttttcttcaatccctgacaatgaatgaatccgacaatctcactccttctcgaccacggtcgatgactc

SEQ ID NO: 22154 - DNA, 255 bp, Arabidopsis thaliana landsberg
ttgatagaacagcaagatggtgaattagctataactgctataatgaatgatttttttgtatatcaccaaaacaccattcaaattaagttatcggaagaataaaattttattttagttattgtataatagcatgaaaacatcgctaagataaaatatcactaagtgggaggcgaaagtaacttaggaacagaggcctcgagctaacatcctctgaggagtggttatctttgcgttgaaacaacacaattacagata

SEQ ID NO: 22155 - DNA, 584 bp, Arabidopsis thaliana landsberg
cacaaagaaatcatcatgatcaagataaagaaaccgatttaacttaccatcatcttctcaacggatgcgcgagtttcagggtcgagatcaccaagtttgctggtctctggttcaactttctgagtgtctatctcaggttctcccttcacacaatacttccaccactccatctggtcttgctttgtcaagagcaccgatatcatcttttgatcctcgatattccagaagcagtcgtcaggcttgacagaattgaagaattctccatcgatgattagctcttgccctttcagaccaactttgagacggttcttcttgatttcacaggtaacagaccttgatttagtgccttccggcactggaatgttaattgtgacctcttggagattctgtccccatgagtatttctcataatcaagcccattgcctttgttaggaactgcacaaaacagagacatcaagttagttttgcaataaaagagactaaagttgttgagtctttaacacaagaatcaaattccaaaacttatcataacatacttatgaaacatacccttaaacaattttaacctaacaagagacatacc

SEQ ID NO: 22156 - DNA, 1418 bp, Arabidopsis thaliana landsberg
ccctaagatcaaaacacataacttaaactacttgttctcgcaaacaacaagtagagaccaacacaacacgtctcttcaaacacatcgcaatagattatggctgcaaagtaacatctagatatcaaagaccaaagaccaacacaacacgagactaaaacgagaaacaattcagacattttctcaatctaatcaatctcacaaagctcattacccaactaaaccctaagatcaaaacacaacttaaactacttgttctcgcaaacaacaaaataagaccaacacaacaagactcttcaaacaacaaaatagattgtcagatgcatccataacatctatagtatcaaagactttaaaaccaacacaacacgagacacaaaaaataaacaattcagacattttctcaatctaatcaatctcacaaagctcattactcaactaaaccgacattgaacacaacatgggatcacaaacaagagaagaagaggtcataccatgtcgtatttggtcgaggaatgggagagaggacagtgacgaacttatccctctccggcaacataagcagatcgtttagggattgaagtgtgtccttctggagatccggcgacagaggtggatattcttcgaagttgttgccttgagaggatgggtgactgtgagcccgagactcttgaactggagaaggcggagggtcttgctgagaaggcggagggtcttgttgaggagccggaggaacctgctgagtagtcgcggcttgagtcgctggattgttctgcacttctacggaggcagtcctttgcacttcaggttgtcgactgacaaagtgctggaacaactgtagtggcagcggatagttccaaacatgagctgtcgttgattgtaatggaggaacagcggcttctgttgcaggcgtctgtagctgaggagaccgttctgctgccagcgtgaaatcgtcctgagacggaagacaacgaggtcgtcgaccagccgtggatgtggaggctctctgagcaaggttaggactcgttcgcttcttttttcctagcccaaacatcgtgtaaaggagagatctagaagaaatcaaagaagaagaagagatttaagaggaaaacaaagaggtaagattgatttggtatggtttcgaagaggaaatcgaagagagaaattgaagaagaagactgcagatgtttcgaagagaaaaagagatttttgttagggttttcgcagaacaagtgaatggtttgggcctaaagggtttaggcctaaaaggttcagtttgtttaaacattagtcggtaaattgtcacaaattagttaccaattttgggcctcgaaatttttggcccaataatattgttatagtcgctaaactgtcagcaattagtcgccatatttgggcctcaagttatttgggccaataga

SEQ ID NO: 22157 - DNA, 1019 bp, Arabidopsis thaliana landsberg
acccatcatcggattgtagttattgccaggcatgtttgggctatttaccatccctgggttttgtggttgcatcggatagccttggccatatcctcccatgttcatgttcatgttcatgccgggtcccattcccatacccatcggttggttttggttcattccggcccccatacccatacccatgggttggttctggttcatacctccgtagctaccaacacccattcctccgcccatgggcatgccagagcctgtcattggattaggtggaggtctcatagcagttgcaccagaacgccctaagccagtgcctgatcccatggctttacccatattgatagtcgatgttgctggtgtgtttgtttgtttctccagccgtttctctctcctgttgatcgcctcgaagtcaactcctatgtctgccaatggatttgttttagctgcgataagtagaaaaacaaaaacaatgttagaaagtttgctaaagacgtttttttttccttaaatggtatggtgaaatctatcttacatccagatatgttaaagttaacaagccccctgctcaacgtgtctgcccagactgatgattttggctcaaactttttctgaggcggaggaacaatctcaattgctcctgttaaaggtgtgagatctggatgagatgatgatgacgtcaaggagttgggcgtagcttgcgagaacatgtctcccatgacattgttgttcccttgcagagtaacaggtccggattgagttcgttgtggaccatgggatggcggcattccatgaccttggtgtgccatgaactgaccagctggtccacttggggtagagtaaggagtttgtgagcccggctggtgcatgaagcctccactattaaatggcatggctccagtcatattttgagaatgaggaaccatgttatatggttgaacagcttgtccaaatggagtttgtccaggcaggtttggagctgtagataccggcggctgagaatgaaatccctcgtacatgttgtt

SEQ ID NO: 22158 - DNA, 1089 bp, Arabidopsis thaliana landsberg
agagaaggtttcacattttatagaaattggctctcttagggcagcttgaagaaaaagttttgatactcatggaagctactaacgattacagataagccaattatttatcacatattcattcccaatttcttctacatcggagtgtgttttagagtataaatgattcatgatttaatcaccaaatttttacttttcagggttgtagatgacgaattcaagcttggtgatgcgtttaccacttaaacttccataacctcctcctcccttacggcaataaccaccaccaccctatctgttatcacacgcattattattcgtttccaccatcgttttttctctcacgacacccaccaccaccatatccgtaacaccaccgcctcctgcgtatttagcatcaccagatctttaaacacttccacctcctccgtattcaccaccaccactgcctcttccgtattcttcaccaacgccatttacttttgttgacatgtattgtttttataaaacattgtatttttcaaatattcttttaaataatacattttctttactaaaattacaatgatctgtgtctctcaattcaaatgattgcatgtactttttttgaaaagttcatgttattttttttatttgacatgtaagttttcctaaaacatttgtattttttcgataagataactattttaaagataatgtgcattttactaataatccatgctttttactaaaatcacacgtaggatacagactcatgattcatgtgtttttttataatcacatgtaaattcatacaatcttatgtaatctataaataacacggatgtggtttgcttatctttgttgaagcccatttaccatactgtcaaagcaataaacctatgttttgatgtaataaaaataaatagcatttctttaaatatcctatgcaacatttctgtactcaatcgcaactagaggtgtcaaacgggtcagcgtgcgtcggcgtgcgtccatctgggctggcccgcaatgagcttgatttttaagactgcaacgggctggtctggttagaccgcgggcagaaataatacgatcaagcccgccccggaa

SEQ ID NO: 22159 - DNA, 3834 bp, Arabidopsis thaliana landsberg
  unsure (1)..(3834): unsure at all n locations
ctcgagttacattttgtagtttgatttttttctctgcgctgcactcttctcctcttggtttgttttagtcactttgtcacatatagttgcttcttttgtaaaattatctctttaacatgtataagttttacagggtgaagcgcataagatcccgaaggcattgctccatcagctgtgtcaaaggtcagggtggatagcaccaaagttcaataaagtgactggggaaggaagaaacttctcatatactacaagtgttatgcgtaaatccagtggatttggtaaaagcagacaagccgggggtctggtaactattcaacttcctcatcaagttgaggattttgaatccatccaggtacttacttgatctgcatattttaacactagataatctattataagatgctaaacaagtgtttagttaggctcttgtgagtaaatcttattagggatatatcttctgccaagaaagttagaccttaataccttgatctgccaggttttatggtgtactataatttgcttaacaacattgctcaaattttttgaaacttctgattatgaaccttatataagttgtaagctgttgaatggaattaatcatcaatacatgtataatttactgatataataagcatgctaattatatcatattcatatgtgcatgcgttatatgcttactatgtatccagctagctcattattgtgcatttgtgtgtgacaggatgcacaaaacagagttgcggcatttgctctccataagctattctctgatttgcctgttcactttgcaattactgagccttatgcctctctagttttgatctggaaacaaggtaattttgacatatttcaaaagtcaacattcatatgttctggccctttaatgttgcaaaattacaatcactctaaaagagttgctttgagctttcacagaggaatcattaggtataccaagcagagaagagcaaagaagagaaaaatttgttgaaagcttgcttgaggcagacaatttcagcttgactactacttcgagaggcatacacagtgcacttccaatggtagactcctgtgtcaaagagaatgatgacttggatgttgtcaaatctaaccacagagccagaagtatgtttcttggatccactttgtcacagtccagatcttagaacccttgattgtagtgccaaaatcattagcaggaagtataatcttctgaatgatatgttacaggaaacnnnnnnnnnnnnnnnnnnnnnnnnnnnnnnnnnnnnaaacaagaaaacaagaagaagatgcagaagtacaaggtaaaatattcttgtttatggttgaacacaagttttggctaattttatacgttacagttatatgtttaaagcttcagagactatttagcttattccagttaggagtgtagactctgtttttggcatgttaaaaaccttttttactgcagctttcactagtaatcgtaattattcttttgtaggacatgttgaaaactagagctgctcttcctatatcagaagtgaagaaggacatactgcagaagctgaaagaaaaagatgtcttggtggtatgcggagaaactggttccggaaagactacacaggtttggtctcatcagtttctccctgttatgtaaaatatctttcaactataagctttgagtcatttctaattgatacattattccaggttcctcaatttatactggatgatatgatcgattcagggcatggtggatactgtaatattatatgcacacaacctcgggtgttatcagtgagtatctcggtgttaagatgtcaagttttcaggatttgcttgtttggtttatattgatataaactgtgatcggttgattctcgttggtccttttacttctgcaaagcttagtgatatcaattatcctagcattataccctttttacttttggtttcctgttcgtaactgggtaatatggtttaggctatcactgttgctcaaagagttgctgatgagcgctgtgaacctcctccaggcttcgataactctgtggttgcttatcaagttcgtcatcaaaatgcaaggtctgcctctttaattttagcatttttctaacgttttatgagctcatttcactgtgttctgcttgtatgcctttttatcgctatgtggcttgcaatggatgattagaagcatttcttcttttttatctatgttttggtagaatggaattgtgaagttttatttgggcgtaatgttatttccttgtgtacttgttcaggagtgataagacaaggctgctgttttgtactactggaatcctactgagaaaacttgtggtacgtccctattttattaggagcccttgtgcatgcatcatgcagtaacctgaacagaacttgcaggggcataagcaaaaacgaatgattactcactttttaaaatctgtttgttcgtttgtgcaaaccttgcagggggatacgaccttgaaagatgttacacatattatagtcgatgaagtgcatgagcggtctcttatggtgagcattcattaacgcacccatcaatttcagttcatgtcaaaataaatatattttggcatcatttgctaagcaaaataaaatgacagtccagtacaatgctactaatgcagaagactgtacacagttatattacaacagagaagtcccaaaccttagtggtcaatacattgatatgttcattctgcaagtgttgaataatctcaccataaaatgcgtttcacttcatttcagggtgattttcttctcattattttgaagagcctgattgagaagcaatcctgggataacgcattacctaaactaaaagttatccttatgtacgtatttgtagacgttttgtttttcgatgacagaatatgaaaaagtaagtaaacactacttttgtatgtattcatgtgtgtaataacctttcaggtccgctactgttgatgcacatcagttctcaagatattttggtcaatgtcctataattactgctcaaggacgaactcacccggttaccacttactttctggaggacatttatgagaggactaagtaccttctggcttcagattcacctgctgctctaagttctgatacatccattacagacaaggtattataatcttttggatgctggtaatgctatactgaaactttggaaattgtgaagttgatacatagatttaatgtctgcagcttggttctgtaaacgtccctagggggaaaaagaatcttatgttggctggctggggagacagttatttggtttcagaggacagtcttaacacgtcttacgattccagtaactacgaatcttacagtgaccaaacgcggaaaaatctggtactttgcctttcgagttggagcttatgtttctcttattcacctttctgagttaaatatattgcaagtgctgtgcagaaaaggttaaatgaggatattattgactatgatcttcttgaagagttgatatgtcacattgatgacacttgtgaggaaggagccattcttgtgtttttgcctgtaagctgatactgaaatgttttgtgttacttgagaatcaatcatctatcacgttagcatgatatttgtttggttaataacagggaatgtcagaaatcaacatgctactcaataggttagctgcttcctatcgttttcgtggagcttctggagattggcttcttcctctacattcttctattgcatctacagaacagaaaaaggtgtttctgcgcccccctaaagcatacggaaggtaatatagttaaaagaagttcttgagttatcttctttaaattagctgaaaataaactctga

SEQ ID NO: 22160 - DNA, 467 bp, Arabidopsis thaliana landsberg
ccgacgaattatgatatggatatattttttgacctgtaggttagacccgtatttgatccgagataaagtgagtataagtttggatattaaatctcatccgcggataatccgttggatatccgaaattaaccattagtccattattgagcctagtcgccagcccgccaaagtaatattcaacccaccaaaacactaagggtctgtttggttgggctgtggctgtgaaaaaagttgctgtgggctgtgagctgtggaaaaagctgctgtaggctgtgagccattaaaaagctaaaaatcgtttgatagaaaccactaaaatcgttaaaagttcttcgatatatgttttcatagttccatctgaaaagccactaaaagcaggtacagaggtgctttcagatttgcactgtgagaaagtcaacttttagaaaaagctgcttcctggatccagccctttggttggcttttgg

SEQ ID NO: 22161 - DNA, 430 bp, Arabidopsis thaliana landsberg
tgcaagtcttctacacgcactttgtatgcaaactagctcggcgatctttagatgtgtagaaccatgtacttggattcaattctttctcacaaatgtcacaccagtatttgccacttgccttttcgccatagcatagtgagagaggatgatcgtctactctatgcattaccacttgtggtaatgtggcacaacagaagcataagacaaatccacaacaactttcaatgcacgtcagcacattatacgttcgaccgttgcaaccatagcattgtctatatttcacttgtcgaatgtaatacaaaggatgatcagggtggcttggatggacaaacggctccgaaactgaacagcacagaacatctaacaccccatacccacactggtacttgaaaccattggacattcttctacaagctatacaccaaaagaa

SEQ ID NO: 22162 - DNA, 642 bp, Arabidopsis thaliana landsberg
cactcttaacattttggtatcttatagacagatagtatatatatacgaaacataattatatacaattatattaaaaattgcaattaatcaaaaataacaaaactaaataaaatcaacaaccaaacatatacaaatattaaataaatgtaccctacatatatatttgaaaatttcaaatatttaattttatatgttaagtttcttctatattggaaatcattgatttttaaattatataaaaaaaactgaaccttgaataaattaatttgaatttatattataatatatattagataaatataaaacataaatattctaactttttttttcttttttttatatatataaaaccgttacaagatagtatgacggtgatcatacagttcaataaagcggaaagagtaacaaagcacacaaaagatttcaaagcatgacaactagggaggaaaaagaaaacgttttgaaaccaaattcgactatatgggtttaaccaaacccacctcgtcgaccacgatttcctcgacctcgtcttcctcttcctcttccaccatgaccaatatttattgccttgttcggcaattgcaacggtctgtcttggagatgttttcctgaaaatgttgactttagattcattatgagatc

SEQ ID NO: 22163 - DNA, 524 bp, Arabidopsis thaliana landsberg
gaaatatacgaggaaaagggggaacggttgatctgaaggtcatgaacagaaatgtttcaaactggccatgtctatttggggaactaaagaaacgtctaagaagacggacttgtgctcttcacctaaaggtcaaaaagttaaagaagaagatggagatgtgacaaactcagattggtttgagaattcgcttctacttccatcaattgagagtcttggtgtggattcggttaaacgtaaatggaatgttgtgcctatggagtttaagaagaaaattgaagagaggttggcgttgtcggaggctgatgaaagtgaatgcactaaaatggaagagatgctgaaggttaaaaaacgtgaatgcgtgaaacaaaagactaaccttttgaatgaggtgatcgatgtgatgacttgagactttagatctgaagcttaatgttttctagcggtgcatcctatgactctatcatggtggattatctcgttatatatcttagcataacagaagctccttttggtagaaaacagat

SEQ ID NO: 22164 - DNA, 628 bp, Arabidopsis thaliana landsberg
  unsure (1)..(628): unsure at all n locations
aacagaagaaatgaacgagaagaagatgatgaaagaaacaaataacgttctgttaaaaagactggctgataatctcgagcttttcttttcctcgataaccgatagttcttggccttgggtgattttcactaaactaggagcataagagactggtaggttagatggtatgcaagttactccgaaatccaatattctcaagtatccattatctccaatgatgtaagctatgttgcacctcatttgtttagataagcttctaccaaacactacggctaatttcttctcttggtcaatgaagaaactcgtaactaaaaacttaattctaaaatgagtaaatgttaagaagttgctccatgacacagcattgggttcaatcttagttgtcacccatatctccatctcagattcttcccaattattaaataacaccacaagatgttcctctctagtagaagatagagctacattatcatcaaacttatcaatttgaaatgggagaggaagacacgacacanatctctctcttgtaaaatcaaaagaaagtaagcaaccagctagtccttcccctattttctcacctcgatagaaaaaataagtatttccctttattgacatgtcacgtacataa

SEQ ID NO: 22165 - DNA, 557 bp, Arabidopsis thaliana landsberg
catgtccttatggcaatgacgtcgcagttcttaaggcctgtggtgactcgatcaaagagaaatttgcgggtgtttgcgaagagtgaatagatgttagcgtcatgtccacgtaatgctacttttgatgaaggatacccaggtggaggagaacctaattcagcacgaggagcgaaaaacatagctataaaagctgccgatatgatctggtaacttacacttttgattcctaattcttttgccatttgtggaatccagtcaacaaaatcgaagaaaattaggtcaggtttcaaagaacgaatcttaacttcaatctgttcgcgtagaagatccatggcatcagcgaggactctcttagatgagttcgggagatccgcggttgtctctgcgccaacagggagaccatcaacatgaggaagagtaacattctcgaagtgaatgctgtttgggaacaagttgagaggttcgagttgtttctgagctttcttgggagccaagaaagtaccctatgacctttttcagctaatttgttagctagatgaagatacggaatcatatga

SEQ ID NO: 22166 - DNA, 560 bp, Arabidopsis thaliana landsberg
  unsure (1)..(560): unsure at all n locations
aaattgtcgatgagaaaataaagaagaagaaattgaagcttaagggttttaacgcaacatacctcggaattaacggtgtcgatcgacactagcttagtgtcgattgataccattgagcttgctcgacaccaaaactcgtaattaagcctttttttttctttttcttttgaataatcaaagatagaaaataattaagtgaaataaaaaaaactatatataacttaccagtgggtnnnnnnnnnnnnnnnnnnnnnnnnnnnnnnnnnnnnnnnnnnnnnnnnnnnnnnnnnnataggtggatcctgaagatccaatggtctcgccatagaaattttggtttcaaccaaataatgcttgactctttgtccatttactgaaaatttattgccatttttcccaataagaacgatagttctatatggttgaactgaacgaatgtagggacctgaccaacgagaagacaacttgccatgaaatatatttagtcaagaattataaagaagtacctggtcattacgtcgagggatcgagagatgatcttcctgtcattataggccttg

SEQ ID NO: 22167 - DNA, 608 bp, Arabidopsis thaliana landsberg
ttgagaagaggctgatatacataccaagacaaatgtatccttctcagggttcagctttgaagtgatgtcttgtgcccatgttccaaattggcggagtgggaacactttgaatcctggcaaggatgctatctctctggtacaacaagtagtgaaacagaatagaagaaagcaaatgtgagttgactatggatactttgtcctccttctaagataaaaatgtgcaaggtacacatgaatctaaatggcagagcaatcaaactcagcaagatacacatgaatcataatgttgagaaagtatgaagctaatccattgggcttcattgaagaaggaaaagtatgtcaagatgagaaatgaaaggaacttacatctcattgggttctctgacatcaattaactgagcctcatccatgaaaactggatcttgcattttggaatgcagctcctctacctggatatctttcaccggttctctgttaatataaaacttttcgtcaagaaatttacaacagtcagaatagtaaatgtcgcttacagcggaggatagttttcagaagaattacctctcagatagaacttgcaataagtgcaagccaaattgggttctaca

SEQ ID NO: 22168 - DNA, 487 bp, Arabidopsis thaliana landsberg
gatgatgatgcatgtatgatctacactcaaacgtctaaatcatatattcttagaagataatgatacaagaaaatcaaatctttgtcaaagcctgggatgttaacgaagaatttgttttaaattaaaaaaattttttttgtcaaagctcatgtacaactaaagtaaaaaattcgatataaaccaaatatattgaattagtcaacataacacaaacgggaaggacaatcgttcctctactgttcctttttctctctctctctttaaagctttttccaagttcttagatctagtttgttttcgcctctgttctttatcgtaggtcttggatttacaagacgaagcaggagtgaggcaagctatcttctccggcattggagtggtgtggattccgattagcgtgacagaggtggccctttcttagagacgagaggcttctcttccgattcttcctggttatggacgtcggcggagatcggtggagtctttc

SEQ ID NO: 22169 - DNA, 621 bp, Arabidopsis thaliana landsberg
aaaaaccggacacgcgtgtgaacaagataccgcagaaaactccaatgttattatgtgatacaactttaaacgaagcatttgctttggcaaactttaataacgaattatttattcaaaacacagtacatactattattatacttttgattctctgttccgcaggagttgggagtaggggaatgtgaagtagtagtggtggcccaagttgtgtttccaaacaaacgccaataacgaccaaatctagatacgtgagttacattgggccacgtgggagcatcaaatctcaagcgccgcacttacttttcaacgaatggctcagtttcaaccacttcgagaaaaaatccaaaaccaaaaaggctatttggaatcttttcatcttttacaaatttttcctattgtatttttctctttttgttcggcctgttagattgctttgctgtactatatttcacgaccttccacgaatattttaaaatataaataaaagttgcaggcgcatatcttaatattcaaaagattcatttccaatataacaacattaatttagcaaattataacaacataattcattttatttgggcaaaacaagaaaattccttaattctatatacaatatatcta

SEQ ID NO: 22170 - DNA, 609 bp, Arabidopsis thaliana landsberg
aaccattgcattaacttgttaaattaaatagatgatgagaagagtgttaatatttaccttcattatccgaaatcatccaaaatcgaagcacacaggttgtaggattcataccaaaacgccattcataaccaagacctagtccaagatccctccataaacgcacaaacaaatcacaagtatatccacttgcaacacatgtcagagattttcccctaataagaacatcaaaattatttctctcaatcatctaagttctatgaatttagacacctataaagataacaatatttactatgttttaatataattatatataaccatatagatgcagaactatatagtcggaaatactaaccaagtattttttagctcaaactcaagaaattgagaaagtctaggattttaaaaatcttgaggaacataatcgagtcttgttatattcccaactctcacgacaacaccataagcatctacacaaaataatcgaaaacatgaaagttttagatttccaaagaaacagactcaataatttaatatttttaaaaaagaagggtaccatgagcaattgtacaattaaccgtcttgttttcgatcatggagaaggaaaca

SEQ ID NO: 22171 - DNA, 667 bp, Arabidopsis thaliana landsberg
ggcgggttttataggcgcggacggccggaggcgccggctccaccgtttggcgcgacgcgggcacggggggcgcggggcgtgctctggcgagctcagagcgcgtcgaacacgtggcgcgttgcttctgcccgtgttcttcgttctgctgagcggccaggcgtacgaatcttgccctaccgcctgtggaagatttcttccctgcacctagggctacctagttcatgtaagttccaagggtagatgcggcctggttgaagagatacggtagcgccaagtcttgtctgtctgccctgtgcaaaccgagacaaaaccagtgccaactcgtgtcaaatggttttggcttgggttcaaacttttccagggcattctagggttcatttggcgccactttgctaattgggtcgactggttttgaaaaggggatcaaggtgaacatgagggatctttgctcaagggtgggtttttacttaggcaaaatctgcatttgtcccttgtgtcaacttttggtgatctttttaggacttttctgaaaactttttgggggtactccttactattaatggtaggttattgagtgtattacacttttatatttggtcgaaccatgatcttgatgtgacatgacttttgacatgcatcaattagggtatattgcatatgggggggg

SEQ ID NO: 22172 - DNA, 512 bp, Arabidopsis thaliana landsberg
ttgctggcgctctcgggctggctcgcaatatatgctgcgttttgattggtttaaaagattgtgcttctcaatttcctagcaaggcttgcgagggaggggcgaggaaataaattcttatatatacacgataacctagtttgagcgaaactcaaacctaccgcatcaaaccctaaccctaattcttttcttcgattctcttcttctccgatatgttttcctcgtcgccggcttctcttcttctccgatctattttcttcgtcgccgcctctcttctttttcgatctgattacgtcaccgcctctcttcttcttctccgccgggtctcatattctccagcagccgccgtaactcttcttctccagcttcagccgcgagtcgatctgtttcttctccaaggaaacggcttcttctccgatataacttcttctttccaatccaactttcaccgaccgatctaactttttcttcttctccgtcgcgtctcttcttctccagcagccgtcgcgactctt

SEQ ID NO: 22173 - DNA, 555 bp, Arabidopsis thaliana landsberg
ctcgcgaagtgtatacctaagaaaacatgtgtacttttcgttgattctttttctttaagccaaaaattttacttaaattaagatctcacaaatcttaaccaatatgaaagagcacacaattttattcaaacaacatcaaatcatttataacatcatacaaaaacatatgacctatcgaatatataaagcagaaacatcccaacgaagagtgtccacaatgtcaaaagtaattcaaaaatagaaaaatacgctattaaaagtactaactaatcctaactgttacagacggttcaaaatttataatattaaaaaatataatagaattggatgcatcaggttattatgtatattgaaaagatataaggttaatcaaatatatttctggttgaaaaataagaagatcgacaaaataaaaatataagtttaatgcaatcacatattgtttatcaaaaatttacagtgcttaatgatttctatatattttgtttcttattcatatgcggggtgttgaaaatagaatatgtctatcttgtacttatatatagatatatatac

SEQ ID NO: 22174 - DNA, 542 bp, Arabidopsis thaliana landsberg
ttcgcaccatgttcaagtatgttacatttattcagtggttaaagaaatgtaaattatatgaatcacactccattttcttgcctttacagatattacttaacaagtgagttatccgagaagagtgatgtctacagtttcgggatcttgttactagagattatcacaaaccaacgagtgattgatcaaacccgtgaaaaccctaacatagcagaatgggttacatttgtgatcaagaaaggagatactagtcaaattgtggatcctaaacttcacggaaactatgacacccactctgtctggagagctcttgaagtagcaatgtcatgcgcaaatccttcttcagtcaaacgaccaaacatgtctcaagtaatcataaatcttaaagagtgtcttggtgctgaaaacacgaggataagtaggaataatcaaaacatggactctggtcatagctcggatcagcttaatgtgactgtgacctttgatactgatgtgaagcctaaggcaagatagtatatacgtggatctttttaaagtgacataaa

SEQ ID NO: 22175 - DNA, 565 bp, Arabidopsis thaliana landsberg
  unsure (1)..(565): unsure at all n locations
gctcgttttctctcttctcactcaattctcacctccggtggattcgccggaaaaattatttctttaaaaccgacggcgaggttgaaattaacggtgaagtctcgacaaagtgattactttgagaaacagaggtttggtgactcgtcttcttcgcaaaacggtagggttttcactcattgtttgagctttgaaaaatgggaagctttgaaattcagaaagtttgaaattttgtttgtttgtttgttttggttttatagctgaagtatcttctcctagattttacgtgggtcattcgatttacaaagggaaagctgctcttacgatagaaccacgagcaccagagtttgtggctttggaagtatgtgtctttgtcgaagatcaaaaactctattgtattgtttgtttgatcttagattgatctccattcttcatgttctgatccagtctggtgcgttcaagctgacaaaggaaggttttttgttgctccaatttgctcctgcagctggtgttcgtcaatatgattggagtaggaagcangtttggtttttatctttcacttactact

SEQ ID NO: 22176 - DNA, 478 bp, Arabidopsis thaliana landsberg
gcccctgcacatcaacagctgaaatcgcaacgatcagcagtaacggctatatcaatggctatagagcatttaatgcgtcatcagatgtcagataaagcagttgcggacgatcccgccgtgcaccctggacggtccgcgagagctaaaaatgaattttatcgaacccgtcgccttcgggtttttcttgtttttcaacgaccggacggtccgcacctaaggccggacggtcggcgcttggtctcggacggtgcttgcttttccatcagacgatccatagtgttaacttatggttttgtagtgttcctgtctgaggctcaccctagtgtcccggacggtccgccgcaagggccctggacggtccgcgcataggtgtttttcaaaaagcttatcatgttcggaataatctacggtattccggacaatcgacttagaatagttatagatgaacttatgcacctaagaaatgataaactaggca

SEQ ID NO: 22177 - DNA, 406 bp, Arabidopsis thaliana landsberg
ggactggacccgttacaaacaaactcctcgagctaatatcgcgaatgtcgtcaacacacacggcaagaaattcggaaccctaatctgttctgtgcgcgcacgaatcgtccggcccacaggcgcggactgtctggagcgcggaccgtctggccccagggctggaccgtacgtcctctctttttggtgcccaacagccttgtgagaatattgtctactatttatactgtactgcatatattatttttaaacaagctttacctctgctctgcttttcagaaagcaacgtcattcagggtaccagctacaagatcagtgccaaaacattagcgtacttaactctaatactttccatatgtttatgaataccacctcaagttcatagtccccatgcagcatatatgtagac

SEQ ID NO: 22178 - DNA, 295 bp, Arabidopsis thaliana landsberg
aaaaattgttaaaactaaaccatacagggtaattaatgatcatattactccactatttttatagaacactagtggtggtggcgaagtgcccataacagcttctcacattggtgttgacttacgcgtcgtatgagttccttgactaacgccaacagtagaaagcatccacacatatttgtgctttgaacagcgctccgaagagaaatgattgtggggagagaacaagctcacacactcatccgctagtagaggaccatactgctctgaggcgtcttaaccttccaagaatctgctc

SEQ ID NO: 22179 - DNA, 2028 bp, Arabidopsis thaliana landsberg
tggtgtgggttgtcccattggtacagtccctatgcaaagagtcaccaaagacgatcttttaagattagactcatttggtgataatcataaaccctgtggttcctggaacactaccacttatgatcctaataatgttgttcattacaaccaacatcgtgtaagtcacttctttttattaataaaacaagattatcaattcacattttgatatatattgataatattcctgggcattcaattcacagtttgcggtagctcgaacgaagaacataggaaggaggttcaatggagcaacgatggaactttgtataaccgctcctaaggttaagccaacccaattcagtgcttcaagacttcacattcagatgggaagggatttcctccaagccggtttgactgtaagtcgcttagtttatttattttgcattgagctacgacttctgtttacttaataactttaaaaaacatgtgttaattatactttttaataaattaatgatttcaaataaaacaaatattgtttactattcaggtaaatccagtattgtacaaggacaagcaacctcgaacttttgtctatacagatgtgagtcagtcacattattctagtcaattctttttctaatattttttttgaatatatatatatacaagaattaacatggatggaacagtcaaatggaaactcatgttacaataccaactgcaacgttggaatagtacttattcgtcatgacattgcacttggtatgtcattggtgccggtgtctactcgtggtgattggccaaaatactatacaaagatcggtctagacaaggttttctcttatcaaatactatttcctgacaaattatatcctatttattattaaaaaaaaaatcgggtttgagtgcgactaaccattcaaaagttcgacaaacataaaagtaatgtcttaattcacctattattttctggtaataggagagaaaaaatggaaattggtggttgcaaatgggtggtaattatgagccagtaaatattggattttggccggggcataggcttcaacaaagctatggaaattatgtcgagtggggtggagaagtgtacagggcatcactgccgagtcctcaaatgggatatggatattttccaattcaggataaaaattatgatgcatatatccaacacatatccatacgcgaccgttattataacatagaccgcaatgtggactatctcgaagactattcagacgataatcgaggctatcaagtgatagacacccgagatcctatacatagggccggtcatataatcttttatggtggtccaggaaatatctaaaaacgataggatctttataatataaaattaaaacattgcatcgacttgattttacataagtatcggttttattatgttctttaaaacaaggacttaataaattaaacagaaaattggtacaataattatatatatgtgcataagagatacaaaatggcatctacattagctaaattaaataagaaaccatttggggtattcaaaatgaaaaaaactgtcttcctaaagagcatatgcttatcggtttatagcttctaagtccgttttgttaacaaggttccatttgattacaaggcatatgcttatatcgcaaacttgattttaccgtttactgtactttacttcgtacgctatcacattctcgaaagatatgagtttcaagctggtacattctcgaaaatagaattaagacttcaacttagagatgcaagattataaaagactcttcttttattccttaggaaacttactcaaaacctaagatcttacaaactcttaatctctctcaactcatatggtcaaccacaccttgggactcatatatatagagacttgcaaaacctaaacacataaggattaatactagataactcctaaaatatatctttggatatctcccaaagatttaatataatccttttaaactaaataacttattctcaagttttatttcaagcttatctcaatattcttgaaag

SEQ ID NO: 22180 - DNA, 612 bp, Arabidopsis thaliana landsberg
caaactctgagatttgttagggattttcttctttagtggtcgaaggatttcgcttaagttctgattttaataattcatatgtgacagaaaagtgtgattactctaattgggaaggataaataatgacgaggagagaatcctcgcttctcacgtggagatttgattaagaagattgcatctccaaaagtcaaattaacaaccttcaataaaatagctccaccaaaaacgtgaacaattaaagaaagacctcagatgttataacagttaccagagagctaaaaagattgaactattgcggatggaatgggccgcgcgaacgcagccccccaaggcaacaaataatgacgcaggatctcccacttggccatttggggaaaccttaggcttagcgcacctcaagtgcaggaagccactagcctaggccatgggtattcattcatgaacaaaagattgacaactgggaatggtaggggctgcgcgaacgcaaaccccctctgccacaaataatgacgcaggctcttccacatgggaagaccttaagctatgcacccttcagttatgtgcaatggaagtcctagcctaggcactcgtcttcttgatacgagttgaccc

SEQ ID NO: 22181 - DNA, 418 bp, Arabidopsis thaliana landsberg
  unsure (1)..(418): unsure at all n locations
gagactacgcagtcctcccataagatctccaattcgttttcgaagccgatccccnnnnnnnnnnnnnnnnnnnnnnnnnnnnnnnnnnnnnnnnnnnnnnnnnnnnnnnnnnnnncatttaaactattgactggggtctctctcgaggattgtattatgttacagatgcatagctaagactgattcataacaagcatgtaagtctttcatcatacatgagtataccccacgatcctactttggcttatcctttgacctaggtttctgacataccagctcctagagtcgttgatactaaatatgactaagttgtatacatcagcctggggtttgttcatgattcaattttgtctttaactgcaagcatgggacgaggtccaggtgggaaacgagggaggtcatcttcttactctagttc

SEQ ID NO: 22182 - DNA, 582 bp, Arabidopsis thaliana landsberg
gatcaccatctttctcttgaacaccatccttctcttttggatcaccatccttctcttggtccatctcttcttgattctgcaattgaacaaagttatatcagtattacgcagttatactctagtatcacaatgttactcagtattacgcaattatcaatacatacctttctctcctcttctttctgctcatctttgaatgcttccaacgattcaactcttttatccaaatctgaaatcattgttataatttcattcagctggtctaccatcttcttatccatgttttcaatcatctccaccaaagaaaccaaactcaggagttcttgtccacctattgcgggaatatcctccgcacccggaatctttggacttgcggtgatcgtcagagcttgaatatcctgctggtagagctcaacaaacatgattagacagttctcgttacgacggcttcaccaactttcaaccaccacatcagccacgtcaacgtcgtcgtctgcttccttgaattttttctatgagtccgtgctcctaaattccaggtgtgatgatacaaccaatgacctgtaaaagataaccatgatg

SEQ ID NO: 22183 - DNA, 610 bp, Arabidopsis thaliana landsberg
aaaggggcgggtatatatcttgttcatgtgaccctgagggaagtagaaaactctctcttgagcacgaggaacttccactaatggacctgcacaaactttccatagctctgtgtatagttgatcttgataagaccctaaaatcaaacaacaacaaaaccctaacagtcacatttccgcggcaaaactataacaaaaatgtgaactttgaagctatacgagaaaaataagaaagttggggttttttctatttctttctaagctcgtctcccgagaaaatgaaagaaaaaaaaatcgaaactttacaaagctgattttgattctacagagtaaaaccccaaacagagtcactgttagaaacaaaaaaaaaaacgaaactttctaaagtctcagccttttactactcacttgacgaagaacttccgaaatcatcatcaccttcaacactcgccattgaagaacccagatgagaactggagaagaagaagtagaaggagaggaaatgaaagaaaatagaaagaaaaaaaaaccttcacgcggtaaacactagtcttaaccccatgaaagaaacacgagagagagaagaaagaacagacccatcaatggagaaaat

SEQ ID NO: 22184 - DNA, 629 bp, Arabidopsis thaliana landsberg
  unsure (1)..(629): unsure at all n locations
ccannnnnnnnnnnnnnnnnnnnnnnnnatagcacagaagtggtcccaccatgtccgagcagggccacgaagctactgctgcggcgaacggnnnnnnnnnnnnnnnnngggcagtctcccgtgaggaggggaaacttggactcaatgacgcaaagccacacgttggcgtccaacggatcctctgccttggtgaacaagggtggttgcgtgctcaggaactcctggtaggttgccactgtcggaggtcgctgatgctagcctccaccatgttgttgggggtggggctggcgctgcaagagctgtcgcagaatctcgttctgctgggccatcagctcctgtactgtgggagctggaggaggtggcgggggaacttgctcgttttgcccgcgacgctgcctagctgccatctgaaaacagagattgtcgccaatgttatcccaactcgcaatttcgaacgacatgctattatcttatatggaaagaaaattgccataatcataacattaggtccgaaatgaagataacatggttacaaaattccatagatctcnnnnnnnnnnnnnnnnnnnnnnnnnnnnnnnnnnnnnnnnnnnnnnnnnnnnnnnnnnnnnnnnntaacccgcgtaggt

SEQ ID NO: 22185 - DNA, 543 bp, Arabidopsis thaliana landsberg
gaacgaagaggatccaaaaaccatcacaacattttatgacttataagtttttcatcagggatagtaattcatgtgttgaacacaaacgaaatattcaagaaaactgtgagcgttgcgaagaaagagggttttatcacgcatatgctatatcttagaacaatgaaagaacgaatttagatcatggcatatgacaacttgaaagttacctgaagatcaagtgcataggaggtgtctttctgaggctctgcagtttcatactcaggaattgcatccaatgccattcttctactctgcttctttttcaaaccaagttgcagagtcttggttaagatgatgggtgttcctgagaagcaaccagtaacatagacctcgatagttggcaatggagacgataactcttgaccgtttatgctcttctccttaaggaaaccagaccctgcagtgacctcagcctcacaattcattttccatcgattctttgattccccagtgaaaccattactaccagacatctcaagagttccagacaaaactagctcattt

SEQ ID NO: 22186 - DNA, 497 bp, Arabidopsis thaliana landsberg
atatatattatatgttttttatacaattgatttggaatgatctgcaatgtgagtaagtcgaccaaatctttaagggcaattagggtttcgaccaggaccaccatagtagaagtaacttccccaagaacctccattcccacttttcacattgtaacagttctcttgatcagtaaacacttgaagattctccgggtttctcagttcattcgatccatcaactacttgaacgttcttgaagtaactcgcttttccccaaccttcctctgcaaacctcccacttcccatctgagtggatgtgcgttgtccttcctcggactgcgagttaaccacttcgcctccccattcgatcatcgatgcactttctgataagtaagagaagagtgaagctggccaggatcctattatgtatttctctccaaactgtaaccaccaatgtgcttcttttggatgctgagaaaaaacaaaaaaacaaaactgagatttcttaaaccatagct

SEQ ID NO: 22187 - DNA, 584 bp, Arabidopsis thaliana landsberg
taagcaagatgaacaagatgtggtgacaaggaacaagactcgacttgtggtaaaaggttatgcccaagtcacaggtttggattttgaggagacttttgctcctgtagttaggcttgaatcaatacgcatattattggcctatgatgctcaccactcttttaagttgtgtcaaatggacgtgaaaagcgccttctgaaagaaacaggtgacacctaagagggggtgaattaggacttctaaaacttcttctaaactaggccacaaaaaaatcctagagcaaaacctatgcaattaatcaaactagaatgtgcaaactaggttttgtctaagtgtttgctatctctaccgcaatggctaagtttcaatcctaaacaatataggtatgaatacaagattgaaacttaaatgcttaatgtaaatgcaaaagctaaagagcaaggtagagatgcaaactcttgtggatgacgccggtatttttaccgaggtatccagaaccacgcaaggttcttactaatcctcgttggtgccctatgcaaagggaagccacgcgagggccaagcactcggtcgagtactccatagaga

SEQ ID NO: 22188 - DNA, 402 bp, Arabidopsis thaliana landsberg
aattggttctaacaaaagaattagctacatgcattaatggaaacctagtcatttttagttgatcaacattgaactggataaacaattgattatatgaatcaactagcgtaacagaattctaaattaagtttcctatttcaataacatgaacaatgattaacccggcctagaataaaattaataacagtaatgaaagaaaatacaataagacaataaaagaaatataaatagggggggcggttgaaccggccagggggctgttgaaccggcccggggcaggggcgggggcggccgagctggggcggctgagcgcgtagggggcggccgagctgggcgcgcagtggcggccgaaccggcgggggcgcggggcaggtggctggcgaaccggcggggcggggcagg

SEQ ID NO: 22189 - DNA, 529 bp, Arabidopsis thaliana landsberg
atgggatctccagtctcttttgcagataaactgctcatcaacatcatccacatttcagagtctattcattcttctcaccattcacgaagctcctgctcctcaagattcaatcaagaaatcttcaaatgtagctagtgactgtaatcgctgccccagcgacgcaatggttctctggcactctgcaaactttgaagcagccactgctagttccttctcctgtcattgtcacattgtcatcaaggagttttattacaaaaagaaattaacttgcgagttcctaagagaggatataaacttacctgcttcagctcaaaacctttgatatggttaggcgcaggctctgtttcttgatgatgctcgagttcttgttttagttttgagatctcatcttgcagttcgttgcactttgaaatgtgttttgctgataaagcacgttccttctctgtgacgtcttccagtgatttgattttcaagatcaaagattccgcttctgcttcgacatctttaagtcttgattcaatcgcttcag

SEQ ID NO: 22190 - DNA, 147 bp, Arabidopsis thaliana landsberg
taaaatcttgaagtggacttggatcatatgctttggcaatggtgaccaaagctgataaggttacctgtatgagagacatggacaccttcattttcaaacaaaggtttttttttgatctaatgctttctagatatgtcatgcgctgta

SEQ ID NO: 22191 - DNA, 590 bp, Arabidopsis thaliana landsberg
ccttccttgcttgttttctcacttgctcctttattactttcttacttattttctttacctactgaacttgtgggaccttgttacttcattttcttaatcttcttactcagttactcaaaactatctctctagcttgtttctctgttgaattttatttagatagttctaggtctctgtttgacaatagtatagatggaagactattgagcgtctatcaacggtttcacacgattccagttatacaatattggaggtctatgatcattcttctctctttacgtcctcgttgatcaggtgattgtggggcttttatatgtatatgtccatgggttatactactaatatacaaggtaatctcatttgtacatttgcagattttaatttcgtttgcaatttctggcaaccagtttctgaagcaagagcctcatgaattcctggggaccatgaaacaaggtactccttctttttgtaagtccctctttgaaagatatttcttcatttgcatttcttcttctctctaatctttatcaaatccgtatttctcatcattctgatttttttgttattgcctttcttctatggtattgggg

SEQ ID NO: 22192 - DNA, 333 bp, Arabidopsis thaliana landsberg
gcataaatcggaaactgacaactagcttttcccatctctgcaaaacagtttcacgtaagaaaacgcatcgagacaaacagacaaacgaacaaaattttcaaggaacttacgaattttaaatgaattgataacttctggcccatgtaaaggttctctcgttctaacaacagcaagcctcgcatatatccctacaaaagctcctcgaggtcgaaaaccaaacgaaacgcgctaaaaaaaaagcataaatgacaatcttccatgaccataactaaaaaagatctacgaggaaacatatttcactcggaaatgaaaaagatgtcacgatccgaaaaa

SEQ ID NO: 22193 - DNA, 544 bp, Arabidopsis thaliana landsberg
aaatcctgtttgtaactgccgatattggtgtcgatcggatggaaccccgcacaccacatagatttattagacaatcatataaccaagatcaaatgatagcaattcatccacaatttttttatataagaaaaattcataataattgtatttaacaatactacataaataattatcattgtaaatatattaaataagtagaccatggcataatcactattgtgctatggtgtatgtgtgtcttcatataatgtatgatttaaactataaattaaataactttctattgatcatcattgatagtttattaattaattttctatctgaaatatgtttaatatctattgttaaactttaaaccttgtatatcagaattacaaatacgagaaataaatttcaaagtaaaaaaaaaactaaattatcaaaaactaaattaccataaattgtatctcataattatcatcacatatattaaatattattttttatttttaaaaagagctagccctcaaattagagtgggcacaagaaaacacattttgggaga

SEQ ID NO: 22194 - DNA, 3393 bp, Arabidopsis thaliana landsberg
  unsure (1)..(3393): unsure at all n locations
ggttcgaagatattgaagaaagaagagaccgatgacgatgatcatgataacagacctatcaagtcatctgtatctgggtctcgagctaagccagtgaagaagaaggaagagattgataaagacgatgagaagaagcctgtttctaagaggaattcttctgttggtgtctcaaaggttcgatttttatttctttctctctctgtttgagtataaatattgaggatggtaaaatatttgatgaggcattgttttgattatgagtctctctctttgtttataggagaataagaaaccacagaaagaagaagaagtaaagaaaaagagagaaagaaaagtatatgatttgcctggtcagaagagagagcagcctgatgaggtatttttttgctgctctgtttctctgctttttagatttgttgttgaattcgtctgaagaatttcttttgttgattttgcaattctgcagagagatccacttaggattttctacgagtcactttacaaacaaattcccactagcgacatggctcagatttggtaagctcttctattcctttctctgccttacattgttctgcaactttaaaacacttacacttaatgttttgtgtttggtatgtatctgattatttgtgtttgatcactcaatctgcaaactgagtcctacaccttaaattattcccccgcccttcatgcaaacttgcgtttgattttagatggtctcttgtgttttgcgacacggtttaagctagttcgcataaattttgaacatcataattggactcacattgtatgtaagaaaggggagtcctttcaaaccagtcactcaaagcattgattatatgatctgtgatggttatgtgtaatatttgcttttagattgctttgtttatttgaaaacccttttgtggttttgatcacaggttgatggagtctggattgcttccagccgaaaaagcaaagaaagttcttgagaagaaactgcaaaagggtggaaaattaagttctccagtaaaatctgctgcttctactccaagaagcaactccaaatcagtgaccgtgaagaagaaggaagtacaaaagtcgccatctgaagctttgtcaaacaaaaagaagggaaatgattcgaaaccaaccacgaagaagaggaagaagaactctgatgatgacgactcagatgatgattttttggctagcagagtctctaaaaaggctagagccaagtaggttgaattaaaagactgaaatctcattgtgttatttgtaatcgtttcttagggagtcaatttgtagaatgcttgaaaggtgaattctttaagagtaatgagagagatggccaattgtttctgatcttatcgtgtacttcttccgttcctaagcaaagacttaatcacgtttggtatagagaatgatagttactcttcgtccatgtcactactttgtaaccgtcgtcgttctgactagcgaaaaagccgatgaactgatctttgagtgacttttccttgtttgctttattcttcgatatgactctctgatgtggcaaggtctaataggtcctgattccttcctttccctcataacaactcgagctgtttccacaaggnnnnnnnnnnnnnnnnnnnnnnnnnnncgcacaatgatgttcatagtgtcgtccatcttcggaccccctgtgattctctgtaccaacttctccatgtctgatttcttaaaaccagatcttctgaaagattcatatctgctcatttgttcctctgtaaattgtgataaaatcttctgcatcttgttggctctagtcacaggatcagcaccagttatgtttttggtgaactcaacttcatctttgttcttcgcttcagcaacaacggacgttttacatttcttcacagctctctcatctccttcaagagtctgctcggtttcaacaggtgattcctcttgctcctccattgctgcttcaaacggatccttcgaatgcttcattcttaataaaaccttaacgaaaatcacatatctttggatcttaaaactccaaaattcagccaatttttttgttgcacatccgaccacactagaaaaaatccgacatgaacatgaactcaaagaaatcaattttttgtacttgtaattacaagtaccttggcactggctgatctttcagacaattgcagttacaagtaacccgctcgttgctactagcaaaacaacaagaccttgcgttaaaggccatttattgtcaagcctattttttaagaagcccaaatgtaaaagtcggtgggaaatgaagtatctttatttatagaggcaaaagtttagcttcctttatactaatttactcgatgtgggacaattgagagaagtataaaatttatatacgacacagtagcttgagaagcaaggacgtattatctcaaatggaaaatacaagacacccaaaataaatggaaacttcaaactttctttgaacaaattactcaaacaaaaaacacatttaaacaaatttcccattttttcaatgtttttcaatcaaatttaaatagagagatttccaagagtcgtttccttgtcttttaagtaaaatgtttgatttggtggatcaagtctcataatctccctcctcttcttcttcaacatcatactcaccttcctcatcagcagtagcatcttggtactgttggtattcagcgaccaaatcattcatattgctctcagcttccgtaaactccatttcgtccattccttctcctgtgtaccaatgcagaaacgctttacgcctaaacatagccgtgaactgctcactcactctcctgaacatttcttgaatcgacgtcgagttacccacaaacgtcgccgccattttgagcccctttggtgggatatcacaaacgctggatttcacgttgtttgggatccactcaacgaagtaagacgagttcttgttctgtatgtttaggatttgctcgtcgacttcttttgtgctcatctgtcctctgaaaatagcagaggctgtgaggtaacgtccgtgacgtggatcagctgcacacatcatgtttttggagtcccacatttgttgagtcagctcaggaacggtgagtgagatgtattgttgcgagccacgggaagtgaggggcgcaaaacccaccatgaagaaatggagacgagggaatgggattaggttcaccgcgagtttcctgaggtcagagtttagttgtccggggaaccttaaggagcaagtcacaccgctcattgttgcggagatcaaatggttcaagtctccaactacatcatcatgcaatgtatcagaattagttttaaatacattttgggtaaatgaaggataagaattgggtgtacttacagctaggagtgctgagtttgagggtacggaagcag

SEQ ID NO: 22195 - DNA, 598 bp, Arabidopsis thaliana landsberg
acacaatgtcttctacttcatgagtagatacattagccattgattcagattctatttggtatgcggttgtgtctgcactttcatcgtcagtgctactaagagagtaattttgatccacatcagtatcactttcatatactgcaccatcaaacatcatattggccatgttttcatcatcactgctagtatctgaattgattgtagcttctgctcctatgatcacatcgaaaatttataaattaacacaacttatataaaatgatactttaagagaaatgtttgtaaacctatatattcttactcggattggtagcagatgttgatgctttctcaaattctgcttgtaaatttcgtatatgagaatactctgttgacattactgatgtctgtgtttggttgcttatacatgaatatggattactcagttcttgtccttataatacataaaataagatttagattaatgattcggatatttaaaagataaaaattacataatagacagagtagtttggagaactaaaagatatatatagaataactaacctgtgttcactgtatatgcagtagctggtgtcatcgatgcatctaaatttga

SEQ ID NO: 22196 - DNA, 562 bp, Arabidopsis thaliana landsberg
atgtatggttttatgctttattgtatttgctctgtgcctcaccttcgagtgagtatgtggtacttgatcttgttagtggcctcgtcggactagatctgagggactgacgttttattcctatttaagtgtggtctaacctttaaggtgggatttaggcacttaaagttggaataattcgggcggtaccgccacagtacaactagcgaaacctaacgggcaactacacactaggggaatctttgtaaaggctactttgtgataccctgctcgatcacctaggtagtggtcaatggggagtagcactcctcggacagaaagggaatcacggctcatgggtgaagtgtgcaacctctgcagagtgttagaaattggtatatcagtcgtgctcgcggttatgagcagcattgggagctcctttgattagagttactctagatatctttatgatgatgcttaatgttgatggttataattatggtttctggtttttcctcttggagggagtccacttgggtaataacttggggtcatacaaaacttggctttgtactagtaataaata

SEQ ID NO: 22197 - DNA, 926 bp, Arabidopsis thaliana landsberg
  unsure (1)..(926): unsure at all n locations
cggacagatgttctcatcatgtctactcctcatgtctgaaccaccagcttttctgtctgcaccttctctcatgcttggcgggacataagccgccctgccagttccagttatggtcgatgtacaagtttctgctgttaaaggctnnnnnnnnnnnnnnnnnnnntccttctgtgggcatcttgatgtccagtggtcacctttcttttggcataacctgcagaccatgaggaccgcacccggtttgcccaactgagacatgctatctcctgatacggtcgactgttccgcgttgctacctgagatattcaaaagaataaacatcttaaaacctcaaaataatactaccctttaagatggtaatgcaaaaactaaaaatgtagttggcagctataaagtgaaagcagaaatctactttcgtgcaagaagccaccaacaaaacatctaggtgggcattacggccacccacatatagaacaatatggctgactaacgtgtccacctataaagaaacttatgtaaaaatgaatacttgaatgtgtacagttaatagcctagaaaagagaacacagaatttgtccacattcagaaaaggctaccaacaagatacttatattggtgacatactgaccaatcacagaaagaagcagccatatatggctaatatgtgatcggctaattgggcacctttgttatgttacacagttacaaaaaaaaaacttgaaccaaagatatagttgatgatccataaccaaaaactgggttaaatcctgttctagtgttgaaacgaatcaccaacgacattgctataggtgtgcttactgaccattcacacaaacagtagccataaagctaacatgtaacaaactaattagccaccctaatcaaaacagagcataataacaacgaatcctaacaaactaaaatgc

SEQ ID NO: 22198 - DNA, 566 bp, Arabidopsis thaliana landsberg
tattgtagctaggggcttggcttcgatccatttcagagaaatactccactgctaccacaacatatttcaagttaccttgtgctggtggaagtgggcctagcaaatctaggccccacctttgcagtggccaggtgggttgtattagttgggttaaagatgaaggttgtttctggtctctggcacacatctgacagttttcacatttttgaaccaagtccgctgcatccaaagctgccttcggccaataaaagccttgtctaaaaaccttccccagcaaaggccttgacccaatgtgagctctacacagtcctgcatgtatctccttcatcagctcttgaccttcggttctagacaaacattttagtaatggagagcagactccttgtttgtacaattctctctctatgatttcatagggtcttgttcttatttccattcttttgttataaacttcatcatcggaaagacaatttcgttggaggaaagatacaatctcagtcctccaaccttcgctgtgcactggcgagattctaagcactgctctctccatgagctcgactgaatgt

SEQ ID NO: 22199 - DNA, 467 bp, Arabidopsis thaliana landsberg
ctatttcaacatttgatttgatatggaataaactttagtcagagaaactaaacacccttattgggtactcgatttgaatcccctgatgtaacaccctgaatttgggggtataaaatttctttctaaaataccaaccaaattcaggtgttagtcttctctctctagtttccctctctcctttttctttttgtagaatttgtttaattagggaaggattatttattttgttcaaaacatatgagtcatgaaatgttgcatcatgttgagctccaaatattctttgaattgttgcacatgtttgatttggtttgaatttgaaacttgatttgaatttgaattgaaaacactagagaaaataaatagaaaagcaattagaaattccctgaaaatggaaaaacccaattcagcccaagtcggcccattaagcccagcctagcacgcgcgtgctctttctctctacctcgcgg

SEQ ID NO: 22200 - DNA, 408 bp, Arabidopsis thaliana landsberg
gctaattaactaaaatacattgtttagataattaattcgtaaatcgtgaagtttgacttaacccttaagccactcttgaatctgagcatctatgaagttccctagatatttgtaagctgcttcggagggatgaatggagtcccaaaacaagcgatccgaatgattcggacaagtctttgacaaggaattgcacaagaagcttgtgtccaagtatcctgttccgcaacatcctttcttcgtctccttgaatcctgtttttatttgtaaatcgatgagtatatattgcataagttagtaaggctcagatttagatgacttgtggaacaaggaaaaaagtgtatataccgcatttgctaggatttccgatcatgtccatcacagagtccgaagactttaacgtagaggaac

SEQ ID NO: 22201 - DNA, 610 bp, Arabidopsis thaliana landsberg
ttagaacgacttgcactctcttgccgtttaacctatcttgtgcaactcctaaatgaggaagctccatatccttgtggttgattatttgggacaaaaattgtttctgtaactgaatcttcgcattatactcatcagaacacatgggtcttgtatacatcaactctttgatattctccatgaagatactcaattcaaaattttcagaaaattggctatataagactctggcaatggtggtcttcccaatcccagacggaccccaaatcccaatcatccttacttcatcagagtctaggcataacaacgattccatttctttcatatgagcatccatcccaatcaaaccatcaaaatctcttgacggtgagtaattattcagcatgtttgaaacatctgtagcgatcttttcggtcatagttgcttcattatccctaacaaatgaagtgatcaattaatacatcaattaatattcatcaaacaaattcacaaacacatccaaaaattatgtattggttgtcttaatatttttaaacttagatttgcccaaattcactcaaaatttagcataaataacttaaataacttccaatccaagtcaaaactattatac

SEQ ID NO: 22202 - DNA, 473 bp, Arabidopsis thaliana landsberg
  unsure (1)..(473): unsure at all n locations
agatatttttaagtcgaccgtaaaagagaagatgttcccttcctgttagcgtctcccaaatcaagcttttaccaacagaataacattttttcaaaaagatggtcattatttgcttggtagtaaaaaaattcaaaaatcatttagaggatttactcgtgctgcgggcatacgcccatgctcgagtatactttgttcatatccttgcatatgtccaaaccctgaaccaaagctgtttcagatgacggtttgaggagtcctgtcatctagtgcatcaaagaaaacacagcagtatattactaaatttgacactctgaaaacatttgattgcaaaactgaccatactgatgaaggaagttttgccggcaccattannnnnnnnnnnnnnnnnnnnnnnnnnnnnngacacacttgaatacaaccctcttactggcattttttggcggggtaccatctctacctggataaaccctttt

SEQ ID NO: 22203 - DNA, 698 bp, Arabidopsis thaliana landsberg
  unsure (1)..(698): unsure at all n locations
gtgggagcaacacgcgggctgaacagggggacaccggctctagtactactaaatgttcaagcgcgctaaactgctaaggaaggatgggagccgagcatttagtgaatcaatagctctattcaatatacttttggacggcacactgccaccacatttgtatacactaggcaatctcaatctaagatacatgaaatttatagaatacatgaacctctgagagaaagagaggaagcttcacctgtgtccaatcatgaacttgatcacaatccccttctcctgttccagtctttcaagcttctcacctgtgaaaaatccacagctcttaactagatgcaagaagctgtagctatataagatcattaagtttaaaacaaaaccttgaggcatccatgtttctctaactgaatcacgccgttttctactgctaaatgcggtattgattcccattaccataaacactttcttcctcgggtttgtttccgagccatcaaccatctcttgagagctccttgtagaagaaagtgtagaaactgacttatccaacgacctgtcatccctncaaagacatagaaaaaaagctacaacataaatagagaaagcaagttgatttacaagaaacaaaaaacaaactcaagattgtctcactcactgtatagcttcatgagttctcaaaatttcgccggtacatctttttcttg

SEQ ID NO: 22204 - DNA, 573 bp, Arabidopsis thaliana landsberg
tggagagataatgcaaatcagttcaaggagttgtctattatggcttgtcatgtcttaagcatttccattacaactgtggcttcagagtcttcattgagcatatgaagtcgggtcttaaacaagtatcagagttgtctccttccttctaatgttcaagcttttatatgcgcgagaaataggctacgtgaatttgaagagattggtaagtttctgtcttattttcttttgtcatatttcaatcaatttgaatcttaatgcaaatgagttttctgttgtacataggtgattaagttgagttccttaatgaagacaaagatgacaagagagaagaagaagaagtttgaatttgctttggatttgatactttgttgaattataatcaaatttgctttggatttaatattatgttgtttaaatttgcttttggattttatatattcaaagtattagactcttgattcttgtattgattgaaatatgatattacgttcaaactacagttctgtatgcccattaaagagtttcattggacatgtgttataatgggcatgagccgtaatgaacatgagccgt

SEQ ID NO: 22205 - DNA, 579 bp, Arabidopsis thaliana landsberg
gattccagttttctaatattaaaatttaattacatgataaaattttattgaaataaatatttcttttatatttaagagactctttaaaagcacttaccattaaagttgctcttatgggcttcacatcaattaaaaaccttatgtctatactctttgaaactacataaaccctataatctcttatcattgacaaataaaaggataaaccctacaatctcagatacattgtcaaattcgtacaatatggaaggtatgtttattataaaactctttaaagtttctgaatttttaaaggtgtacgtaaagtattttggtgtacatactgtataccagtcagattttacatttttgatatctataaagtgtacatacacgtttgtagtctagtctacgtatatggtgtactaatgttggtatatgtatgtggtgtactaatattggtgtacgtatgtggtgtactaatgttggtgtacgtatgtggtgtacttatgctagtctagacatttgaggtgtactaactctggtgtacgtatgttgtttccttattctagtgtacgtgtgaggtgtactaacgcatgt

SEQ ID NO: 22206 - DNA, 1439 bp, Arabidopsis thaliana landsberg
  unsure (1)..(1439): unsure at all n locations
gatcatggacattgaacgctcacgactaaatgcagtaagcatgaactatatgggccatcatcttatagaaatttattgaggtaaaccacctttataatttctttgaaaatgttagcctttaatatatacaccagattttgaccagtatatacgagcggaaagatgatctgtaaaccatacatatcttgaccactatatacgtacctataatcgaagtgtaggaaattaatgaacgagaaatatgttcaaagataaatttattttatatgaaatttatggtcgttaccttggcatgactttaggagtgtcttccttacatgttggacaccaaaaaaattgtttcttacttttcttgacaatctcatattccacttttggtatcttatatgttgtcttgtaacatttgaggcagctaaagaaacatcaagagtagtcggtgtcgacattcattatggtacaaattatgttgcactgaccaatctatacattataccaaagaaataaacataataatattatttagtaggatgtgagaaatttagcattattatttagaatatttcctcaaaacacccaaagaattcagaaatggtcgtctttggaaaacggtcatagtattcctttcttttcaccatttgattcccttcttttggtttagtgtaacaccccaaacctaataacttgaacccaccctatttgttttggttaaaagaaaatctcataaagcccattgaagcccaaaagaagcaaattacgaaatactaaggattttgttacatgtgtatgtatatatgcttatatcgtcatcttcgcgcagccttctcacgtcatcatctccagcaactcgttattaacctaagaacatcaaatcaacttgatcccaagccatcatcaccattgacgttgagatctgagttgttggagcgtgtggttttgttttagatcacgtacaagtgtgaagtgaaagcgaacgtcacggatcatcatcgttaaacaacggcttgattgggtaaggaaaacctaatctatttatgccttctttatactggaattgtctctcttagccattgaatttggggcagatatatcaagttaacttttggggttttgtgtgaatatgtgaaagaaggaaacagttcaagtggtggtattggtgatccgtttcccgtcacgtccgaagaagtttgggcaagttcttaacggttctgaatagatctcgttcccaagttttcagnnnnnnnnnnnnnnnnnnnnnnnnnnnnnnnnnnaatcggtaaatcgcgtttaaagttggtgaatagtcacagttttcagagcatagcttttctaaagtatctcagaaacatctgcctttcatgtataggttttcaggatcaattatccgctgaatcacagagaatcacgtgtggtgcgaggtgtcattgcactaatcatgcatg

SEQ ID NO: 22207 - DNA, 597 bp, Arabidopsis thaliana landsberg
  unsure (1)..(597): unsure at all n locations
cattgaagtacatggtccaaagttcggcctggattggagctgtcggcaattgggtgtcgacccattcagccaggaagtctgccaagacttgagattttatggccttccgaggggcgaatgaaagtgtttcgcccatgagctccactgcccattttgctatcctacccgaggcctctcggcactggatgatctctcccagggggaaggatgacaccacagtcaccggatgagactcgaagtagtgtcgcaacttccgtcgtgtcagaatcactgcgtacagtagcttctggatttgtgggtagcggatcnnnnnnnnnnnnnnnnnnnnnnnnnnnnnnnnnnnnnnnnnnnnnnnnnnnnnnnnnngcccctcttcttaggactgggcaaaaaaacccgttacccgttacccgaacccgaacccgaaaaacatgaacccgaacccgtaataccggtacccgaaatttgttcgggaatttcgggtactaatttgtgaacccgaaattattctgggtaattcgggtagcgcaaaccagtatccgaatacccatacccgaaattctacaggctacagccaagtcacaccacgagtccgtg

SEQ ID NO: 22208 - DNA, 514 bp, Arabidopsis thaliana landsberg
  unsure (1)..(514): unsure at all n locations
ttgctctgctctctcaatttctaggttgcaagtaaaggaacctagctactgtagtatcatgtttttatttaatctcagaacatcctacaggaccaaactgacttgtaaccaactagaaaggaaataacaaggaccccaataccatacctcttgtttgatgctaccagctctgttgacaagtgtagtttctgttctttcaacatctgggagatgcgagaagatacacctcactaattcatgcatcgtgtggcgagctactcgttgcaataactcacctttcattcctgcttggtggacaacacgaaaacaagtgttgacgacagtgcatacatgctgattgcttagcataactgatgctntatttntcatacatgctagaagaacctgaagtatcttcattagcacaacctcttctgatgcaggatctgtcacctcanatcgacagcttgtcacagaatcaactaccaagtgcatagcgtcttcaatattcgcagtattttgatcaattacattc

SEQ ID NO: 22209 - DNA, 2289 bp, Arabidopsis thaliana landsberg
  unsure (1)..(2289): unsure at all n locations
tgttgacttgtcgcagcttcactggagaattgaatgaattttcttatggtttcaggaatgtgatgaatgttgagatcgatttttgatttcaatcaacgttcaacgaagatggtgatgatttctcataagttggatttgattttggttttcataatcgtaatcggaggatctattttccgacgagtnnnnnnnnnnnnnnnnnnnnnnnnnnnnngaagatgcggtggattgactctgccttatcctttcgccttttcaaacggttgttcgatccgattcgattgctctgcggcggagaaaccgatgatcggagacttttccgttcaaaacgtgacggaaaacagtatatttgtcggtctctctcacaattgtactcggaagattgaagatatgaatccgcttttcggcgtgaatttcgcaccaacgtcggagaacagtttcttgatggagaattgtaaccgtaccaccgatggttgttctatcaagcatatgtttctggagaatgtgctgaaactcaaaagttgtgatgctactggaaacataagttgtttttctttagatagtaattcgagttcgaagaactcagctaagtttttcagtatgaagacattaaggaacagctcgtgtagtttgttgttctcgtcgatagctttcgagtctgtaggtgtgaatgcgggtatagcgttagagtttgagcgagttcggttaggttggtggcttaagggaggttgcgagagcggaacttgcgcggctaacacctattgtacagacgttgaaactcctcatggatatgcaggacaccggtgctcatgtcttgacggtttccacggtgacggatacaccaacccttgccagagaggttagtcaaatctagtctttgtttcaacataagtacataacgtctcttgttttcgaaattcgcgaagctgtttttgctaacttgtttactctatactctttgcagcactaccggagtgccgtggttccaagctcgtctggagacattgtagatctaatcttattactattgtaggaggtaatggtcgctttagtgtttgtttggtggttcaatgttttgttcattttggatctttgactaagtttattcatttgctatatataggaactgttggtggagcgtttttactagctgccttggctcttttcttcttttgtaagcggagacggtctactcctttgagaagtcatttaagcgcaaagcgtcttttgtctgaagctgcagggaactcgagtgtcgcctttttcccttacaaggaaatcgagaaagcgacagatggtttctctgaaaagcagaagttaggaataggtgcatatggtacggtctatagaggaaagctccaaaatgatgaatgggttgctatcaaaagacttagacatagagattcagaaagtcttgaccaagtcatgaatgagatcaagcttctttcctctgtgagtcacccgaatcttgtccgtctcttaggatgttgtatagaacaaggcgatccagttctcgtttatgagtacatgccgaatggaactctatctgaacatctacaaagagatagagggagtggtcttccatggaccttgcgtctcactgttgctactcaaacagctaaagcaatcgcgtatctccactcttcaatgaacccaccgatctatcaccgtgacatcaaatctaccaatatccttcttgattatgatttcaactccaaagttgcggatttcggactctctagactgggaatgacggaatcttctcacatatcaacggctcctcaagggactcctggttatcttgacccgcagtaccatcaatgctttcatctctctgataagagcgacgtctacagctttggagtcgtccttgccgagattataacgggattgaaagtcgttgatttcacacgtccacataccgaaatcaacctagcggctcttgctgttgacaaaatcgggtcaggttgtatcgatgagataatagacccgattcttgacttggatctcgacgcatggactctctcatccatacacaccgtggctgagcttgcatttcgatgcttagccttccacagtgacatgagaccgacaatgaccgaagtagcggacgagcttgaacagataagactcagtggttggattccaagcatgagcttggattcaccagccggttctctccgttcatctgatcgaggaagcgaaagatcagttaaacaatcatcaacaggaagcagaagagtcgttatccctcagaaacaacctgattgcctcgcatccgtcgaagag

SEQ ID NO: 22210 - DNA, 1014 bp, Arabidopsis thaliana landsberg
aagtaggaagaaagaggacgacacgtgcgttacatgcttaagatcggagccttcgtgtctatacacgcggtttcttttattagagtttgatacattaacgttttctttctaccacctctcctttcattatctcttttggctttagaaatatataattaattgagattggagatcaaatcattaattattcgatgaaatgttttaacaataaagtgattaagaactgagaactatgtgattaagtactgagaactatgttacattttttctccttagattccaagtatgaagtagcgtcgtaactaaacaatggtcatataacgaccttgactcgatccatttattgcaaaccaaagataataacataatatattaacttcaaaacaatttatttagtttttctttttaatttaatgttaaattatattcaaagaaaaaatatcgttgttacgacaagtgcgacggaatttaaatttgttacaacactgaaaaaataaaaaataaaatcccggaagctcttaacttctagaagcaaaccacatttgcagtcctttgtcatatctcctatcccccaatagtctgatagaggaaagagtgtttcgagtttgcttatcaatccaccggattagtctagctgccgtattaggtgtctccccatgccttcgaccattcctttcaacttatttagttttttccttttgggatagaagtttgaagtctgttgaagtgatgaaggaaggtctagtgtggatttttttggaagacctcaagctgactacgttttgatgggtaactgataacatgttgtgttaaagaaatatcaaacagatatacataatgtcacctaggagatcagcacaacacgatggctgattaggagcatattgtgtatgttatgagaatttcctcttttgacgtacctgttttctcggggttcttatacatgtctttctataacggaagaaccagttatggaagctgatgtattatgaaacaccgaaaaaaagaaaaaag

SEQ ID NO: 22211 - DNA, 338 bp, Arabidopsis thaliana landsberg
ttcttcgagccctctcgactgcatcggtgatagagccccatggacgggtaagagtgcgcgtaacacaaggccgaccgagccgagggactcctacgcctccgggatacggatacctcactcatcaccttctgcgagaagcaactctcgctcgcacaaacatttctgttaccgacaaaaaagtccagatacttgaaacaagaggaaaagagacgcagctttacaacacggcgagggtgtgttttggcctcggcggccgcaggaaacacacgctacaagacaatccgatcctgcaggctcggatcctgacgcttgaagggagcagcagcaccctcggtgtc

SEQ ID NO: 22212 - DNA, 230 bp, Arabidopsis thaliana landsberg
agttgtttcagtccatttgacccataaggagttgctatgtgacacgattcgccaaatcagtttaagacaacatacctcatttgcttcttttagagagcgtagccccagcccaccctccttgtttggcttacaaatagctatccatgagactttagctttgttggagctgagctctgtaccggaccagatgaaagccgaacacaacttgtcaatttctcttatgcaagctt

SEQ ID NO: 22213 - DNA, 662 bp, Arabidopsis thaliana landsberg
aaaccatatttaatatatatgatataagataatcaacaataaaatctgttacttttttaaatatcactatcccatagtttgggtgagggaacgcaaagaaatagcaagaatttatattcaaaatcatattgacacatttatattattaattgggaatcattgggaaacttcaaaaatcgagcaaaattactcttccccttccacatcataaaatcgccgcacagttatccatctctaggctttccgaaatcaagtctttcaaaacagaatggaaaatccaagttaagagtgtgcactcatgggttcaatagacaaagtaaatagggaaactatggaaatgatacttgctaataacgatatgtcttgattaactcaaataatgagattaattactaaaatgtcttataaaagttgggtttaaattggttattttcttttctaaaataccttttctcatttctgtaaaatataataattacaaatttacccttttaaaaaattaccatcttacaaaagtctatcgtttaattatggcatatttattcttgatccgcagacttacagattttttatggcagacttacatatttattcttcaaccacacactaaaatgctattgaactaacactatatatggtgtaattttcacactaaatttttt

SEQ ID NO: 22214 - DNA, 1000 bp, Arabidopsis thaliana landsberg
ctaatcgattgtcttaacccgagaattcgtctttagttatcacttagtaatttgttaatttcccgctttttttactttcgaaacttgttagtcttttgtttcttggtttcttttactttgttcagcattgcttgcttgataatgcatggttattaagatttagaatactcaaatcatctgttagcttagattaagcaattgtgtgtatcttggtgagttgattgattgcaaattgtggttcgataaacaattaaataaaatgctacatcaatttggcgccgttgccggtttgcaatatttattagccattagaatttcatatttgcttgagactaaaccttttactttcattactaatcctttatacttgatatttgctcttgtcttataggtgtatatgaacctacgaagtcacgaccgagcaaatttaatagaagagattagcgtaatccgccagttcgaaagagaaaatgttagagcaagaagagaacgagaacgacttgaacaccttgctcggttaggcgtcatgaatgaacccagaggtgggggccataatggaaatggccaagctaatggggatggtcatatgccacaacatcaacatagagctcatcaaccaattggagcctttgatgaaccaaacatccggggaaatagaaactgtattcaagctcatgcggttgagaacaacaactttgagaggaaatcaagcctcatcaacatggttcaaagctctaagttccatggttgaaagagaaaacgctcgagcaagaagagaacgagaacgacttgaacaccttgctcagttaggtgtcatgaatgaacccagagttgggggccataatggaaatggccaagctaatgggcatggccatatgccacaacaccaacgaggagctcatcaatccattgaagcctttgttgaaccaaacattcacggaaatagaaacggtattcaagctcctctagttgagaacaacaactttgagattaaatcaag

SEQ ID NO: 22215 - DNA, 461 bp, Arabidopsis thaliana landsberg
tgatttcaggagcttttccaaacatagactgagtatcatttactcaatctatgtgacaccatttttgggtaagtttactttctattacacgctttaaacataatattttaaattacggtttgaatcacccccacatagaaactaatatctctattacttttctaatttaaaatgcacgtacttcacatgaactcaatttcaatcgaaccacatcaaagaagcaccatttcattctatattcaaaaacgactctttgtatttcaatgcaagtttaatcacttcacttaagcaaacatgttatcgtctcagtttgagcttcagcattttgtttaaacacaaatttaattagttcagaaactgagcaatacaattactttttcaaacattcaattattaatctaaatgtagctacagagattgtgtaggaatactaaccagagacaacaacggcttgattgcga

SEQ ID NO: 22216 - DNA, 625 bp, Arabidopsis thaliana landsberg
  unsure (1)..(625): unsure at all n locations
acagcaagaattttcaggcaggaaagaccgagaagcccaatgatcatctggtaatgtcttcaaagattcatcatcttgtttttatttcctcttttttttcatctgatttgtctcaattgatggatactgcaagactcgaactccaagcaagttatcatcattcttcagtggaacacaagacaaatgtgcgacttgtaagaagacggtttacccacttgagaaagtaacaatggaaggagaaagttaccacaagacttgcttcaggtgcacacacagtggttgtcctttgactcactcttcttacgcttctcttaatggcgtcctctactgtaaagtccacttcaatcagctctttctcgagaaaggcagttacaatcacgtccatcaagccgctgctaaccaccgtcgatccgcctcttctggtggcgcttctcctccttctgatgatcacaaacctgacgacaccgcctcaattcccgaagcaaaagaagatgacgctgcccctgaagctgcaggagaagaggagcctgagccggtcgttgagtcttgaaaatgtcgtggaggaatgatcttatcagtcctcaagtttgaagtnttcatatgcgtgtctgtataatgaatatat

SEQ ID NO: 22217 - DNA, 762 bp, Arabidopsis thaliana landsberg
  unsure (1)..(762): unsure at all n locations
caaagcaaaaacaaaattatttttaatcttgttaactttctctttctaaatcacattcaaataagggctgggataggttttttgttaggagatgagtaagatacaattttgtaccttaggactcccgataagtgaaatggctacgctaagccgccttttcattcctccgctatatttcccggcaggtatatcagcaactcctccatgaaataggttcacactctttagtgattcttctacggcctaatatttaaccatgaattgacgtttaagactcttgcactaatataagatagaagtaagattgataatgataacatacttggttgagatcatggcctttgagattcttaagtcttccataaaagagaagatgttctttccctgtcagtgtttcccagagcaagctggtcaatgacgaacaataagactataagagaacaataaaataactatatgattgttaggaaacacgtaaacttaataatgatcttcattcaacaacaacaaatatgttacaagaatttaatttgttactcgtgctgtgggcaaacacccatgctagtgtagactttgtccatatccttgcatatgtccaaaccttgaacaaaagctgaccctgatgatggtttcacgagttcagtcatctagccaaaaaaaaaatggatgcttaatttgttacttatgagtatgctagacaaaattntaataaaaaaactaagcacaaaagatttgatatatgtnccttgtgtactaaccatg

SEQ ID NO: 22218 - DNA, 511 bp, Arabidopsis thaliana landsberg
aagacacctaactacgagaaggaagtagaggagatgaaaaacatttttagacaagagtttggggcttctataagaaggtgattttccttttaatcggaccttgaatgtaaaaacttcaaatagaagctaagtaggaactttctaatcagataattctatgaaaaaattttctaattaaggaacctcgcgtaaacaatggcaggaaaagaaccgaatcttcgcgtggggcatccaggaatggggaggaaccagggattaataacatggaagaagggaagcaagggtccggccaagtggtggaaaccaagaactttacttgggaacaatcaggtagaataaattttaaccacgcgcttatatataactctcaaaaaaaagtgtttctcaaagagatacacaaccgcgttaaactctatagagagcactttttttttggtgagtgctatttagaggtcctttgatattaatattaaggttaatcttatatcaaaaatattattcaggtttattt

SEQ ID NO: 22219 - DNA, 543 bp, Arabidopsis thaliana landsberg
  unsure (1)..(543): unsure at all n locations
gaacaatcatccaagatttccaatccaccagagatgcaaacggtcacggtacacatacagccacaatagctggtggctcatttgtccccaacgtgagctactttggtttagcccaaggtactgnnnnnnnnnnnnnnnnnnnnnnnnnnnnnnnnnnnaagttagcttaagagtcaaggtactagttttataagacaatagtttgtttcctttttaaccgatgtgtgattcttatcaggtcttgtccgaggtggtgctcctcgagcccgaatagactcgcacaaggcgtgttggaacgtaatgagagatgaaggaggaggaactgatggaagatgcacatctgctgatatgtggaaggcttttgatgatgctatacatgatggggttgatgttttgtcggtttctatcgggggaggtattccgaggattcggaagtcgataagctcgattatatcgcggcttttcacgcggtggctaaagggattacggttgtggctgctgcgggtaacgaagggcctgtgtctcacactgttgacaatgttg

SEQ ID NO: 22220 - DNA, 592 bp, Arabidopsis thaliana landsberg
cagatgacgacatattctgcgatctctcttttcatgccataccaccaaaacctcctttttaaatcctggtacatcttctcgctccctgggtgtatggagtaagctgtctcatgagcttccttgaggatcagttcccgaataggtttgaggtcgggaacacacaattggtccttgaaccatattactccctcttcatcctctcgaaagtctttgcctcttccttctaagatcagctgacggatcttgctgatgttttcatcatccttctgcccttctttgatctcccgctctagggtgggttctaattccactgttactccttgcgtgctgttcaggaaaccgaggctcagtctgtcgaactctttggctaactcatacggcatcgggtacgaggccaacatattgacttgactcttcctgctcagagcatctgcaacaacattggctttgcctggatggtaatgtatttccagctcgtagtctttgatcaattccaaccatcttcgctgcctcatgtttaactctgactgggtgaatatgtactcagacttttatgatctgtgtagatgcgcacttctgccatacaggtaat

SEQ ID NO: 22221 - DNA, 596 bp, Arabidopsis thaliana landsberg
cgagagatttgcggggaaatgctatttggtttttattcaaagagtatagagttgcctgagtggcggattgatggacagcgacggaggagtcgcgggattcggagcagtcgccggattcgctggagtcgcgatgtggagaaacagtaaattaggttttttactgggtaagcgtttttttacgatcgtggttggaatatggagttaacccagacggttgataagacgtggttcaaccggaaccagtttaaagaaaaccggctatatttgttaggttttgtttaaccaacgatttcagggtaaaggggtaattccgtttgattaaagtgactaatgcttttaaagtgcccatttgtggccaaagtttcaaaatagtgcctctacgtgtaatattctctaatattatttacacgcatcacatcatttaagaacatgttaatttattagataatatgtatacataaatcatttggtgctatactgaaatctctaaaagatttttccctgggtcaacagcaaatcagttatagcatgtcacaaaagtgttacgtaatacatggaatcattcgaacacaaccatctaacgattttccgatttt

SEQ ID NO: 22222 - DNA, 195 bp, Arabidopsis thaliana landsberg
atgtcgcatttatcttcggtctccattgcaatctctctatatatggaggtacttaaagttggattatcccacattcttttataaccatttcgttactgtcgacttggaagtcacagaaaagctcgttggatgtcacatctgcttcaaagtcaaagatgtacaaatgctcagttaaagagggaggtagaaagtggt

SEQ ID NO: 22223 - DNA, 1074 bp, Arabidopsis thaliana landsberg
ctttctcaaagagataatatgttcctctacagcaggtaagctggtatttcgtccagtcttttgttgttcagctctccgtgtaaatctaatttataaccacaagtttagtggtgtttacttcatcattaagagttgcgtaaattgattgtatatgatgaaaaatataacaagactaatgttgttgagcttgtgagtttcttatgtttctctgttgtcatgcagatttcaagctcggtcgtcatcttcatgtcttagatcagaagttaaagacgagaagaaaacagacacattggacacagtatcgtgtgtaaaagagttagttgagagttcaatggtaggagctattgaaagcagaagcagcacccatgcgaccattgaagaccctgtatgcgagcaatcaccatcaccatcgccatcaccatcaccatcaccatcgccatcaccatcaccatcagtatcaccatcaccatcaccatcaccatcaccatcaccatcaccatcaccatcaccatcaccatcacgatcatcatcatcactatcatcatcatctgttgatccttctgaaccggaggagccatcccaccaaccgttgcgtgtgtttgaagagatgagggtgagaggatgagaggaatgaaaagggtgtcttagattcggcggaaagaggtgacaacctctgtggaattctaaattgcaagtagcacagtagtaatagtactttctgcacgttaaatacttacctttgcatgaaaagcagatcgaaagtggagaaggccgtcgtcgtctgcaaagattgtggggctgagccggatcagacacacgacatgggggtttagctcgagaatacaccatatgtgtttctttggaatgaatgaagaagcaaatgagagagaatgtatgtaaaatgttttcaactcataaatcgttctgctctcgagttaaaagaccagttccaatataaagtcaactactccaaggtcttgttctttctcttaatccagctggagtgaagacaaaacttatacagggcttccacctaagcgaaaacaccgattatattgaaaatccctaaaaata

SEQ ID NO: 22224 - DNA, 482 bp, Arabidopsis thaliana landsberg
ccgaaccggatacacatttgatccgtgaaatcccttaaaaaccggatcgtatttttaaatatgatcacattattgatcatttaaaaataatacgaggctatgttttttggtgttcaaaaagataaaaataataatatgaagctcgcatctctgtaagtatatatatatataaaactaaaaggaaaatcacgaattatagtatcaaaaatagatttaataataaaaataaggattggtgactggtgcacaaaaggtggtaacaaacaaacacaatcttgactaaattctatagaaatatcccaaagaaaaaaaaaacaaatccagaaaaatattgtatattgattttgatgatgtcgatgttgatgtgcagatattactcttttatctattgcttccgttggagattagttttgtggcaacagtctattgtatgactatctggggatttgggagtttatccggccggcatgcatacattcatt

SEQ ID NO: 22225 - DNA, 520 bp, Arabidopsis thaliana landsberg
aattaaataaaagagaattccagggaaaaagaatctccaaggaggggattggggacaaggaccaaatctgtcttgacagtggatggaggaaaagaaggtgatttatagactcttcatccgctccacatcaagaatacccttttttggtgccaatgtgacagtaataaagacattggtttgtcgcgagacatcccgagagacattgcaacgcaaaatgtttcaatttccgcgtagttttaagttttcatacttgtgcctgaagcgccgaaacactaggtccctgaaaaagggggtcacaaataggacgagagaggtctcttgtggtccaataatcggatttcacagtataattaccagattttatataagaccaactaaagccatcactcttgtaagtacagctcggcctaatccctaaaatcaaagggatacagaatgatcaaccaaattaaagcttgaaggctatttaaattccaaacttattaacatgatcaattaggtcattaacataaaggtgtgg

SEQ ID NO: 22226 - DNA, 588 bp, Arabidopsis thaliana landsberg
  unsure (1)..(588): unsure at all n locations
tcaagggaatgaacatggtttttatggaacacagaaataaaggatgatcccttaaattgtaccatttgtgaggggtactctttatgcatgaggtgcgctactttaccaaggaaagtaaaacacagctgtgatgatcattttttgtcactatgtcaaggtattggaaactcaagcggtgacttatggtgtgatatttgtgagacgaagacagatccgagtgtatgttactatacttgtgaggagtgtgggctaagtctccatattgattgtgtacttggagatttatattatatgaagcttggaatcacagaacctgatgttgaaatacatcccaacaatggtgctactcgacctctctgcatcaattgtggatttcgttgcaagttccccttcttctttaggtttattgatgaagaacctgctgtctacagttgttcaatatactcatgcgcaagtgaggactagttataattactcaaattcatgttttacattctgtataaattgtaaaacattgtgctttataagtcttttaacattttctgttaagacaatatttctattttttttattnttttttttgaatat

SEQ ID NO: 22227 - DNA, 527 bp, Arabidopsis thaliana landsberg
tcgaagatcatgctcgaattgtaaatctcatctgaagctctttaaatcaaactctcgacgactattatctgatctgagcccgaatctaattcctcgaacctcgatcgatgttcgactattttaatctgaatccgtactctcaaaagaaatactcaatatgtcgtcctctaatcaattttatccgactcggctaaatatctctatgtccaaactgaattcaaaaccccgtatcgacagcaatttttttaaatatcgcaattcgccttctccgactaaaaatccaaagccgatcgaacctcaggacgatttattttcaaatcgcgcgtagggaattattttcgagcaaagtcaaaccaaactctcgaccgagttaatcgcgtagtcgtccgttcgtccgaactctgtttcactctgttctgtgtacagacaaatttccgcgggaatatttattccggaaaatgtttagcgcagcccgatttcgtgtttgggccagcccaacccagcccaattaggcccatttaaaaccc

SEQ ID NO: 22228 - DNA, 435 bp, Arabidopsis thaliana landsberg
agatgggccatgcccaaactaaagtatttttccaattttggatagtacggatctgacctagggcaaacggaggtcaagaacatgcaacggcggcgggtgacataggcgaacaaatgattaaccattgacatcaatagatggcagagatcaccgatgggaatgtcggggaaacaacaaccaccgcctttaaccagaaaagatgaaactcgtgtgtaggggagaaacttgaaaaaaatgagccgagaacgaagtatttgttgtttctcccagaaatgaagcacaggacgctggcccggtgcgctaagccaatgatctttaaagaaaagattctaacagatctacaattggcaagacgcgacagcgagattaaagatggacggacacggagatgacagactagaggcttgaaaagattgggactagactcgttgtgat

SEQ ID NO: 22229 - DNA, 729 bp, Arabidopsis thaliana landsberg
aaccaccctgtttcagccaacatttgtgtcaagtaaaattcattttaaggaaagacatatgattgtatcctacaagaatcttgataaatgactctgaagatgtggatcaaatgaaaactgaatgtcaaaacagtgcaaatgcaaccagtatctgcaataagacagaaacacaaaagaccaagtcaaacgagaacaaacctccttgtgtttctttgatccaaacagttcagaatcttcaacagattggtcacgatctctgaacaacttgcggaaaaagttttctgtcccaggactgctttcaactaagccattgctgctattttcattttctgaagtaggttttgcatcttcgggatgtatacggaataatcttttgaaaagagaaaattctggagattcatcaccctcactttcattcccgtcatcaaccttgacaatgtctttcttgtcatcagatttttccttaaagaattttttgaaaaacccctccctctcatcctcttcaccagatttcttatcggcatacactgttccattggcttcattcttttcactaccatgtcttttgtcatcatttttttccctgaaaagtttcttaaggaacccatctttgtcctcatcatccacttctttaggaactttatcatcttcaggtttgctgtcacggaataattttttaaaaaaaccttctgagtttgggtttgactcctcgacctcggttttactctc

SEQ ID NO: 22230 - DNA, 472 bp, Arabidopsis thaliana landsberg
ctctccgtctcttcctttctatcctgcacaccatccctctagtggtagtcgagacaagaagagaagtggatgaggtcaaggaattaatcgttatcgttaaagaatatgtccttggtcttcaaatggagctcaagaggagagagatgaaagatgatccggtgaggcagcaagagctcgctgcttacttcactcactgcaacctccaaacacctcacttacggcttgcgctgcttagtgcaatgggtgtctgctacaaggcaaagaacctcgccactgcttctaatttcgccagaagactgttggaaacaagcccagttgatagccaagccaagatggctagacaagttgtgcaagccgctgaacgtaacatgaccgatgaaacaaagcttaactacgacttcaggaacccttttgtggtatgtggtccacatatgtcccgatctacagaggacagaaagacgtctcatggggt

SEQ ID NO: 22231 - DNA, 477 bp, Arabidopsis thaliana landsberg
  unsure (1)..(477): unsure at all n locations
tgaacaaactgagaatatatgtggagtgattttacctgacatgatnnnnnnnnnnnnnnnnnnnnnnnnattgagaaaacgatgcgaggatcacaagggaatgagagttaacgccttcttttttctgctgaacccaacagaacgtgataaagccgtcaatgaggacaaatccaaacctgagacaagtacaggcatgaaccaagagggttcgggtcttttatgtgaagctacaacaaagaatggattgccttgtacaagaagtgctcctgagggcagcaaaagatgttggcagcacaaagataaaacattgaaccacggatcatctgaaaatgttcagtcagcaactgcaagtcaagtaatttgtggctttaagctgtacaatggatcagcatgcgagaaatctccagtgaaaggaaagaagagatgtgaggagcacaaggngatgagaatcacatcttgaattcaagcagtggagta

SEQ ID NO: 22232 - DNA, 466 bp, Arabidopsis thaliana landsberg
tgtaatttgcttcgttttgatgaatggatattgagtttattagtgtatcttttgctccatatcattacatatgtctatcttttcgtatcaaattgcagtagaaaacataccaaagcgaaatataacaaatattttgtcgagccctagatcaatattcgacaacgtgttgacgttggaagtgaccgaaattagagcgtatgtaagacgggatacaaacaggacggtacctcttgtcaagccacacagccattccttttgcctccaaaataggctgctttgttaatgatacacaaaatggatcgaaataagaattccaaataaaaaccaacaaaaaggcttggtgagatcaacaaaatatataacctcttgatttggaagtttaaagatgaactgttcaaagtaaatgcgcgtcatagatgtccccgatatcctcgttttcaccacaaacttgcatccactctgctaa

SEQ ID NO: 22233 - DNA, 621 bp, Arabidopsis thaliana landsberg
aaaatgatgtttgattgttctgatgataaatgcttgatttgcttctttgattgattgaaatagtatagttgggcatcttagcatgttccaccataaggtaattagctttagtggataacacactaatctacttaactaataaatcccccgcagtaacatttctcgtaattactcgccttgtctacaattcttcctttcttaccttgtatttctaacgccgatgggctacccctatagtgttagaagagagcactatagacgtgatccttggtatgtcatggttaagaaaggcaaagacagtttatacactgtgctaaaggaaccatagaactcaccagttccaaaggagaaagatttgaagttggaattgcagtagctaccgccaccagactagcggcattcttagtagatgggaagtttgttggtgtcaacatccgtgtggttagagattttccggatgtcttccagaagagttccagggatgccccagatacggaagttgagtttgtcatagatctcttacctggaactgctcctatttctaaacggccatacaggatgtccgtagaggagttaaaggaacttaagaaatagttacaggagtacaagaggctgggtata

SEQ ID NO: 22234 - DNA, 1058 bp, Arabidopsis thaliana landsberg
aaaagtgcggggaagggtccaagcgagtaccaacactccctttgaggctcgggggctactgttgggtaccataattaggggtacccccaacactcctaaacacggctggtaaccaccatcagcacaagctgcagagactaatgggcacgattcaagtcaaggcttcgtctactcaagggacgtgatctcgcctcgctcgagcctagcctcgggcgggaatagtagtcccagacgaattcacgcctcgcccgagggcctactcaagcaacgggcgcaccctcaactcgcccgaagcccagctcgggcaggcttcgcagtgaagcaaccttggtcagatcgcctcgccaaccgaccgtgtcgcaggagcattcaatgcaaggatcgcctgacaccttatcctgacgcacgttcctcagtcggcagggccgaagtgaccgcagtcacttcgcccttccactgactgacctgacaggaaaacagcgtcgcctgccccgttccgactgctgtgccacccgccaggtgacggctgacaatagctaagtccagcctcaggcgcaacaagaagctccacctcgcccgaccttgggcctcggtctcagaaggaggtcttcgcctcgcccgacctcagggctcggccccgcctcggcctcggaagacggtctccgcctagcccgaccccagggctcggcctcggcccaacctcagaaggaatcgcgtcctcgcccgaccccggcctcggcctcaagagaagtattcgcctcgcccgaccttgggctcggaccgaccgcaccaccgaggatacatcattaccctacccctagctagctcaggctacgagggaacaagaccggcgtcccctctagcttgcctcggtaacaagtaatgatgactccccgcgtgcgtccatgacgacggtggttctcagccccctacggaagcaaggagatgtcagcaagatcccagcaacaccgacagctgtgcttctatagggctcaagcacttctctgacggccacgttatcgcctacgcagggctcaaccccttctctgacagccacg

SEQ ID NO: 22235 - DNA, 491 bp, Arabidopsis thaliana landsberg
ttctctggtcccaagacagaaaaagttcaaaaagtcttgtggctcaaactggctatcaagaccaacttccacaagtgcctgtagatggtttgatacatcatttgcattgttttgtgctgcagagattatgaaaagatttccggtatgaagacggcaagatcaggttgttttagcaaagaattgacaaattatttacctgccagtagagaattctttgaatagggttacttgttggagcaccttctggccacattggaatgacaatataagcagcaaacttctcccttgctctaattttgttagcaatcttaagcgcgatttccatcgggattagattattagcacctgcaatgccaaaactccttgttattactgcacgcattgattactgagcttgcctttaaaacctttcaattttcttacccaagtccttgtttgaatcccagttgaatgaagatccaagaaaatattggttctcaatgtaaatgaag

SEQ ID NO: 22236 - DNA, 534 bp, Arabidopsis thaliana landsberg
cttgtcaaaagaaatgacctgttgtctaaaacaccagtgattcatatttaagttggatgtagaatccttgctcaaaatttatgaaatgttttctcttctgtttgctctgattctttcttttaatcgttaaattgattggaaattttttacatttttatttgcaaccaaaacatttttccccaacgtatggacacagctgagtgattgtccttttaatataaccttgcacctcaaagcgcctaaggatgttatttgctgggaagatgaatcaatttagatagaatacaaagggaaggtagctttcattgtaagacacccttatgctggttttcaaagttttgatttgtggatgctagaggatgtgaagacacatgattggtccaagcaaacatttgagcttcccttctctttgcgtttgggtacaaatgtgacttccccgggcaccaacaaggctggtgaaatcatttttgccccaaaaactctgtcacgcgaagacatcagaagagttaggctcctaggaattggaaataatga

SEQ ID NO: 22237 - DNA, 490 bp, Arabidopsis thaliana landsberg
tgaggttcggtgcttggaggacatgttctacgggctcgagctcaaccacatcgctcggcgctacaacgagactgcagacgagctgactaaaatagcctcggggcgaacaacggttcccccggacgttttctcccgggatctgcatcaacccttcgtcaagatcgacgacacgcccgaacctgaggcgccctcggtccagtccgaggtaccctcggcctagcccgaggcaccctcagctcggcccgaggcaccctcggcccagcccgaggtaacctcggcacagcccgaggtaccctcagctcggcccgaggcgccctcggttcagcccgaggtaccctcggcccccgagggtgaggcactgcgcgtcgaggaggagcaaagcagggccacgcctgatcgaaactggcagaccccgttcctgcaatatctccaccaaggagagctacccgtcgaccgagccgaggctcgcggggtggcgtggcgcgcaaag

SEQ ID NO: 22238 - DNA, 3748 bp, Arabidopsis thaliana landsberg
  unsure (1)..(3748): unsure at all n locations
tgatactatcgcgttaagagcttcacctctagataagcagaatcctttggagcgatggcttcatcgtttaagccggcttcagagaccagcctcttcttggattgggtagctactccctttcctttctcttcgcgagacctcctggaggtcccgagctcagtagcagttccgtccctgtttgnnnnnnnnnnnnnnnnnnntgcatcagtcttctcgccttctgttgtggcgacttgagcagcagccggcaaatcgctagcggaaacttgaatctcaggttcgacgacctgagtagataaagactgattctgatcgcaatcagcgatctcttgaatttgaacatctccgaccccatcaagacgtgactcatcttgagaatctgggttgatcggggcctcacgagagacctgatcaatacttgaagggccagaactagcgggaggaatcgacggagccgcctcttcatccaaaggacgagtttcttcttcaacaggagctgggggaggtggcatattcagaagccttgtagcatagctgacgaaggacttcctgaccttccccattattctattaactcgcgaccacgtacgatgtcgacctcagaagattgcttctaggactccttcaaattcaacgggaaactccgagctaggtttgtaccaatctgcaataggagaaaaggttgtgagaatttaatcaaaatcaaaacaactttttaccttatctatttaaaagaaatttaccaggagcctctgtccacatcctcttccttcccgagaacgaacgctcataagactcgaagtcaaccctaacgtagaagtaatattcttcccagttcttgaaattgctgactttaggaccgggaagaaaattatatttagggcggttattcattacccaaaatgcaggcgacctgatggctttcagcgtcgtcatttcttcgaaacaatggacgttcaccaggtaaccttcttcagcgccgaaagttaaagcagcaacaaaattgcagatcgccatgcgacgacgagttagaaaagcaaggatcaggaatgggataggaaaccagagatggcattgtctgaagtaggcctcgtacaaacagacatatcctcgaggaggattccaaggacgctcgtcttctccaggaatcatgtaagtgagcgggcgatctccataaccgcaaagggcaaataattctgcaacagactaggatgtcgaaagggtcctggtcgcagcaatctcggtgttccaatcaacgatcggatcgaggtcaaactcgacggtatctacagggatcaacctcacctcaacttcagcttctctatatcccggatgtgtattataagtatcttccagatcgatgagggggtcgaattgatctaggtagtccactggttcttcatgagcagctgggtttccatcggaatcttcccgatctggctcatcacgcaacgttggaattttgatctgatttgatcgactagattgagcctcgtctctaggattcccggcgaaccgagagttgtggcaaactaacattgtttcgctctcggaagaagaagaggacggagagacaagaacaaccttacccattatcggacaaatcgataaaagaaccgagagtacaaaataattcgcagaggagagagcgagagctaccttagattcttcttgcaagcggcggagggtgaggggccgagggtttaatctaatataaatagagtcgaatgggcggcaaacctacgaggtcatcattaaacccacgagacgcttcggttcctgagcttcacgcgcgcgtacagacgcggtgatttgacacgtgtcagatacgttcgaaatacgaatcgattcggaaatctaatgattaattcacgctttccaagatttaaatcgaatattcaatttctaagttcggaaatttcgaattaagcaactcggattctccgaactgggggggggactannnnnnnnnnnnnnnnnnnnnnnnnnnnacaataccaatttaaaccaaggaataacgtgaataaaatcgagaattcgattgaaccggggaatcccggctagcccgttaatgggcctaagtcatgagctcgccagaagatttgggtcgacaatcgagatcctcataggcggcttctcaggtcgtgtaaagggaaaacttccatttaaggaggatctcatgaagaatggaagtaatgaagatttagacctaggataattagaagtttatcatattttgatacgttcaacccattgtataaatagggggggtcaaagtccccaaggatcatctttaaccgaatacaagagactacaattatagagcaaaccccagctttttattcaagcaactttgttctctccctttgattatttgtgagctaagagaggagtgaatttgtctaaatcccttagtacaaattcattgtttggtttacggaatcaacaattggcgcgccaggtaggggggaatataaacaaattctctttacgctcttttcgaaactcccgcaagaagaaacgttgctaccgatcgatgaccccatcatccctccaatcaacggcgacggtacagagtcaaccctccttaacggagaacatccctcttcgccgcagctgaattagctgccaaggcagccgaacatcgaatggctcaggaggcgaatcctgtcaccccaaccatcgctccaccaactttctctctggaggacctcaaagccatcttcgccaccgtgactaaagatctctccgatgctgtcatataaaccaaccgccgattcaccttcgacttcacggacgcacagtccaacagggtcaacaccatgttcccagggctacaccatcatgtcagtcagcacgggagaccacccatgccccccccatgtcgaccggtcacacctctagacctgcaaacttggaccacggtgggcagataaacgatatctttttgaaactccgagagattgggtctcaagtccataaggctgtcagcttggccccgaagatcgatcggatgattgaagaaacccagaagacttctttcacagatgggattacacgcacacgaattcctcaggtaaaactcaggattccgatctatgagggaggaagcgacccaaacagttcatgacttctttcatgacaacaatcgctaaagctcacttcttggatgaataaagagacatcggctgttgccaactctttgtggaaggtcttgttgggaacgccttaacctggttttccagattagaggcaaactcaattgacaacttcacccagttgtcaactgccttcttgaaacaatagagggtatttattcaaccaggtgcctctagttccgacctttggagcatgactcaagaaaatggcgaaacactgaacgactatcttggtcgtttcaaagaaatactgtctagagttaccatcacggatgaagccgaggtggctgcttttaggaagggactgctccaaggatccccgctgagaaaagaccgcaataagagaaccgcgaaaaaacgacgcattggtcgtcgaactggtaatggagagatttcgacctagaacgagtcctaatcgataccggcagctcgctcaacctgatgttcttgaagacccttttaaaaatgggaatctttgagagtaaaataatgcctaagatccgtccactgacaagatacgacggcgaagcacaaatgtcaataggggagataaaactcaagtccaagtgggcggcatcacgcaaaaaaac

SEQ ID NO: 22239 - DNA, 410 bp, Arabidopsis thaliana landsberg
  unsure (1)..(410): unsure at all n locations
atgtgacgatactggaagagaggatgtctgaaatggatgaggatggtcctcaagtgtctgataattcctcgcatcattcaactcannnnnnnnnnnnnnnnnnnnnnnnnnnnnnnnnnnnnnnnnnnnnnnnnnnnnnnngtttttattttgcttacaatctgcttgtctttgtttgcttggaatatgattgattatgagcaatggatacttagagtaattatgattgtctttggtgattgtatttgtcttcttgtttcagtgtactcatatagatggcaaagggaaccctttttgccttagatcgcttctagagacactgaacaaaagaaaaaggaaagagagttatgcaagctcttctacttcaactgttgcgcaacttcaagagcagctgcagctcaagatatctg

SEQ ID NO: 22240 - DNA, 563 bp, Arabidopsis thaliana landsberg
  unsure (1)..(563): unsure at all n locations
aaatatagattagtataacatgaacgtagtcattttgatgaaagagtttattttaaaaaaggcaatataactcatcaaatgaaccatcaagcaattcaggggcagtagtaccaagaatttcctttgcatgactatcgaataacatgcatctagcttcaccggttttgtccataatatggaaatgtaaccaaaacctaaaagttagataggattattagcttctaaacaccaaattataattcataatacattcaatataaagatttcacaaagactaacttggctacgacagatttttgcaaaaccattgcatatttcacaccaaaatcttggcttctgaggtagcttgacatcttcaagtttgataacttcctctttgacaaccttcttgttgtgagcacgacaacaaaaatagtaccacagccaatctgtatcaattgccaaaacagtgcanactgtttttgcacttacccaccttcaaatgaatataaataggaatccacanactaagttaaaaatatgaaaaatgtaataaaaaggttagtagataaaataattaatga

SEQ ID NO: 22241 - DNA, 534 bp, Arabidopsis thaliana landsberg
  unsure (1)..(534): unsure at all n locations
cttcaaccactacgctggggcccgtgatgcggtagatcgggaaggcagggaattcaataacaagcggaacgggtgaagcaagagctgtgggtaagtcttcctatattgtaaaatatgtcgcattcgttgcacattcttgaaataatgtatggataatttgcctttgcatgcaagatttcttcagatgcaaggctggatatgaggccagggcggatgtggtggctgccacaagctataagaagctcgtcgtgaacatgcactactaggcgtgaatctaggccatcgtcagttaccatggctccgtccttggggagaagttgaccaagcaggacgctcgaaccatgtcgttgactcggaaccagatagggatggcaatggagaattccccgccagggaatagctccccatcctcacgacgaanaaatattcccacggcgatccccatgaatgcttgcgaggaacatttctttcccatccccattccccacggngataaatccncaacgaggatccccatccccgtttaattataaa

SEQ ID NO: 22242 - DNA, 890 bp, Arabidopsis thaliana landsberg
aaaaccaacaaaacagcagctcgaagatgggccaaggcagtgatactgtacatttcaatgatgttgcggtcctcaaagggcctatccaaaatcccgggggtatcaatgacttggtacctgagatacttgtaatcagtatgaccaacaaagagggattttgtggtgaaagcataaggctggacgtcaacatcagctctggtgaccttgttcataaaagaactcttgccaacattagggtaaccacaaatcaagacagtacgagtgttaggatcaatggaaggaagcctagccatgtgctgcctgatctgctcgagataagccaaactaggagtgattcgcttcaaaacagtgcacatacgaccaagagcagcaaccttaagacacttgcagcggtacaaagaatcaccatacttgagtagcttcacataatccttggagattttgctaatcaagttcctggcggtgttcacttggcctaaagcaagcttgtaatgatctttattgtaaagcacatgaagaagatcaccatagaaaggatggatttgttcaaggcgaggaaactcgtcaatgattgcagagagcttcgcatggaagttggtctgagtgtacttaacctttctcatgtagaactgacggagacggttaatcttgtaacccttgtggacaacagttggtgtctgacgctgagtccgtgaaaggatgatgtcaacgaactccttcccattgggaacaactgtgatcctcttgaaattatattgaaccatcttcgcttatcgatctgtgaacaaaaccatacaaaatccaaacaaaactgttacagcttaatcataaagcatatatataactaattgattatgagatactaatcaaacattgtgccaaggaaaaat

SEQ ID NO: 22243 - DNA, 515 bp, Arabidopsis thaliana landsberg
agataacttctgtaaacaaattaggtatacaacttatgattagactccagcttcttggagttgtggaggaaatcacgcaaatttccgagtttggcattttggaatcggtgtttcttcttttgttttcgctctatacatatgttttcctcttttgttgttttgtcattgtctgttctttctgtagatttttgttattttccggttcttatatccttttaacttatgtcaaaacttcgaaaatggtataaatacttggggaattggcaaatataaccaacaaaaatactttaattggtaaactaacacttcaaacaatagaaaaaaatattatatataatatatgtaatattgacaatattatcctgtgtttgtacatcacgctctccttcttctttcttcttcaaaagacatcctattgaataaatcttcttctcttttatgaagtgtgctcctttcatctctctctccctttcttactgtgtttgtacatctcgctctccttcttctttcttctt

SEQ ID NO: 22244 - DNA, 526 bp, Arabidopsis thaliana landsberg
aacgatatgccggttagtgtgtggttttaaaaccttaagatatttgtgttggattctatgaattgtgtgttttgaaaagaagcagggcctgaaatcataggataagtcaacaaaggaagcaactactgaaatttacttgaaaatgatttttcagtaccaaaatcaattaatctgttccatgtctcgtttaatgtatataaagaccgttgagaaaagtcgtatttggatcaccacaagttagtagaaagacttgttagtcagtcaacccatgtgatatatatgagaatgaaaccatgttatcattacaatttccattttcttgctttttcattgttgatactcaagaaggtaaaaatacttaaagaaagatgaaagactcttggaacacaatcagtctcattcttattactcttttctttcccttctttctcacttctaattatggagacgtgttagcagctcctactagaaacttgtgtcatccagaacaaagagacgcaattctcgagttcaagaacgagtttga

SEQ ID NO: 22245 - DNA, 2011 bp, Arabidopsis thaliana landsberg
gcatttccagtgcagaccttatgatccattcaacgacttaaccagtcctatccaaaccatcctttgtgaagacagcaaccaaagcatgtactgtcagttactagccggtctgattcaccgtcacaaggtgatgcgtttaggagcagtctttgcttcagcgtttctccgtgcaatctcttatctcgagaagaaatggagtcagctctgtgaagacatccgcaccggtagtctcaaccccatgatcaccgatccaggttgccaaatggcaatgtcttgtcttttaatgtcgccgaatccagagttagctagcgagatcgaagagatctgtgggcggtcgtcgtggaaagggattctgtgtcagctctggcctaaggcaaagttcatcgaagcagtagtgacgggctcaatggctcaatacatacctgcacttgagttttttagccaggggaagattccattggtttgtccaatgtatgcttcctctgagacttactttggagtcaacgtggaaccactctccaaaccatctgacgtcgttttcactctcttgcctaacatgtgctacttcgagtttatccctctcggcaaaaacgggacactctcttttgatctagacgacgatgaacaagtcccctgtgataaagtcgttgacttggtcaatgtcaaactcggccgctactatgaactggtcgtcacaactttcgcaggtatttaaagaaacgttcttttaattagtgttttggattggttgatgattgattcatgcgcaagcaggattgtaccgttaccgaatcggcgacgttcttcaagtggcgggtttctacaacgaagcaccacagttccggtttatctgcaggagaaacgtggttctaagcatcgacttagacaaaaccaacgaagaagatctacacaggagcataacgttagccaagaagaagcttggaagcaacgcattcctggcggagtacacgagctacgcggacacgtcatcagtgccaggtcactacgtgctattctgggagatccaaggtcatctcgagccgaaactgatggaagagtgttgcgttgcggtggaggaagagctggactacatatacagacagtgcaggacgaaagagagatcgataggggcattagagatcagagtggtgaaaccaggaacgttcgagaaactgatggatctgattataagccaaggagggtcgtttaatcagtataaaacgccgagatgtgtcaagtccaacagtgcaacgttcaagctcttgaacggacacgtaatggcttctttctttagccctcgtgacccgacttgggttccatgatcccaagacttttaatcatcattaccaaatttttacactctctgtaataataaccatccgatcgaattcgctgttttttttttttttttttttttcgctgctttattgataaaacatagggtgaattgcaaaaataacctatttggaagatgaaataaagaatatagcaccataaactgtataatatagtaagtaacacatgtatgtgttaaaaagaccacagactccttcaacttgtcaagaaagaggtgatagcgcgtggagcaaccaaaaaagtgaccaaaatatattcatcccattcaattttgtttgctatgtaagtttaaaattattatttggttaaaactaataatactattaaaaaaacaaatttttttttgtttatctaacatgatttgaattttaaaaatcggaaacaaattttttaaaaagtgaatagtagtaccaagttctatacatatcatcacagaaaatagaatagtatatatttgttcaaaccaaaacgtttgtttcgatgaatccaaataatcagtaaatacttattgattgaaggatactaaaccctagggagaaatatatagggagactcaacggttttaatctaagacaatgatcacatcactagtagtcataaatcgaatcaagcaattagtatattcagaaaatagaatagtaaaatcgaacaccat

SEQ ID NO: 22246 - DNA, 558 bp, Arabidopsis thaliana landsberg
ttctcctcttcccttccacaactcctggagagccgtgggatctcaagcttgctgatttcggttcatccaaagagcctgacaccgatcatgatcctacgtcccttggtactgttgagtacatgcccccggactcttttgtaccaaacggactgatcgatccgggacatatcgatccagcccttgatatagatcctctagggtgtgcggttaatgagatgtttggagctatacctatccaggagtactttgacgaatttgacgtatggcatttgcgtgacgtaatctctccgcaggctcaagatttcttaaggcgatgcgatcacatgcgttcacgcaggcccaccgcgactgagctcttgaaacatccttttattacacaaggacttccatcgccaacaccagaagacaacaaggagatatctaggtcggtgactccaagtttctcgaagcttcttttgacctaatcctctctctatctctcttgtgtacatatgtataaaagaaagcaaaaaaaaactggatagtgaatttgctatggcaaagctaagccgagatgta

SEQ ID NO: 22247 - DNA, 213 bp, Arabidopsis thaliana landsberg
ccttttgcttttcttctctaatggtctgccaaaatcgtttctaaaatatttgagtgtctcaaatatttcaaaaccagtcagaattctacgagtaaaaccagattctatggagttgtcaaaccagcctttctttcgtctatatggatgtccaggtctcaaccttttccctattgcccccatagacattctttcgactaaacttcagccatctaa

SEQ ID NO: 22248 - DNA, 601 bp, Arabidopsis thaliana landsberg
aaagaaacataattaagttaaaagatatattatcaagtcttaaatatattcacatttatttcatttaactttaaattttcaatattaataattatttttgttttcaacataaaatttacttgaataattatttatggtttttgatcatttcttatgtttaaaaatttatactttttcataattatagtttttggtgtttttagtttttgttttaaaatcatatatattaaaaaatttggtaatggtttaaccgctattgtactcgctgattaaccagtcgtaaatctcccgcaaacacacccatttttaaccgctaaaccagtcggtcaaaatgctaaataacgcttgaaaccgcaattgtccgctttcgcaaactcccgcaaccgcaaccgcaaccgctgccgtttaaaccagtcaagccctaatatgcaaaagtttgtaagtctaagcaaaatgctaaagtagaaacttacaaatagttatcaagtatcttcatctttaacattttgcttagacttagaaacttttgttataattgggctgccttgaggggcttgtaaaatactttgtcaatctttaaaaataaacctatattctttaa

SEQ ID NO: 22249 - DNA, 333 bp, Arabidopsis thaliana landsberg
caacatcggacttagcatgctctcttgagatgtttgtaattgagtactcaatggcctttccttgtaagcttgttttatttcttgtgggtaatctttttcttcagaccattttgaaacaaatttgttctttgatatagcttcaatgtcgagttgaggttgaatagcttccctttgcatcagactcactttatccctaaattcctcaatagtgcaagctagcttctggatggtttctactaggagatcagacttccttttaagttctagccagtcaactatacagtgcgtactagattgagtggttgagcttgaaggtcgtgttggagctaaact

SEQ ID NO: 22250 - DNA, 661 bp, Arabidopsis thaliana landsberg
ttttctacatatctgaaattaaaacattttggtttggcacaaaaactcattaagtaaattttcatgagttttgggattcttctattttttttgtctgtccaattttatgcaaactctggtcttcccataaatgtccaagttattgagtccagcaattagtgccacacttaagtataatgataaaaatacaagaaaataaatataaaccaaatgtcatgacttggctatacatacttgatgtacttcaaaaaggaccactcttctttgatttctccatcaaagtacagaatcttcaagtgtagtgcttagaaagaggggctacggtattagattgatcaagaatctggatttacagttgaagcctatggaggattagtgagtagaagcatcaacctgcacacacataccaagatgtgattcagaatacagtactgatgatcaagtagagtgaaaccttttaacttcaagcaaatatgtaattcccttcattatatctctggccagcttataaaagttctcatctacctcttaaatctcttctgatatattgaaatctctaaagtaaaaggtcgagagtcgagacagcaagcaaaacactcgtaaaacatgatgaatgtagtagctgataaactaacaatgaaattcatatgaaaattcattt

SEQ ID NO: 22251 - DNA, 409 bp, Arabidopsis thaliana landsberg
  unsure (1)..(409): unsure at all n locations
aagacaaacccctgttacaaagaaccgaaagtttcaatctttccaaactaatactacctantttacaaggagaagagnttagaagggtggtaccttgttttctgaagaaacatttatactctgaacaaccttgaagaagctttcattcttgcgctcttctttgcaccgaagataaccagcgttcgtagccatctctctaattcaagctcacccacaaagcttttgctctcgtctctctttcacactctcttcctatatctctctccctctctcttttgtaaggaccaaacctgttgaaatctctaccaaatttcaaaggaaaagattcagtcaaagtggttaaagttagaactgagaaataagtacaatgtgaggtcatgtactttttgtcacacataactcttatatg

SEQ ID NO: 22252 - DNA, 166 bp, Arabidopsis thaliana landsberg
tgccacggaagaccgaagtccggtgaggtcgatctcgggcctccggtgaagtccggtcgggtccgagggcttggcgagcttcacgggctactagcggacgtagctgaagcactggcctgcccaaagcatggctgaagggggctggccacggtggccgaagctctgg

SEQ ID NO: 22253 - DNA, 758 bp, Arabidopsis thaliana landsberg
  unsure (1)..(758): unsure at all n locations
cattctgttttcaaaagatatacgctcaaaatctttggaatttaatgtttaaagattcactcggctactatagagacgcttctcatatccttccatttcatcatcgctcacaccgcaaacgagaaatcaaagcaaatatacattttgaaaaatggctgcgacattcgcataccttatagacgtgaggccttacaaaaatgcatggagagtccaggtcaagattcttcactcttggaagcagtacacaagcaacaccggtgaaaccattgagttggtcatctctgatgaacatgtaagaattactcttatctatgcaaaatttacgttacatatacacaagtactaatatagatttatgttgtctttgtcataagggaaaaaaaatgcatgctaccgggaagaaggagctggtttctaangttgttcacaaacttattgttggcgagtgggttttcattgacatctttggtcttacctatgcgtctggccagtttcgtccaaccaaccatctatacaaaatggcgtttcaggttagaacagaagtcatgggttgtgcttccgtctctgactccaacttcttgactttggcgccattttcaaaaatccaaagtggtgagcttaaccctcacatgttggttggtgacgtttctgattctatattatgcttttgcattattccattcacttgctatcattagattatgaacacagtcatgtttcactgcagatgctattggccaaatcattattgttggtga

SEQ ID NO: 22254 - DNA, 468 bp, Arabidopsis thaliana landsberg
tgtctctctcacaacaggttcagttttgatcgttattgcgtttggattgtttgcattacgatatcactgggaaccaacttggggaatgaaaaattctgaaagattttctgcagcaaagccattgatggaacaagggtttgtttcttttctctgcatcctctttgaactgttctttaataatctaacctccgaaaccctaattcttaattttattttagtggcaaaagttcgagaaagccaggttttatgagtgaggacagaatcagtgagttgcctgaagttttgcttctgcagatactgtcttcacttcctacaaaacttgtcatatccacaagtgttttgtccaaacgatggctatctctttggaaaatggtacaaagactcgagtttgaatcttctcgaaacatatatgactttgcttgaaacgttaccaggtctttgctttcacataaagctccagttctagag

SEQ ID NO: 22255 - DNA, 591 bp, Arabidopsis thaliana landsberg
  unsure (1)..(591): unsure at all n locations
aacttccaaggatctgatggtagttacctcttaatagaaacttctactctttctgccatatgactgggagatgtatcaatgtactcaatgttcttctccgaagttaagaagttaatgattcgatggatccgatagatttacccaaatcttttccaaaattattgtaatcttgtttttaccttttttttgccaagattacatttgttttaggtactccaatatgtaagtccgaactttcatttatatgaatattaacattttagcaaaaacaaagttaagaaaatctaagcttcattttgatgccttgaatcaataactttctttccaagttacaatgccatcttgccattttccgtttcgggagtattaaggaaattattaaacaatctccttttttccgataagaaaaatttatattttgttaacggaagaattggagtccttttctcttgtattttcctttcttcttgggttaagtctcctataaatatgtttacatctaagaacacgaaatataaacaaattttctttctacttgcaaaagatctangggtaaaatnntagcaagatgaattatgctagagatgaact

SEQ ID NO: 22256 - DNA, 577 bp, Arabidopsis thaliana landsberg
ttggtccaaatcctacaggtggtcatatgctgacataccacatagtggaagaactagctagctgggtttgaaataaactcaagataagacaagtggtcagaattgatgttgagagatttttttcctcagcatgggtgtcaaatgagggtccatcaaagtatgcagatgtcactaagggtttccatttagagtaatgagacatgaaatagtgggttttgggttttgagtatttgggttttgagtaagtattccaatataatatatgttcggataattttgatagctaaaatcattgtccacggtcccaaacgcccactagtttaggtaagatggacagccctagatgtaactatcaggagttgcccaatgtctatcatgtaattgtatcttttcttatttacaaagttgttagtaatctatctttatatacaatttaaagaagctcttgttagttatgtgatagataaagatggataacagccgatggagtcttcaaggtatgactgctcttctgacccgtggagcgggaggaattgggtttgtctttttaccccattgttctactgctatttgatat

SEQ ID NO: 22257 - DNA, 639 bp, Arabidopsis thaliana landsberg
tactatatgacccatataaaacaaaaattcattaatgaaaacgtaatttgtactcgtctttccatgaaatattgtactccctctgtttcatattagttgtagtttaaggtttttacacacaaattaagaaatcataaaaatctcatttaatctacctcttttatataaaaacatcatttattataaccaattcaaccaataaaaaaatagatgattaaatataattggttaaagaatattaaatacatttattatttgcataaaaagttgaaaacaacatttaaattgaaaaaaaataaaaacccttaaactacatttatatagaaacagagggagtattatacaaacacaaacttaaatgttagaatttagaaagataaataaacctttagtcttcaattggtgagaagttaatcatatttatatggtgacataagattagtgaaatgaagctacttattggtcaaacttacattaatctaaaagggtaatgatatgtcatatgtctaagatggagcatgctcaaaagaaaagcttagttaatggttcatgttgatgcaaattattgtgtttagctttatgcacaaacacttgttttaaccaagacaatactgtcgttttagctttatgaatgtcaaa

SEQ ID NO: 22258 - DNA, 618 bp, Arabidopsis thaliana landsberg
  unsure (1)..(618): unsure at all n locations
attgttatagccttgttaagaacatctagctcaactttaactgatggctcaactcattcaatccgtagtcatcgagtaccaacttcacaagcttgttgtgcgttgtttccgcatctatttgcataactcacactctttattgttaatgcaaatacaaattctttactcaattaccaacaattaccgtaatcgaatcaatcatattaggagaaagatgaaagaaaatgaagaagaatgaggaagacgatgacgaattagaagttccggtaatgtgaaaaactcaagttaagaagacgagttaaaaaaggcgtttcgtattttctttgatgatgatgacataaaatgttgcatccgacgttattttttaattgatgaagtggcaagtaagccaccaaacgaacttgcataaataaatcagccatcaaacaaagttataagtcagccgcaacatgtcgtttaatatcaaagctacagtaattaaaaaaacaaaaacacngcatgttaatttagccgtttaatgtcgtaactcaacagaaaatttttaactcagtcgtttcgtttatatgtcggnncgaattgcatgatattataataantaatctttcactattaaagcag

SEQ ID NO: 22259 - DNA, 541 bp, Arabidopsis thaliana landsberg
agatgagtgttgaggaactcctgataggtggccgctgctgggggacgctgatggtgatcaccaccaccatactgctgggtggtggctgacgctgagctaactgtcgcagaatctcattttgctgagccatcagctcttgcatggtaggaggcggcggcggtggtggaggactgcgctcattctatccacgacgcgctcttcctgccatctgaaatttaggatgctcttaatatcattccttgaaatcagggattgcacatggtaagagatttttaaggacaagtatgcaaaatgtcaaacatttccttgcattttcataagaggtaccacatgacatacatttcattcataacataaaatataaatcatccatcattcatcaagccaaaagagttttctaacagttacagcaatgttcaaaatactcgactctctctagcctagtacctcccaggtgcaaaaactaagctagtttcgaggagttctactgccgcacacttctaccccaatctctgaaacctaatgggcaaacgaggcaaca

SEQ ID NO: 22260 - DNA, 658 bp, Arabidopsis thaliana landsberg
tgttcgattaaagatcatcttgcttcatcccaaagaagtttaagcaaggctttggttgttagttttaagcctaaacaacagtacagtggcatgtgacatgtgagtgtagtttggtctctgtttgttattttgtgcattgtgctctttcagctgctcagtatgtaatggtattgaatctctcatctactccttctttaccaatttgaaaccgttgaatgtgtcttgtcttcaagtttttgtaaaggttggtagtgtcttttgttagtcgtgaatgaatttttagaaaagagagtaatcatagcatagcccatacagacaaatagataaacccaggcccatagtttgcaacagattatataagcccatttaaaaaagaccaaggaaggaacaaatctattagagaaaatggtgtttactaataacagcatcgggactcacccatcccgccattactagtacatcagtctcggctacgattgcatgaaccctaatttactgttccgcttccctctctagcattcaatatcggaaaggctcttctttcatttccgtcttctgattttgtgattttgtgttttcctttccagttcctctgtttctcaaaattttaattgtgtttagcgtatgtgaatttgaattactgacttcaagctcaaat

SEQ ID NO: 22261 - DNA, 286 bp, Arabidopsis thaliana landsberg
tttaggacctgatgctagaaaagtatgggtacaagtaataaagattggatgtgcaaaagtgtggagaccaaattcagaggttgaattcgtttctgatgctttaggaacaacagcggcatggcctaataataaacttcagtttgtgtgaacttggaatttggaagattggtgtaagatcgattgttgaatttggaattataagagtttgttgtaagagattgttgactttggagttatgtctgaatcttttcagttcttaagagattgttgggattgaattatttat

SEQ ID NO: 22262 - DNA, 486 bp, Arabidopsis thaliana landsberg
cctctgcattcggttaggaatgactttggagctaagctctacatccccttaggaataactttggagcttcttcaccttttacttaggtggtattttagctctgcatccccttaggaacgactttggagctacgctccacatccccttaggaacgacttaggagcttcttcaccttttacttaggtggtattttagctctgcatccccttaggaacgactttggagcttcatcacccttcttgttacacttgattgtggtggtgtgaccacaaatttattacaacaggccgtaggttgaaccttcttatattgtcttttgaagggaaatataaagacagaaaagtaaaaagtacattgaacttggaaactttctggtcgagcccatgtattagtttagtaaatatgtcttgattcaggcatagtgttgttgactgtgcgggcttcagactcctcttgtgtgtcatgccggctgtgcgcttggcgatg

SEQ ID NO: 22263 - DNA, 2007 bp, Arabidopsis thaliana landsberg
gcaccgccatgagtatactcgacctcccttcttctgctgcggccagcaccgcggtcgagtgatctcctcgcgtggataaggcattatcttctgctagatcgaacgacgaatgtctagcagggacatgtgagactctcttctcactaggctcaggcctgtggtgacttgccttaggctcatcaaatctccttgatggcatgtcctgaggaggttgtccctgcggaatagcagtagtggaagtggagtagattagcttgtctttcagaaacttgatagtctttaggcacataaggagtaacttatcttgttacttgcaccacttctgcaacatgctgttgtttttgtgagcttcacccaagctcatactctccctcgctagagctacatgctcactgaaatagttcatgtccgagtcatacttctcctcatctatctcaccgatctcatgctcagtagctttttctgtatgaacatcctcatatgttggttgagtattctcagaatagagattctcaagatcaggcttgaaatcaatgttatctctctctattatgcgtgtaacgtaacctcaggattgaggagaaggatgttggctttcttatctatagagtgctcaaacttgaaacgatgcatttcaccaaccattgcgaactacatgattttgcagtgatgtaggtgctcgatatccattgcccgtggctcaagtccatcagatgtgattgggattccacaagcgatcacaatcggtgtcgcaacacctcctatgcaaagagcgcctcgtgctctcttgtggttattgctgacagcccagctcttatatccacacaagtgaatcagaagaggtatatagagaggtgtgtcattggtttcaccttggagagacataccgttcttggtttggcggagagtgccattgagagccatagcgatcatctccatatcggaattggtgacagtccctgttatctctcgggagtaaaggacattggccacagaacactggaagtacctgatgacaggactgtgtatctgattgctttaggatcttgaggaattcagcgttacagagctgccaatggtgatccataaatcttttaactcttctctgtcaaacttgagcgtagtatctgttccactaggaaaaccaaacaatccttctaagggcttgattgatagcatataatcctgaccatacacagagaatcgcaagaatcccaatccttcactttccaaatcatcagaggtcataccctggtaaagctccacagtgtggagaggaattgaatcgtttcttcttcataggctccttatgggtaagccatcagagtgtccaggtgacaactctggtgcatgtgatgaacatcctctagtaatccaagctgtgccagcgtagtcgagcagaactcgtttagcttgaagagcctaatatattccttagcaggcaatacatcaggtttgtgcagaagtttggtggctctccgagtatgctcaggcatgtacttgtcttccagatcctcatctattagctcatacctctctgtcattgctctcttccctagagctatctcagcctttcttctgaagctatcatattctctctgttctctctctggcctcgaagatgacgactctgtctcttccatgttgtagtcaggatcaatggaagacctaccactgtaattactcatgattttcctgtagaagatttacaactcaaaacccaaatgtcaataggttagtctcaaagataacaattgaatcaaaattgttatcaacaagcaatggaatgaaccaaattggtcgagtatgtcttgtattcgagtaaactgggctctcgtagagttctgcttaagtgaatcaagctgaaaagaaacctgtggtcgagtaaatcttacggggtcgagtgagattgatgaaatcagtacagctggtgagtttagaaggtatagtgctttatcggtgagccggaattgggaggaacaaaaccaaaaatcggggatcgattct

SEQ ID NO: 22264 - DNA, 492 bp, Arabidopsis thaliana landsberg
tttgactgtccgtgtgggggacatatatccccggagtcgtctagattgttagaaagcctcaccaaacgctttgggcccattatttcgcaaggccatcccttcgtgggctaggggaggaactgctggcggaatggattgacgcaagattggatagactcgggcccagacggctcattggatttaagcattatccacagcattgatccgattctcccgcgcagcgccctcagacgtcggaactaaatgaggataagtcggcaggattataggaagataagttcagtcggttcactattacttaggtgcacgttgttatcatacccgcatgtagcaccccacggtcgagtatataaggcctagggggcaccccatcaaaaggcaggtcactcattagccatcaacccaattctctagcatccttcatactagagaattcccctgtaacccaccacataaaagatgcacaccaggaagtagggtattacgcctatc

SEQ ID NO: 22265 - DNA, 634 bp, Arabidopsis thaliana landsberg
  unsure (1)..(634): unsure at all n locations
ttaacgcgttttttagtgttacaccttttttgcaacctcattaatttgttttttcaattatttctaggatttttctactccacccccggcttccggcgggaaactaacagctgggaaagatgtaagcggaatcgatgttgacgttaaccaaggaagaaagagcaaaagacccaggaccttgtcgagcaaattagatgggcggttccacttcgacaagaaaaccaagctgcttgttggtcacccatcccctttgctaagcgccggcgaggtggtgtctgatccagaagaacgctaccacaggtcactctcgaagctaaatgggaaaaggtaatgttcttagtcgttaatttagttatgggataacaattggatttacaattacccgaatcgttgttgcagttctatcagcattgttggtgaagtggcctttccaacaaagagatttttnnnnnnnnnnnnnnnnnnnnnnnnnnnnnnnnnnnnnnnnnnnnnnnnnctcatcaaattccctaggcatctactaaggacagacgacatagatggtgagaagctgcgggttgatgtgcttggctcgaagttcgtttcacaactgactagactcttttaaaagtttgcaaacaaagccgctgaggat

SEQ ID NO: 22266 - DNA, 500 bp, Arabidopsis thaliana landsberg
aatgagtccaacagaagaaacatgaaactcttgaaagaatggctttgaaagaaccttttgccgtaattcaggctcatgttgtgatgggcaatcaatacgattattcgcagcatcacggtttccgccttgttcattaggcttccagttagtatttccctccattaagttatgcgtcctaacgggaagatgtatgtataggctttgaccaagaactgcctcgctaaaccttaacaaacaaacaaaagaatgattagagaaattactcaacatggtaacacaaaacagataaatatatagtacaagaaaacgacaaaagagtattcaaaaatcaatatgcatatcacgctaacaacctatcgcataatatcacacaacacgtattatagtatttgttggtgcaggaattagcacctccgacaatactaatttaaaccgaggaataatgtgaataaaatcgagaattcgattgaaccggggtatcccggttagcctgttaatgg

SEQ ID NO: 22267 - DNA, 513 bp, Arabidopsis thaliana landsberg
  unsure (1)..(513): unsure at all n locations
tgaaagttttaccagtcaccaaacatcacaccaagagtctactgtaaaaatttcaacctatttggagcaccagagctacagatctaaaaataacaagcaaataaatcttcttttctctattttacttgttttaattaacacaccaataaaacagtgaacaccatatgtgttttatatttttcttagctagagtatgacaacatctaaccaacaaaacaagtttcatcatttttggatatttataattaaaactatggagagaagcaagttcatttgttttctaatcctattttcaaaaatgaatttctacagccaaaagtttctactaaaatatgccaacatatagatccactgcatagacaatttcccaaggattccaaaaagctctcatttactatgttacgatttttctgtgatttactacgattttctaaagttcggcaccaaatctgtgaaatgaaannnnnnnnnnnnnnnnnnnnnnnnnnaagtctgtcgctgcactattcacct

SEQ ID NO: 22268 - DNA, 1032 bp, Arabidopsis thaliana landsberg
  unsure (1)..(1032): unsure at all n locations
ttctgaaccaaagttatatctgctgaaatgctcaggctacgtttatttttgtttctgctcctaaccgtttgggtgttgggttgttccggtttggttcgcgtggtggttccagcccaaaaccgaagcaaagccactactcatcccgacgacggtctgtcttttcaactcttgacaaaagtttagtcaccaattatcgactggatttgtagtttgtaatagctagcttcttctttgtaataaaccccactaacgaaaaaaacaaataaaatgcatctcgtcaatagaatcagtttcttagttcagttaagatatagtttcaattaattaatactagttgtttagttaagcgtaatagattaaggggtgctaataataatttgaccgttgtgaattatgttggataaaaacagcgcgagctttgaactccatcttcgcggcttggaagatccgtgcaccgaaagaatggaacatcagcggcgaactttgctccggcgccgctatcgacgccagtgtactcgactcaaaccctgcctacaatcctctcatcaaatgcgactgtagtttcgtcaactccacaatctgccgcataaacaacatgttacacctctttcccactttttatgcactccatgtgttcgacgaattctcccactgagtctcaattttgtttgttgttgtctcagaaaggtttatgcgatagatgttgtaggacctatacctccagagctctggaccttaacatacctcaccaatctgtatagttccatacaacccacttacccactttttatattcacaagtatatatatgttgagactcttaactgatccaatggtcatcaaaaacacacatctttcaggaacctaggtcaaaattatctcacaggctcactgtctcctgctattgggaatttgactcggatgcagtggatgtaaaagcctctgaaaccttgtttctttttcttttttggtaaantttatacaagttcaattaacaattgtttgtcttccatgctcaaatgtatgaactttg

SEQ ID NO: 22269 - DNA, 413 bp, Arabidopsis thaliana landsberg
ccctcacgctctgtccgattgtctgtcctcgtcaacggtccaaggttcttcctcttacctttagaccgattatatctccgatgagtgtttggtccccaggggatcaagctttggtcgctgccatcacggctaacatcaaacctaaacattttaaagaagctgcttatatcaagattaataagacttgggatattggcgatttgccaccaggaaaggttgctattggcagtcaatgggtgtataagactaagtatgattccgatggcacagtgtaaggatacaaagctcgtctcatagttcaaggaaacaaacaagctgaaggagaaggagaagattacggagaaacttttgcaccagctgtacgaatgactacaggtctaccctccttcgtttcgttgctgcaaatcaatggg

SEQ ID NO: 22270 - DNA, 498 bp, Arabidopsis thaliana landsberg
aacaattaattttgatttactaaccggaaagcgacgagagcccatttaagtccaatgagactagagtaagtgttggggtggctgatgagtttcctccaaaccattatcagtatcagccttgtcatcacactcgccggaggcatattttttcgttgacttgcttcggctcctcctagacctgtcttggattgtagcgccgccgtggaatttggagcaagtttgtttagaccattctcggcgtcttttggtctctctgcttcttcttcttttccggcgaaactaaattgttgttctcctccgaaatctccacttgctggatgagctacagctatattcaccacacaaaacagaattgagaaaatttgcagtgacttatcaagaaagttatctaaagattgctaacctttggtctcgccgttgtgagattgatctgggactaacatacggatctctttagcaccttggtcagatcttccgccttgatcgttgtcaggtgct

SEQ ID NO: 22271 - DNA, 719 bp, Arabidopsis thaliana landsberg
tctctatatggagtttcgattggtttcatccggtgaaatccagaaaaatcaagcttcgattttaatatcggcgatgattttctcaccgaaatcgtacttggacggcggaggttgatgacaaaacgctttagattattcatccactgtgtagttgttcagtttacagctattgacacgtggagttggatagagccacatatcatttattctcttttaagtaatgctttgaagctcatgttgggcttaaaaaatgtttcttgtaatcttaatgtttgtagggcttttggcccatgtacggtttgctagctctataataatatttacccatgagaaaaaaaatgataagacccgcctaaatagacggatatcctttatcttataaatcacaaatcacctaatccataaaaatctgtcacatagattttgtttcaatattttgataaaaataaaaatctgttaaacaacagttctaaaataaaaatattattcttcgatatctatatctgccttctattttgtctaaaactgttcttagatcctaaatttactaatccatgttcaaaataaaatatatcatgttttcaaaccgtttcatctccgatcctatttaactctcaatcaaatcaatttttttaatcagttttttttcccttccattcgttgttttatcttatattcttagaattatcaaagagctggtcaggttatgactactcttc

SEQ ID NO: 22272 - DNA, 457 bp, Arabidopsis thaliana landsberg
tctataaatgagtattaatatggtttagcacatagagtctctattttagcatgaaacctatattaaaattgatcacttaattatttttgtaccaaacacataagaacttcggaaaatcctaacttaaaatccgtacccccgaatttagtgattcttgttcctacgatctcgttacaatgtgtatattattgttatgtattctatatttatgtttgatgtgatgttaatttctgctataccatgttttttgtactgttacgagtagacgagcaagccatagaggatccgggtgttcagcaggtagaagttgctgagcaagagctcattgaaggcaagttgtgtccttgaccacttttgtttacccaataatgttctctataatcattttatcatgcataggcttaattttgatgggacccaataagtcgccctagtttgttatcttttcacctattta

SEQ ID NO: 22273 - DNA, 1314 bp, Arabidopsis thaliana landsberg
acagaacattaaactactaccctagttaacaccttccactttctagtttttctaattctctgcattatgattcaaccagagagtcaagaccaaacatcatcattattatcaacaaccaaaatccttgataatgtcaaattcttgatcatcatcaaaaaccaaaccatcctacaaaatgatggaagcaataacatttataagaatatgatctcactaacatttatggacatataaacaaacattaagagtgccttagaatcaacagccgaagatccatgacaccactttcttcagaagagttacatctggaaattaaataaagacatttttgttccttttggctgaaaccttctacttgggttagatactcttagacactttaggcaaaacctcacaaaactccaccttgccgtagtgtcgaatcctttacttcacctttctagattccttgatttccatctcggtccctgagatcttctcaggcttgagatactttgagaagcttcttatctgcttgaagcattctccctgttgtcactttagtgatattctcacataaatcaagaaggtctcgtgatggattgtgcaagtaaatcaagaaggtcacataaagcattattcctgttcttctattttcattttgcaaacaattttgacattaattagtgatggattgtgcaagtaatttttttataaggattctaaaataaaaatatggacacgcacgaattgaatttcatattattatatatcaaaacatgttttataatatatattatgggaataattgttaaattccataattagttcaaataaatctccatttcaacaaccaaaaaattacaaattaaaaaaaaactttctaaattaactcaaaataataactatattctttagttaactatctaatctagattttagatacaacttatttatgatatttctactattgatctaactaaattatatgcaatctcattttgtggttgctaaattttgtttttcacttactagtataacatatcaaaactttattataaaatatataatatatgaaatgttgtcaaaaaccatgctgtagtactatgtattatgatctagttgtttctttatttttgttaactagaatagcgttaaaaatgagataacttacatatttaaggtttaaaaccttatttgataatataaataatttcttttaacaattttctttttttctagtttcttacaaattctttttgttatgaaatacagttagagatgaacttaaaaatagaaaaattgaaaatataattatatcgttaactaacaaaa

SEQ ID NO: 22274 - DNA, 386 bp, Arabidopsis thaliana landsberg
ccgagttacttctgctactacgaagggtccctcccataagggcgataacttgtgtcgtcttcccccgttagaattcggcggaggacaaggtctcctactgaaaagaaccagtgccgcacagccttgtcgtgatatcgccttagagtctgctggtaccgtgctgattggattaccgcattcagccgttcttcctcaagtacatcaacgtcctccaacctggtggcctcggcttctgctatgctttcaaagatcaaccttggcgccccaaatttgagatcagcaggtagcactgcctccgacccataaaccatgaagaaaggagtgtttccatgcaaggctcggctaagttgggttcttaggctccaaacaacataaggcaattctct

SEQ ID NO: 22275 - DNA, 421 bp, Arabidopsis thaliana landsberg
  unsure (1)..(421): unsure at all n locations
acactttgttctagtggaaaaagtgacagtcatatctacagaagcagaccttcctaatgcctttacttttaccaccccacgatgctttgatcattgctggataaccaacaacttgacaactagcaattgcttcttctgttgtgtaaacacaagctttcttatatatctcctcggngacagttaccaaacttctccccggaggtatcttaacctgaaaaagcaaaaacaatcatcatcactatgaaacagatcaacacttctatgcatgtaaacaagttcagcttcatttacatgggaaccactccatggaagagtaggtacatcagcagcttgagcaatcaacgacgaaccaatcttatcccctaatgctatcattgaatctgcaagaggaccaagaaatataattccttttttctttaaa

SEQ ID NO: 22276 - DNA, 548 bp, Arabidopsis thaliana landsberg
  unsure (1)..(548): unsure at all n locations
ctatcgctagagctaccctcatcactagatgttgtatatttgggggtggctctagtgtgtaccttctttttcttgtcgtccttagccatgatgcacttgtggccgacgttggggaagaggaggcccttgttgatggcgatgttggcggcgtcctcgtcggaagaggagtcagtggagctctcgtcggagtcccattcctagcatatgtgggcatcgcgcccttcctattgtagtatctcttcttctccttcttcttccctttcttgtcgtcgtccctgtcacttccgctagaaattggacattttgctatgaaatgaccggacttaccacaccggcagcacaccttcttggagcgggacttgtagtccctccccctcctttgtttgacgatttggcggaagtacnnnnnnnnnnnnnnnnnnnnnnnnnnnncgagcttggaggcatcgattggaagcctacttggtgtagactccttctcttcttctatcgctttgaatgcgacaggttgcacctcgggtgtggaggtggcgccttgctccaagttg

SEQ ID NO: 22277 - DNA, 3362 bp, Arabidopsis thaliana landsberg
  unsure (1)..(3362): unsure at all n locations
ccttgatgtgaaaccggatggaagaaaggcacaaagatcacgttcccagagaaaggcaatgagcaacccggtgtgattccagcggatttagtcttcataatcgacgagaagcctcacccggttttcactcgagagggtaacgacctcatagtcacacagaagatctcacttgttgaggccttgactggttacacagtgaacctgactactcttgatggtcggagactgacaattccagtcaccaacgtggtccatcccgagtacgaggaagtggtaccgaaggaagggatgccattgcaaaaagaccagactaagagaggtaacttgaggatcaaatttaacatcaagttccctacaaggttaacctcagagcagaagacaggagtgaagaaacttctcggatgaaatgagttatagtcagcacatttcagacaaaacaatgttgaacagaagaggaacaagaaaatcatgttgtagaccacagggattgtgattaaatactgctgtgacctttatgatcgatttgtaacatatgtataattaaatactgttgtatatttctgatcgatttgtaacatatgtatgattgaagacgcctaataagtttgctacttcttctataatccaaacgcttctaaactatgcctataaatgcaagagcattgttgtttgtaatcacatcctgatcttgatgtgaagtaaacaactgcagcactatagatatctcagtccaaaaaggtttactgttatctcctgaaacgaattcctgaacaatgttgttcacttctatcaaactaccacctggcgttttcttcatattttcgttccttatcatctttctcaatctcgaaacatcctcccattttcccaaatctgcgtaaatattggcaagcaaaacataatttcccatatcctccggctctagctccacaagatgatccattgcaaccagagcaacatcaagattgcctggtgttctgcaagagctcaacaatgaaccccatatcttcgagtcgggtttcatcggcattgtctttgttatttcaacagctcgttctagttttcctgctcttgccaaaacatcaatcaaacagccatagtgttcgatcttaggttctatttgataatcttgtctcatcatatcaaaatacctcaacccttcttgccacataccaacatgtgaacaagctgataaaagaccaagaaatgtgatcccgttaggcttcaccttcgctctctgcatttcattgaatgtttcgattgctccgtgagcgttcccgtgatatgcatacccagagatcatcgtactccatgatataacatctttcccttccatttggccaaacaattggatagcttgactaatcacaccacatttcgagtacatttcaataagagcattgcaaacaccagtttgtttcagaaaccctcttctctctgcccccagcatacatatggatccatttgccaagctctagagatccaagatgctcacacgaccggaaaacaaaataaatcagtgagactagaaatgagactgatactagttaattgcatgtgccagaaaaaatccctggcctctacaaacaccaaatcgttctacatgtacgtgtcttcattcatctctctttaattaaaccaagtccggtttgcgccggtcaataatgaagttggttcaatacttcgagcactctttatgtagtacataaacattatgctttctctcccctactttactctcggtacagttcatccttggtcatcatcatcgtcctactcccacaatccggtgattattctctgcacaaatcacttttctcctttcctcagctcacggtgagtctctggaacggattgtactaatctcattattttcccggtttcagaacgatttctggaacattcattccacactctgagaagaaacatgagtcacccgagaaatgcagatgatatattttctgagttctttggggtctctagaccttctggtccttctggtcccagaaatgcggatgatatatattctgagttctttggggtctctagcccttctggtccaagaaataaggatgatatattttctgagttctttggggtctctaacccttctggtccgagagataaggatgatatatctgctgagtactttggggtccctagcccttctggcagtggcagcagtggaggcagagaaggaggaggtggtggtggtggcacaatgcatcacggtggagctaggaaggcagctcctgttgaaaaaaagttgccttgtagccttgaagatctttacaaaggaaccaccaagaagatgaagatctctagagagattgctggtgtctttgggtaagtcatgaccattccatttcttatttgtgaacaccaagtggaactctttaggttagccactcatcttaagaaagcgttagttagggtgttcgtttggcaatacataatgaaagcagaacattgatcatacttgataaccttgttgagtggcaaaaatcgcatatgctgaccagtttatgtgttttcttttgaaaaaaacttgcagcaagacgacgcaggtacaagagattttgactgttgatgtgaaaccggggtggaagacaggcacaaagatcacattctcggagaaaggaaatgagcaacnnnnnnnnnnnnnnnnnnnnntagtcttcatcatagatgagaagcctcatccggttttcactcgagagggtaatgacctcgtagtcacacagaagatctcagttctcgaggcctttaccggctacaccgtcaacctgactacacttgatggtcggagactgaccatcccagtcaacactgtgatccatcccgagtatgtggaagtggttccaaatgaagggatgccgttgcaaaaagaccagactaagagaggtaacttgaggatcaaatttaacatcaagttccctacaaggttaacctcagagcagaagacaggagtgaagaaacttctcggatgaaatgagttatagtcagcacatttcagacaaaacaatgttgaacagaagaggaacaagaaaatcatgttgtagaccacagggattgtgattaaatactgttgtgacctttttgatcgatttgtaacatatgtacgattggatacctcctaataaatttgttactttttctataatcaaaacgcttctaaatccatacctataaatgcaagagcgttgctgttttaagtcgcattctgatatgaagtaaaatattgcaacactagagagatctcagtccaaaaaggtttactatttgtcacctgctacaaattcgtgaacaacattgttcaaactgatacctggagtttcttcatttcaatctgcgtaaatatt

SEQ ID NO: 22278 - DNA, 503 bp, Arabidopsis thaliana landsberg
  unsure (1)..(503): unsure at all n locations
tgcttcagtctctgtttttctgagtcctttgatcttttggacgtctttctccggtggatggaaacctatttcacttttgttctacccttcttctttttcggaggcagagataatactttcaacgttttgatttcatctgggaaatcccactgtgatctatccgggactaaataaatagtcctataatacgccaatacccacaactccgtccaataatactttgaaaccaattcatgtaattccatacctcgagttcttgttgtctcgctctcaaaggcaatgaaagttgctaatgcatgaattcaatgatacttttggatatcaattagcttgcaactgcaagtttttaagagcatgttgaccaaatatttgttccctttaatatccttgacattgtattcgagctggtatgtgtttagctttgtcactttttatttctcagcgtcaacccataaatcatgcaagtagttctccagtgaaggcacanacttattatcattaga

SEQ ID NO: 22279 - DNA, 601 bp, Arabidopsis thaliana landsberg
tgcaggtcgactctagaggatccccggatcaataagagtagtagcttcggcagaatcaggttccgaagctgcttattctgtggaaaaagatgctttagaagggatcaggttgcaagccgtggagaacattaataaatatcaagccgaaacaatcaaatggcgtgatagaaaggttcggctaaagaatattgagccaggacacttggtgcttcggagagtggccaacccggaaacagtgggcaagttgcagttgaaatgggatggacccttcttagtagcatcttcgtcaagacccggttcatacagattgaaggatatggacggcaacgacattcctagatcttggaatgcggatgagcttcggcggtattatgtgtaatttgatgtaatttttgttttttctttttcatggcacccttttcctttctaaagggggagaaaggtttttaatggggccatcatatgtaattaccttttttagttctataagagcaaaatccccaaggactcgcccccggctacctgtccaaaggacaaaagcccgccgccgccagtgggtgggaaggaagctagcccctatcttggttgggggaagaggacg

SEQ ID NO: 22280 - DNA, 4065 bp, Arabidopsis thaliana landsberg
  unsure (1)..(4065): unsure at all n locations
gaaggacggtaaaaaagtctatcgtaatatactggaaaaggcgtgcgaaaggactagcacaagagggctctgtattgaattggttccgctctctgctcgaacgattctctctgataacccgattgtcaactccacagcccacaggtcagattatttccgatttagggttaatcgagttctccgcttttcgaaatccatcaaatttatatttaatttaatttgcgcgagaatcgatggtgattgatttgttgttgatccagacagagnnnnnnnnnnnnnnnnnnnnnnnnnnnnnnnnnnnnnnnnnnncgtgaaaagctttcgtcatcaattcatcatcataaagaggtgtcgtgtgagcacacgcaatctcccaatctctcttctctctctctctctccaatctccatatctttgtcctctataatccggagaagtagctctaccatcgaaatctcccaacttgcttccttgtgagtttctctctcacttcataaattatggtttttgcttcagtagacgtagaaatttggtattttgattgttgggtttcaatgatttagggtaaagattcattgggttttctccatttctagctttagtgattatgatcatgatttcatatcatcctctctctcggtttttgttcatcaatgtcttctggttcttgagataacctcctaagctttttggtttaatgattcctcttttctatcttctatgatcacctgcatttctcttgttttggttagatgttaatctccttagtgtgatttattaacttggtactattgattttgatatcagctaggaagctttttgctttttgttttcgtctttgcgcgtgtcccattctcttctccaaagttccctataatagtgaaagctcatcaagttatttagctctcagtttctgaaagatggaggtcaagttatggaatgataagcgtgagagagaaatgtatgagaatttcgcagagctttatgctatcatcaaagctactgagaagctcgagaaggcttatattcgtgatctaatctctccatctgaatacgaaaccgagtgccagaaactcattgttcacttcaagacattatctgcatctctcaaagatatggtcccaaacattgagagatttgcagagacgtacaagatggattgctcagctgcagtttatcgccttgtgacttctggtgttccagctactgtggagcatagagctgctgcttcggcttctacatcaagctctgcttctgttgttgctgagtgtgttcagaacttcatcacttccatggattctttgaaactcaacatggttgctgttgatcaggtgtatccgttgttgtctgatctctcggcttctcttaacaaactaagtatattgccaccagatttcgaggggaagattaagatgaaggaatggcttttgaggctgtcaaagatgggagcttcagatgaactcactgagcagcaggctcggcaacttcactttgatcttgagtcatcctataactcgttcatggctgctttgcctaatgctggtaattaaccgatgtgccactagagactgatgtgtgttcggtttattttgtttagtttggctttatgtagttataatgatggctttaggaacaaagatttttgtttcatgacaatttgctacatatattttggggatgaatgttcgtagacaaaacaagcttttccttttgttgtgtaaaagatgatgccaatccagaaattgtttttttcatgaagtgtaatgtatgaatctaactcttttgtgctgattattggctttatatcgttacatgggtggctttatatgtggttatggaacattcctctcctttagtcttttcaaaacaaatgtaaagactctatatcaactataaaacgttaagagagattaaaattgcccattttcattagctgcgagtaagaaaagtaatgagcaattcatcagtaaggataagaacttgcccatttatctacaaaatgcgcaaaagcctgtggggttaaaaaggtgattgaccaaaaactttctggtgtttcccatcataatctattcaccttgcagctataagagtctgcaaaatctacatggagcttgtggtggtggtgtctgcaatttctgtggttgtcttgagttttccttcatcttccttgttattttggctatgagcacttgatgagcttggtgacgtgaagctagactttactgtgtcatcatgaggcagagtctcgctcttggtagttttgttagaaccagggagagattcttcgtccttttctggtttgaagttcaaatctaattgaactttcaaaggcgaagcatgacgctcatgattctcactgttgttagcagattggtgaagtccattatcagaattcagttgctcgagcaacttgcgcgcattgtcttctttctccatctgcttcttttccctccgtagcaacagggaacgcctacggcgtttgttagtgtcgcagactgcacaagaacagcatcggtcgtgtttaggacctatcccacttggggattgtatgcaaatgatgcaagtacagccatctctatgtcgtgggtgctttgtggttgttggtgatatcaacagtccttcaacttcagtgcacgttgatctgaaactagagacaacacgatccaaaagaaaaaaacaagaagcagaagaaaatcaatgagcttttcaacacttggcaacacactctcggacaatgaatagtaccagtaccctaatttgattctaccgccattatctacgataagattcaccatttcaaacacctaaaagcaaagagaaaagccaataaaagcaaagatgtgtggtttaccctgcaacatcagtaggcttcccgatgattggagcctcctattttgacacgagaagcattacaaagaaataactcagtgaattgttatgttccaaaacaagtaaaacaggatttgaaaaacacaaaaaaaaaaaaaaaaaaacgatggttgataacaaaataacacggcacatcaatggtatcaactgttttaggtaagagcactctaagccgattaaccacacaatattttaaaagctagagacaaacaacttctagcacccaatgtgtatatgaacaacaggttatttttaatatcatgaaataatcttgtattccagaagaaacttgagaaactacagccaaatcctaaagaaacgaaaagagaataagattcttaatcggcatagaccacttatgcaaattagagcaaaaacatatggatgtacctcatactcctcaaactcgtaatcctctatcacaactctagatggagtgaggttgggaggaggcaggagaaatccttgagcttcttcccatgttagcttcagcaagttgtcgtctcccttttcaactttttgacgtttacttcttgtaatcatcatgctgcttttcttcttaccagaggaacattctactcctggggtttctttagttatataagcagacttcttaacttcaaacggtgaatgcctatcagccggatcagcctgctaatggaaatggagaagagatataatatatttgtcaagctaacttgtcaagaaaaggtgtagtttgattttagttacttcgcatactttgtaactcatttccatgcccgaataaacatgactactcagcactttgagaactaaccaaaatgggagacagaagagatgatgataaaaaaaaccatattcgaactgcatacttgtgaatcttgtccgacctatttaatcacttaacacaaattgaacaaagaatagagaagtagacaatgcgtattcactcattatacttcagcgtgttattcctggttgtgctttgactatactctagagtgcagctgacattcaggaaagcttttaaaactagccgctagtttactactaagttaagattgtaactatagtgaaccataagtatttacaattaaaagctatctagttaatttggaaagtcacctgatcagacgattgagtaatcgaagcctttctgaatcccaaaattaacttcctttctggatgtaatcc

SEQ ID NO: 22281 - DNA, 118 bp, Arabidopsis thaliana landsberg
ctactcgacacactgtgaagattttatatcattccctatcaattcgaatcagaatctgatttaaaattatcatgtgcgtaacatttgaatttaatactcatggcatacccctaaacat

SEQ ID NO: 22282 - DNA, 465 bp, Arabidopsis thaliana landsberg
tttgatagaaaaaatcagatcggggagcatttttttgtacggccgagctttctccttcgctgggagatttcaactgataagctcggtgatttttagtctcacaaatttctggatcgcagcttttaggctgccaaaagcttgcattcaggaaattgataaactgtgttctgcttttttatggtccggtccatctttgaattctcgtaaggtgaaagtggcatgggccgaggtttgcactccaagacaagaaggcggtttgggtcttcgctcaattgcagaagcaaacaaagtctgtgttttgaagctgatttggcgcattcttctctgctaaaggatcgctatgggtggaatggatcaaaaagtatttgttacgaacaggctcttcttggtcaatgaaagaaaatacaacttgtggctcttggatatggaaaaaacttttgaaatacagagaccttgcaatgagtt

SEQ ID NO: 22283 - DNA, 790 bp, Arabidopsis thaliana landsberg
gtttcgatgcgtgtcgaagctatgggagtccattattttccgtttagatttcaccgagttattccacaacaggtcctcgtctaatccacgtctcttaattggggttatacaaggtggtgagtggaacttcttctcgtcgcctcagcctcagaatcattatgggaagtcgtctcttgtagtagccgccgattctcatatgaagttttctgaagacaaacgcccacgttattatagctatgcttctggtttgctatatttccctaatatacgtatctcaaaccataatgacgatgtagtgcgtgtgatatgtaaccctagcacaggacagtatgcgatcttaccacctgacctgagaacaaggtaccgagactcaggcggctttttagggtttgatccgattggcaagcaattcaaggttttggtctttaaccgtagagtcgatgatgaattggtttatcatattttgacattaggaactgaaaatgtgaggtggagggagatcatatgtccctttacctatggacactatggttttagttgggaacatatatgtatcaatggggttttatattacatagctaaagaccctaatgatatgatggtttgctttgatgttaggtctgagaaattcaaattattacatctagccccatccttcgttcgtttttggtctactatattgataaactataagaataaactaggtgtgattatattggaagatgattatgatggtggatatctccttaagttacgtatgtttgttctagaggatttcgagaaacaggaa

SEQ ID NO: 22284 - DNA, 338 bp, Arabidopsis thaliana landsberg
gaagcaagaaattaccaacggtaaaaacagtttcatcaccaatgatccttaattcactactcaattctcttggttaacttagtgttgattctatgtcaaacttcagattccgacaacagtgaagatggagaaagcttgtaaccccttcctccgcagctcaaatacagatatccgtcgggctttacgcattccagaggccgcagatgaagcagaagctttagggattatccggaaagcaaaggatgatttctaagcttaggctttttctgaggtaaacctttggtttgcttatgtagtcctcaaatgagtgtgcaccctttgacatttgacgttttata

SEQ ID NO: 22285 - DNA, 473 bp, Arabidopsis thaliana landsberg
ctcatttatgatgataaaaagatgagtaaacataaaaagtaaaagcgttccttgaatacaagagtagtaaattatggtatacctcaacatatctgaggtccttgagaagcgcctcggacggggatgtaatagtttcgaatatatgactacgctgaagaacgaaaaccatgatcagagtaagctttcatagagtaataaatagagcttttgcggaattcatgtttgtaacaaacaacttacatatgtgtcaagaagtctttgaagctcactctgtactttacccaacataaacaagattctacctacagaagaaaacaatgttacaatacatcatagaaattctacacaggaaagtaaagttctataatacttactgctctcttcgtcgttatgaggcgcgatttgctccaaacaagaacccatttctcccaacgactcagagaactctacaatccaccaaagtacaacaataa

SEQ ID NO: 22286 - DNA, 660 bp, Arabidopsis thaliana landsberg
  unsure (1)..(660): unsure at all n locations
cgtctgcaatgcgagtccttcccaagcccataatttctgaaattgaagtgagtttcttcccgaatcccttaaagtttcaaaattttcaattaacttattctgatataccgttctagaaggtcaaactcacacatgtgaagtcatggatgttaagcaaagcacgtgtgtgttgtgagctggcaatgcaaatggacgttaacggcgatcgttattaacgtggttaacgtttactttctttaccttttagtataagagcaacatgttatgctcatgctttcattatcgaataatctggttgtaatctctctctagagatttctagatttccctcatcgttttacgcggagctctcgtcgagtctcttgtaggtgagaagttgatattgcgtctctttatgaacgttgtatcaagtgtgttaatcggagtactctgttttcatctctctgttctattgatttcaaactctgtcttattcatttctggtttacgttaacatattcctctttgtcttgtttctaccgaatcgtgtgagagtttcattttctatctctgatcatggcncaatcgatgtacgtntctacgaatgtgtgtctanattgtaacaaaaatggctacaggtatgaggtacaattgaccgctttgagcnnttcgtgtgtttgt

SEQ ID NO: 22287 - DNA, 3608 bp, Arabidopsis thaliana landsberg
tattagcgtataccatataaaagcaagaaagtggtccaagtgtatcaaccagctcttactgcttcgtctccaatatctttctcttctgctcgatggttcttaaatagttgcttcaaacctaaatcaagttttgtctcttggtaaagtttggagtattttcttttgttttgtactggaacaagatttgttgcaacttttcttttttatatattcaagtgttttggactaaaggattgatgaattggagattagacgggtgattattgattgtctataacatttgggcgtaatctgttataatttacattaccgttctgtttttggtaaagagaagatccacatgtccatcaatttttactgtgacattgtaaaaaaagtaaaatctgttaatctgtttttaagctgaggtgcagataaatctcttaggatagagaattcatgaacaagagttgcccattgcacaaattagcccaattgttaataaaaaggaagaaataaacaaaatcacaaaagtcatctaaactttgaagaatctttaccaacgagaatctcacaaaagttggaatcgtgcacgcctctcgagttatctccggctccgatactccatctggtggattctgtagaagaaaaaatttcaatctttgttggattttctgggaaaaactcagatgggtttgctctgaatcgattggaaaatcaaaccggtgtggactctgcaaagttggttgatatgaacagtcttgtgagaagaaaacaagttgattctgttcatcttatcaaaaacgatggacctcatcagcttgccaagaaactatccgccgttgatcttgttgctattggtatgagaaagcttcaagctttggccaattttgatcaaaattccttatgggtgttgattgtgttcctttcggtgttaatttgtcaggagttgggacaacaattggagcaggagtgtatattcttgtgggaacggtagctagagagcacacaggacctgctcttgctgtatcattcttcattgctggagtagctgctgctctctctgcctgttgttatgctgagcttgcttctcgttgtccatctgctgggagtgcttatcattatgcgtacatttgtcttggagaagggtatatatatatggattttaataggattgaccttgttgttcgtcttaaagctgatactcatggattttcttatttcataggattgcttggttggttggttgggcactggtgttggattatacaattggtggatcagccattgcccgtggcataactccaaatctggtatttgcctttgagttatatgtgtttggtttcagtcaagaagttaatcacttagctccttttctttcttttttcaaaactattctcagctctaattctcaaacccaagatgcacttgttgtaaaaacgtttttctttggaatataatttaacattattttcaaaaaaaaaatatatgtatttgtggtcttttgttgatttaattctgactggtgtttcttttgttttaggcatctttttttggtggtttggacaatcttcctgtgttcttagctcgacaaactatacccggggttggtattgtggttgatccatgtgctgcacttttgattatgattgtcacgatactactatgttttgggataaaggaggtactttattgaagacattttaaatggattcatttcaagattatcagatcgtctaatagtgttataccgggttattttgttcttacagagttcaacagtacaagcaattgtaacatcagtgaatgtttgcaccttggttttcatcatagtagttggtggatatttagcttgcaagactggatgggttggatatgatctccccagtgggtaattagcctgttctcttctccattgagcgtagcttttgtcaaaagttatttcttaaagtcaatgtttaatacttgtctttacaggtactttccttttggactaaatgggatacttgccggatctgctgtagtattcttctcatacattggatttgatactgtaactagtacggctgaggaggtatacagtttattgaataatactctcattctttttgatttattatccttctcttttctctacaaaggactcactttgacgattccatatagaactagtaataaaggatgatttttggtcttagtatagtgaactttttttccataattctggcgattttctctgttaaggtcttaaccttttggtattgccacaacaggtgaaaaatcctcaaagggatcttccattgggaatcgggattgcattactgatatgctgcattttgtatatgcttttatcagtagttattgttggattggtcccatactattcattgaatcctgatactcctatctcctctgcatttggagacagtgggatgcaatgggcagcgtaagtatgatacatctcttgacactcaaatttctttgtattaattagtcaagatgcatatacacatacttccttttgtctttgctttttttttttcttattattcctatatatttcaggtacatcttaaccactggggcaataactgctctatgtgcgagtttgttgggttcccttctggctcaggtactaaccaattctatcgttctgaaaatccaagttcaagagattttgtaattgagatatcttagtagtaaaagtaacatgctggttctgtgtgggttttggaaatgcttacatgtcgttttgacagagctttgtattttttttttattagccacgaatattcatggcaatggctagggatggattgttgccagctttcttttcagaaattagcccacgaactcaagtaccagtgaaaagcacaatagctattggtgttcttgccgctgcactcgcatttttcatggatgttgcacagttgtccgagatggtaagctggtatttgcctacattacatgtctcaagtcttaaggaaggattttcacctacaattagtggcaaacagaaaattgagggttcattattagtagtatagttttgatattgttgaagcagttagtattatataatttagttgagacacgcctaaacacactctattacggtaacagatccttctctgagtagctcacatcggtaatttatccaacaggttagtgtaggcactctaatggcattcactgccgttgcagtctgtgtgctagttcttagatatgtaccaccagatggagttcccctatcatcttcctcccaaactttgagtgataccgatgaaagtagagctgaaactgaaaattttcttgtggatgctatagaatcttctgattcccctctacttggaaatgaaactgctcgaggtactaaaatgtgctcaatcacgtagttaccatttggatatgttgtaaagatacatccaacaattcaatcttttctgccttttatctgcatttaagaaatatgacttttttgcttctttttaattgaacagatgaaaagtattttggaaagaggagaaaaattgctgcctggagtatagctcttgtgtgcataggtgtcctaggtcttgcttcagcagcttcagctgagcgtcttccaaggtcgtttcatctaacggaga

SEQ ID NO: 22288 - DNA, 266 bp, Arabidopsis thaliana landsberg
tgtgaatatttttattcaaatatttttaatcaataatattagtggtgaaaaacacaataaacagtttaaataaatatattttacttttgaaagataatttctacttacaacgtcattatttattatttttactgaatttaattttagttataaaaaaataaactcgtccatcggacggatccttatctagttagaatatatagtcatgtatatatatgtagatatcataatatagcttgtataattgtatattctgggtttgcagt

SEQ ID NO: 22289 - DNA, 762 bp, Arabidopsis thaliana landsberg
  unsure (1)..(762): unsure at all n locations
ttcaaacctaatgacagaaaagtttttgaagaggaaaactccgtcctcatctcacactgatttggatagtctacctagtgatccagctgaccggaaaattttcaaaatatcatcctaatgaaagaaatgaggtaattcgtagatatttgattagacgtccttttcaatctcgtggtcatatttttaagtagacacaaatagaaggcttatcgagacaatttaatcctgcttggtttggtaagtatcctatcttgttagagtatagtgtgaagaaggacacaactttttgcctttactgttacttgttcagagatagtgccggtaaaggtggaagaaatgctgcatggaccactgacggtttctctagctggaataagtttaagaacatcttcgaacatgtaggaggtgttaataattttcataacaatgtagccatgagatgtgaaaacttgatgagacaagagcagtctatcaaacaagctttgcataaacaagattgttggtgtcggatcccgcaccagagtccgggacctaccaaagattgccacgtagatgaaaagtaagcccacaaggagtaaggcccgtaagattcctgggagaaaggcaaattacgggcaaagtgatcacaccgcgaagtgggggcaaagtcgaagtcaaggacggattgggctttatcggttaaagggcgaggcccatgaaggtcagaagtcatccaaattcgaacgttngagcaatatattcaatgaccgaaacatacacatt

SEQ ID NO: 22290 - DNA, 612 bp, Arabidopsis thaliana landsberg
tactcaagttaagatttaccttgtcgaatatctcagaggttcgtttgtattgttatctattttccgattatatggcaagtgttgcaaggcttttattgaacagctcaagtggtttgctttggtggaaacatctgtgggaacttcgacatcaatgtttccactcgcattgaatgttctttctttgactcctaaaatatttgctaagtaaattgtccaacttaaaagggtttattaatgggaaatgtcaattcacacaagtaaatctatttataacttcaattttcaaaatgcgacactcaaacaaacatatatgttgatatacactaaccataaaattttgtatgagtttagggtttgagggtttgtgagtttagggttttagggtttgagggtctgtgggtttggggtttgagggttttagggacttagggtttggggtttgagggttttagggtttggggtttgagggttttagggacttagggttttagggatttagggttttagggacttagggtatagggtatagggttttagggtatagggtatagggtatagggtatagggtatagggtatagggtctagggtatagggtttagggtatagggtct

SEQ ID NO: 22291 - DNA, 526 bp, Arabidopsis thaliana landsberg
cgtaataatcaaatcctcctactctcaagatcaataaataggattttggccgacaaaagagtctacacgtgaacactctgagggcggtcttggctttagaacgttggaaaaatttaatttagctcttttagctaaacagttgtagcgtcttatccgctttccaaactctctcttgagtagggtcttgaggggagatactttcgttatagtgatccattacatataggagcatctactcgtccgtcttttggatggagaagcatcatggctgccaaacctcttattctatcaggactttggaggaccataggttctggaatgctaacccgtgtatgggaagatcatggattccaccatcccagcgcggccacgaagagcattcttgacataagagatccctactctatgtcaatgatttaattgacaaaacataaatttgtgaaattggacgtctcaaacactgatcgatccgttgatatccacttatattagggattcgccaagtcgtactacttgagtgatggtt

SEQ ID NO: 22292 - DNA, 734 bp, Arabidopsis thaliana landsberg
aaatctccctatttagaaggacatgtatacatatttaaattatttattgatgtcttaagtttttgtgaattaaaaatcaaagctcgagcctcctccattacccaaaatattggcaaatagcatgacacaataatgtatatcatgtgtttaggcaacgcaaagttcacaaaatgccgtcgtaaatcgcaaggagaattttacaccggaagggcaacgacttccatcacctacttactaaatcgccaagaaggaccttgactgacagatcagagagacatcgagattgccgaaaaagatgaagaagaagaatataattaagaaacattttgattgttcacatagaaacagtttgaaatttttattatcacctttgtattttcttggacttttcgtttagagaccgcaatttgttttttatgatattaagaaagtgaaaattttcattaattatttaatctagtaagtaattatatattcattttactagcatgttgtgatttatgaataaaaaacatcaagttgagtaatggagatatgcaattttaggcatgcaaatgcgtttagcaatttaatcgttatatcttatgaaaattttgaataaatacaagtttacaaaataatgtaaatactaaagtttagtatccatcaaaataaaaataaaatccacatagaaatcatttggaaaacattttggttgtatgcaatttaaattaaaacccattaaacaaagaaac

SEQ ID NO: 22293 - DNA, 553 bp, Arabidopsis thaliana landsberg
tcatctttacaattctgcaagttgaaaattttaaattcatgtagtctttgttgtcaatattcatatgatattagggtgcggatggttgggttcctaaaggtataatttgaaaagtaaaaaaaaaaatcatttaagatgaaaatttataaacagttattcattttttcaactccattttacattacttaaaaacaagggtgagttcaaaatatatatatggatgaacaaaaaaataagaatgtgtacgtacaaatttgttatttaagttaataagaaagaaaaataaattataaaccaaaaaatccttctttttagattaattacaaaaataccatcgataaaaaataactttaatatttgaaaataaatatataattatttgtttaacaaactaacatagtaaatttacatattatatgttaaataaatgtttatcaattcaaaattatgaattagtatttttatttatatatataaatatatcaaaacaataaaatatgataaaatatcatattacacaacgattataacaataattaccgtagaataatga

SEQ ID NO: 22294 - DNA, 2397 bp, Arabidopsis thaliana landsberg
ttgctttttttctttcagattctaatgagtcaaagaagatgaaaattataccaaaaccaaaaaagaagaaggaacatggtactttccgctcaatgttcacattaccgtacattgaaaatatatggcacccaatgtttttgtgaaaattaataaatagaaaaaaatattagccatttatttcaacaaataatttccattaagacttggaccaacatgttttagtgcttgaactctgtggttaaaaagaggtccaaacgcaaccatcaggctgactttgacaaattctacgttgactttaacatcatgtattttatatttttccttaggaacaagaaagaaaaaaaatagtcatatggacttggacgtttgtgattaaaccttaaaagataaaaagataaaatgtccaatgaatatcgtttaaccgttttaacttttaagtgttttctcaaactctcaagtttttctctaacaagtaacacccacgtataattttctaaattaccatttcagcaatatctagtgagttctaaatttcttcatggacttgatttgtcgattggtaacaaaatttaatacaaaaaagacgcaaatatacatgtcaatttcacaaggaaaatttgcactaatattaaaatatcgatattaataattgagtgatatgtgtgttatagcttttgggtcatgctaaggttgctaacttgtaacaacaatttagaaatagacaacccaacatatttatttttgagttttatgtttttgctcatttttaaagcttttttaaaagctaaacgaatttaattggtgactgatattttccatcgtagtttaaaactaaagagaatcaatttctaagattaaacggccaagcatcttagcaatttacaaatgtaaaataagattccagttcgtagccgtaaatgttgcataccgtctgttatttaaattaatttacccgctcttagctatacgcttttgttaaactagccgtttgaatgctaaataccaaaaataccataagaagtgaaaaacaaaacttgtactactgttattgcttataagttacaacagaaaaaaactcgaagtaattgactttgtactatctaccactgataacagaactagaagaaacccttgtaacggagaaagatgggactgagctcgaagccctatccgatgaaacatatccttcaaagttggatcctaaatcgcttcttgaagaatccgagtatccccaatcgttatcaatttcaggtacatcatcatctccgttcaaatacctaagcaccgttctcatggacggccgagacgtcggtctttgatggcaacagagcaatcccacaacaagagcaagccgtgcctcaacgccgtcgtaaccaaatccaagtctcggatccaccgcatggagaatctctcctctcgcgtgcaattccataacccaatcggccaagaagaatgtccctgagtcagtcggtcttctcccggagactatctctaataacaaaacgccaaacgcaaaaacatcagacgcagacgaagatttgccgttgcgtgctagctctggtgccatgtacccaattgtgcccacgactacggtcgtgttcgattgcgatccgcgttcgtaaagcctcgcgagtccaaaatctcccaacctaggattcatatcgtcctcaatcaaaacgttgctaggttttatgtctctgtgaatcacaaccttttcccattcttcatggagatacaacaaaccagacgcgattcctttagcaatcttaaaacgtgcgttccacgacaaaacaacaccgctctgtcttggtctactgtagagcagcgagtctaagcttccgttagggatataatcataaattaacaagagatcgtttttttgcttgcaccatccttgaaggttgaccagattcttatgccttaatctccccaaactctcaatctccgcgacaaattctcgaacaccttgcatgctatttggggttatcttcttcactgcgatttgatcagacgatgatctgatgtttcctctgtaaacaattccgaatcctccggttccgacaaccctattctccttgaatccctcagtagccttgtagaggtctctgtatcgaaatctgtgaggatgatcgatttcccaatcttctagaatctcttcttgctgcattcgttttttgtacatcatgaagaggaacagcaacaccaacatgatcgatataacagtcgataaagccacgataagagcgatgaccttaccattgtaacctctcttcttcgccttattcggaggcggaggaggaagttgggagatgtcgagcatagctgcaagtggatgttctccaccgcttgcgaaactccaacccatgacgtaatgagcactcgattgtccgtgtctcc

SEQ ID NO: 22295 - DNA, 675 bp, Arabidopsis thaliana landsberg
  unsure (1)..(675): unsure at all n locations
tgtccacccctcaccacctctaccataatactctcctttggaaaaaggttgaataccagactccatcagcatcatacgtctacaaatctccaaaaatcgaccatattactctctttttcttaaagtcacttacaagtctcctgcaccaccatatgtttacaagacgtcataccattaaattagaattgtttcattaacacgaaacataatttcaataataataaaaaattataaaaaagattctcttgatttttcctgattgtgtttttattgttcaactatcttaatttctggttcagttgaaatttaaaatactgtttacacaaatgattgaaagaaaattaaactttctaaaaattatatttagagattaacccatgtattacatgaatccaacatagtaatatatgaacttataggttatacacctaatcagcatgatcaaaacttaattcggtttagttttggatgaaattgtatgatttctattgataagataaatagattaaatntaagatataggtgtatataatatatagtcaaagataaacgtaaattaagtataatcatattcgagtaagaagtttacgataagatattgatatccaaagtcttaaaatatagatgttaacaaaatatataagatgtttggtgataacatagtatttttgcttg

SEQ ID NO: 22296 - DNA, 561 bp, Arabidopsis thaliana landsberg
gaacgcatgaaatcaagaatcttcatgttttgctccttcaaaactaagatctccttgtctttccactacaaaaaaaggatagattacatcaattaaatagtatcacaagtataaatggtacaagtttaaattacttataagcaaatgacacaaaataaataattaaacatcaattataataagtgatgtataaattaacatgtttagcgtcactttaatcaaattgatagaaatttgtattagtttgcatcattttaacaaattgatacaaaaatctgtatttacaccaattaaataaccgatgtattcacttaattttataaacatcagtttataaaaatgatataaaattatacatcaataagaagtgatgctaataagtttttctgtattttaatttaaacaaaaaactaacttgaatttattgtagatgacgagaaattgttattaccataaataaataatcatattgggttaatcaattattattaattcctatattttccctcaaatcagctaactaaatatatttgtttccctcactataaatcctgcttttac

SEQ ID NO: 22297 - DNA, 504 bp, Arabidopsis thaliana landsberg
  unsure (1)..(504): unsure at all n locations
ttgccagagttaaagaatttctagagaaattgtagggaaatgctaaaaataccagatcaattttgctaggcttctaatttcttatagtgtttaataaaaatagtttcatgatttttagttcaaattaggaattatagggtatttaaaatagccaagatccatacttctggaattttaaaaaataattaataaacccaaaaatcaccatactttttagataagctttaaatattatttagaagacttgggtaaaatttggtatgctttggaccatgtttggtacttagaacccaataccctagcccccttgccctatgaacttcactacagactccgaaaaccctagtttctcgnnnnnnnnnnnnnnnnnnnnnnnnnnnnnnnnnnnnnnnnnnnnnnnnnnnnnnnnnnnnatttcatgattatatatggctataactagagaacgaggaggaaatagaagtttgagaagcgaggacttcaccaccaccaccgnctaaagaa

SEQ ID NO: 22298 - DNA, 519 bp, Arabidopsis thaliana landsberg
gaagctaggtgttcactacacgcatcaatgtcaaaacctttacacctagtgcaaatcacaacatgttctacacaagatgttgatttactagctacttctagtttagcatttaagtcattattaacactctttaaagtagcaatgttttcatgacaagaagataattcactagaaagtacttcatttcttttaacttctaaagcataggatttttgtgcctctacaaacttatcatgctcatcatacaacaaatcatcttgcttttctaaaagcctatccttttcattcaaggcatcaatcaattcattgattttatcaattttatttctatccaatcccttgaacaaactatagtaatctatttcatcatcactagactcatcgtcactagaagaatcataagtgacatcattacgagtgattaccttcttctctcttgccatgaggaagtgtgacgctcgttggggaagagggatgacttgttgaaggcagtggcggcgagtccttcattgtcggagt

SEQ ID NO: 22299 - DNA, 609 bp, Arabidopsis thaliana landsberg
aaaacgagatttcaaatcatataagaatattaaaaaaaagttaatgtgaataaaagtaatttgtaagaataattgaagtcacaagaacaaacaactacacctgatcgatgtctggttgagattcaacctcctgcataaatgaaattctttcgtacgttatataatttgaaaaaagatgacaaaacatgtaataccaaaggaaaataaacctcttcattcaaaagtgtctcatcgtcatcttcataagccatatctgagagcaacatctaataaatccaaaccaaattttattaaaatgtcaaactactagaatgtgcccaaaaaatagtagaagaaaaagagaagtatcattttactggaatcaggcgtggcaataactcctttaagtcctttggttccagctgagcatcacaatatgcaggcctggcaaacaatagtatagttaagcaattttacaagctagaaaataatttgattaaaaaaaaaaacagaacaacagaaaaaaatcatttaccaaaatttacatgatgtaagagatacttcttcattgaacttttttaagacatatgccttatatgccatgaaattctggagatcaactgaaacaga

SEQ ID NO: 22300 - DNA, 1118 bp, Arabidopsis thaliana landsberg
atacttagcttcaagagctgctctctcctcaaagaattttgcttccatctcatcatattggttctgcaaaggttaaaatacaaaaggaatcagataaatttgctccaccaaaaactcattagacctgaacagccagctaattcaaaaccaatacaaaatccaagatcatctaaaagctgaaaatttactcacctgaatctctcttagaaactcgacacgcttcctgactggtggagtcaagttttcaaggacatcagagtgttgtccagccaaattctgcaacttgttctgcagcaaacacgtaaatcaaatcaggaaaagtcacaaactttcaaacaaccaaattaagatgcatagacaatcctcaaaaccaaagtcaaattctctaagccataagaatcaaatcaatttctcaaaactagtcaggaagagaaaacaatccctaaaagttacaaagatgaatagcccaatctccagatagtcatacgcaaatcatatcgtgaagaaaaaactcaccttaagagcattaacaagcccggcacgatcctcctcgttaagagctataagcaaaacacaaaccaagagaagcttttttcaataaatcaagagaacaaaagagaatccaggcctcgttttataggacaataagattataatatcttaccggtggagagatcggacatgttcatgctgtccttgtcgttgctcatcttcgcaagaaaagaatctggcggaggaagaggaaggataagaacccttaaaaccctagatttttggggacaaatacgagacagagaatatatatataaataactaaaagggctttgagaaaatgaccagaccgaaataagacacaactaaagcgaaaataacatatttttacatcaaaatttggcatgaatatttgtttttaacatttaagagcatttctgttgatttaaaaaaaaaaaaagcttttaagagcatttctattggttagaagaaatctaggttgcatggaaactcgccccgaggtctatttcccatttccgaaacgttacgaaaacagaaattctctggaaacatgaaaaacgtaacggaaacgcgttttctaaaaatttatgtttgaaaacacgatg

SEQ ID NO: 22301 - DNA, 594 bp, Arabidopsis thaliana landsberg
gaaaattttataatgtaacttatatgaaaattcaggaatatagagacacaattgataatgtcaagaagaatgaaggaagagaaaaggatatttctaacttaatttttttttttcgccgaacagtaatgaatatgaacaatcgctgttgtaaaaataatattggttgcatagatgcaacctatttgtttaatgaacatttcagtttatatgcaagaatactacaaaaaaaagaaatttattatcaaatgtatataataagttttattgcattcgagtaacaaataaataaaatcatattcaaatatacgtcattagatatatattttgtcttgtttgtacataacaaaaagtataaaacacacttaaacatatcgataattgtagtaatgcatttatacattttaaaacaacatcgttaccggcagagaaattttgattttttttttcttctatatattagtttatttttcagtaaagttttgtatataatataactatggataatataaacatttaccatgtgactagaatttccacagtgagtgtagctgtcgagtagcctattcaccatgttttccgaaagatctaagacat

SEQ ID NO: 22302 - DNA, 543 bp, Arabidopsis thaliana landsberg
  unsure (1)..(543): unsure at all n locations
gcgtccgcctgtccaccaacgccgcaccagcgagcgcgggccgctccaaagcgcaccggcaggtccttgctcccgtcctcgccacgaaagcgaggacagaggatggaatgttgcatcctagctgggcagcaacagttcgccttccccggcatggctggaggacacctcctccacagagctggaggatggtttccaccaccagaagctggaagaagaggtggccaaccgacccgtgcgggaggtagagccccagctcacctcgctctccgccccagcaaggatgatgaagatccttgaagctgagggcaggaccaagatcacagcctggctcgcttctccccaccatcgaactggtggtcaccgtcttaggtgaccaccggcgaggggatgcagccgggctgcctgatgaaaacccttgaagccgaacgatggctgaaaggtaccaacttccacgaagttgcgttcctccaaccgacgacaggcggaagaaccgcgggcgcccnctgtgggnggcctcgggttccgaggtcctcaaaacatgat

SEQ ID NO: 22303 - DNA, 899 bp, Arabidopsis thaliana landsberg
caaaagaagtggaacaaacaatttcgaattgatttgtcttcatcatattgtgctattaacattagacacgaaatagagcatctgaatcttgaattctatagaatctctaaaacgaatagacagatctccgcggaggaagtgaaattctctactcatactgcattcaaaattaattgagtttttcaattacattggaggtttatcctttgatactttcggtttggtgatttgaatgaaatgttggttttgacagaaaaatgaataacacttgcattaaaatcatcagaaattgaataacactagaatctaaggaggtgtattcgatcttatattttaagttatttgagtttttatataattttgattttttgaagaatttggatgaatttaaggaggttgttatgatttatggtaaaatcctctcaaattccacctcaaaccatgagatttaaaattatatatttttaattaagaaaatccacttaagtctcttaaagtcactaaaatccaatctttaaaatgttttaaataacagaagatttttaaggagattttaaaatcagtaattcaataacattagatttcatgagacttttaaaaattcataattgaataacataggatatgttagtttgaataagatatcctaggtgttaatttactatttttaaaaaggtaaggctttttttcatgtttttagaaaatgtgagagttttttacctatttttctattgaaatgaaatgtataaaattaaaattttgtttttaaataaaattattaaattaagtatgtcagaatatatatatattactatctagaattcacatattatcgatacagaattaaatttatttcttcctttcgtctatttaagcaaactagtcatttgatcgacaaa

SEQ ID NO: 22304 - DNA, 1863 bp, Arabidopsis thaliana landsberg
attcagatccattgatatatgatgaaatttaagcaaagattttttcttttttctatttatgattcaattctgaaacaaagtttttatttttattctttgttgcagctcgagagtgtaaaattatttgttgggcttccgttagacacagtttcagattgcaacaacgtgaatcacttgaaagctattacagctgggcttaaagctttgaagctacttggtgttgaaggcattgagttacctatcttttggggagttgttgagaaagaagctgctgggaaatatgaatggtctgggtacttggcagtagctgagattgttaagaaagtgggacttaagcttcatgcttcactttctttccatggatcgaaacaaacagagataggtcttcctgattgggtggcaaagattggtgatgctgaaccagggatctattttacagatagatatggacaacagtacaaagattgtttgtcgtttgctgttgatgatgttcctgttcttgatgggaagactcctatggaggtttacagaggtttctgtgagagcttcaagtctgctttcgcagattacatgggcaacacaatcacggtatgatttcacaaatcatctttgtttttgcacttacattctgagtttaactactctggttttaagtttctgattttctgttcattgctttgcagggaatcacattaggtttgggaccagacggtgagctgaaatatccttctcatcaacataatgccaagctctctggcgcgggagagttccagtgttacgacaaacacatgctttctgctcttaaaggctacgctgaatccactggaaaccctctttggggtctcggtggtcctcacgatgctcctgcttacgatcaacagcctaattcctcttcattcttctcagacggcgggtcatgggaatctcagtacggcgatttcttcttgtcttggtattcgtctcttctcacctcccacgcagaccgagtcctctccgttgcttcatctgcatttagcgggattggagtgcctctatgtgggaagctacctctcttacaccaatggcacaagctaagatctcatccttctgagttaacagctggattctacagctctaatggtcaggacaggtacgaggctatcgcagagatctttgcaaagaactcttgtagaatgataataccaggaatggacctatccgacgagcaccaatcacctgaatctctctcgagccccgagtcattacttggccacatcaaaacttcctgcaagaaacaaggagtcgttgtctcagggcaaaactcatccaccccggttcctggtgggtttgagaggatcgttgagaatctgaaggatgagaatgtaggaattgatctgttcacttaccagagaatgggagcacttttcttctctccagagcatttccatgctttcacagtctttgtccggaacctgagccaattcgagttgtcctcagacgatcaagcctcagaggctgaggttgaggccgagacagctagcataggttcaggcactggtgcacctagtttgcaaaccgcttaatgaaatgcaaaatcataattttttatgtaaataagaaaagtctcctgttgttttagcatttatatagaatgtcatattactgtaaaattatttgcaaccatttcttcacaaaacataaatcctgaagcttaagacaaagaactcccttgttttggttcgagtgatggctcaatatagcaatagagttgattttcttgcaagatcacaatgtacaaaaaagctacaaaacaaaaggaactgtaacattatcaaacacaaaacaacgaatcgttgttttttaaaaagaacacaatttcaaaag

SEQ ID NO: 22305 - DNA, 440 bp, Arabidopsis thaliana landsberg
caagactctgaaaactatgcccttcgatactccaccagtttatatctccaatgatcgacagttgcaatgttatctaggtttgacgaaattcgagcagctacgtctctgtgtggagtttacggcgaaagattcaagtgatattagtcggaaggacggatcaagaggaaggggttcgaaacgcgctattgcatctgactcaagagcagaatctagattcgaagttctgggttgggggtttgaaggtgtttgttacgattatcaagacgatgaagcaggggacgatgaagcaggggacgatgaagcaggggacgatgaatcaggtgtcgatgaagcatctaacaaagaagcaagtgacgaagaagaagatgatgaattttctagccggtttgattttttcgacgactccgatggtgcctcatctgatgttgaagactttgttg

SEQ ID NO: 22306 - DNA, 1207 bp, Arabidopsis thaliana landsberg
  unsure (1)..(1207): unsure at all n locations
tggcttcaccagtagtgctccctcttcatcttctactgtcactcccacaataccaatcacttttcttgatatcgtcagctgcattttctccgaaactcactctcttctcctactcaggttccaatccacctcttgtcattttcccagattcgattttcctctgcttgatcgtgtttttccaatttcatttccacctggttccaattttggggctttgttaaaaatggtgatctagatttccgattttggttgttttacttgaaatggaaactgagagaactcctttctttgatgtgattgtgatgctgcgttgaatttatctttagttttttttctgttcattcagatttttctataaattgggttatttagaattgaactagacaaaacctggttaccgcaaaaatcgctggtagaaacttagagatctgagcctatagttagtggtcctctttagtaatacaaatggctgagttactcacttctggctgctagccttgtagttgtcggcataggtctttgatgctgtttctgatttgtggtattgcccattgtttcacctgtcacaatctttaatctgacgaggactttttcttcattattttaatcttgttatgtctatatacatgtgaagcagtatgcatttggctcatttctcacttcttcctctcctgtttctctaggatttgaacttcttacgttttgaacccggctgctcagagtaacttgctctggtttttctttaaatcaccaaaatgggttcgagatacccatctcatcagctcagcaatgggctatttgtgtctggtcgccctgagcaacccaaagaaagggctccaactatgagtgcagtagccatgccttacactggtggtgatatcaagagatcaggagaattggggaagatgtttgatattccagcagatgggactaagtccaggaagtctggtcccataccaggtgctccttcaaggtctggctcatnnnnnnnnnnnnnnnnnnnnnnnncaggtgctcctatggccactggccgtatgtctggctctttagcttctgctggctctgtttcaatgaagaaaacgaattccggaccattatctaagcatggagagcctttgaagaaatcatctggccctcatctggtggtgtaactcgccaaaattctggttctattcctattcttccagctacaggtctcattacctct

SEQ ID NO: 22307 - DNA, 932 bp, Arabidopsis thaliana landsberg
ctgcaggtcgactctagaggatcccccttgacaatttggagaagatttctaaaccctattctcatttattcaatttgaatcatgtctactttaatacctctttgtttcatttctattgcaatgtgtgagtaatccaccagttaggtgttagggttctaattatgagattcaatggatttaatggaataattggtatttggaattcttattctctgggttctttgatttacatgttcttaatgctagaataggattgatcaccctgttttagaactgaggttttttttatgcattaaaagtgttcgatacaatgcctgaaagaatgtgaattgagcaatgtatttctagctaacgaaagttgaagttaggacgcattgtgaactaaatgaacttgtttgataacgcaaatttgactaggaaattacatgcgaatgtttagtaatcgagtagtcaaattacatttcgtaattgttgaattccttgtctcatgtttccattgtttattgttctctgaaatatcctaatgcctaatgtctttaaatctcgaaagttaaatcgtttaatttatatgcatttttatttacaatctgataactcaaacaaaaaccatctttccgctttagctaagaacgagtctcggaaatctttaaagtatctttggtccttgtggatcgacctcgaatattctacttcggttagatatttcgggtaatcaatcaagttggcgcagttgccggggaccaattacgttacctaaggatttaggattagtttttagtctaaagcatttttatttactaatactgatattcatttccgtgttatctttggtgttttcaggtgtatgacccgtaacaaaggctaatcacatctagtaaactaccacgaggatatcggaaggtttgaaagagagaacaagaaaaagaaacagc

SEQ ID NO: 22308 - DNA, 307 bp, Arabidopsis thaliana landsberg
ttttaattgctttcattcttggtccccctctttgccttaattcttggtcccaaatcaactaaaggaccaagaaaataacttataatcttctcaaacagactctcgcctaacacatcctccactttcttatccaaactccaatcagaatgttgtagaaccgtaccctattgaaatcgattcgtcaccttctttatagatctgttcaggtaaggtgaggatttcactctctgaatccatctgcgaaacatgtacaaaataaatcagattagaactgaaatttagatctaaactattatcagatccacta

SEQ ID NO: 22309 - DNA, 394 bp, Arabidopsis thaliana landsberg
tcagaaattggaatggataaatttggactccatatgaattttctatgatttatacaagttcctacattattttcgtattaaaaatgattttaaaatgaatttccctgattttattcgctaactggtcggcgcgtcatgtgcagagaagcccaggggctaacacgtacattttctaagactcagtgaacatcgcccatggacggcgggttgatttttaagaaatccaggggttctttagaaagaaagccagggcgaaggggtatcgttgattcagagccgtccgatcctggatccaggtactagattagacgatgaaggggtacgcgatataaagcctcggatccagatccaacggtccgtgttttatgacagcaggacccgacctgatccacac

SEQ ID NO: 22310 - DNA, 480 bp, Arabidopsis thaliana landsberg
aaatttcgctaaaagtattttcagaaaaaaaaaatagaaaaaaagaaaaaaagtattagtggacttggtttttaatatttttcattatcaatcatggaatttttactttacaccgaagtcgaaactctactctggacgataaagtgtatgattggtgccgacaaccaagatgtagccttttttatatactgttcagacctgatgaagatggttttttcctcaaccgaatagtcggcgttttcagcatatttggaggattttcagagcgacaaggaagaattcacaagcttctctttatctttaattttttataatgcaaatgttaaaacggacaatttggtacgaaaatttgtactaaatcgttttatgtcacttatgtaaacaatatttcgcaagattgattcttttgagctcaaaacaaaaccgatgacaaaaaaaaaaaaaaattatggaatttctaagagaccgaaacatttactt

SEQ ID NO: 22311 - DNA, 556 bp, Arabidopsis thaliana landsberg
gacaaacaggtacaagcaaacaaacatatgcatatgcataagaactctacatcatataagataaaatgttataaaagtgagcaatataaaatagagagcgcctctacggttacgcgaggaaaagaaccacgatagtcgaagctacggtcgaggggttagcgcgtttacgttaaacaagtactaattagaacatccaattcaacataattatattaattgatattaatcaaatgtaaattaatactactacttagttttgactaacttactatattaatagttgacagttaagcaagtaacttaattaatatgagcgattctaagcgagacgaattaacgacgcacgacgtgcaaacacgatgtgcgcaacgcgtggacacaacgacttagcgcgcggacaacgtgcgatacgcgcgaacggcacgcggcaaggcgcgcgacacacgcgaacggtacacgacaacgcgtgcgaacaacacgcgcgacactcgcgaacgacacacgacgacgtgcacgaaacagcatcgcggcacacgcggaccgacatgcgaaacta

SEQ ID NO: 22312 - DNA, 879 bp, Arabidopsis thaliana landsberg
cagtctcatacgacccacgagtattacaaccaagcttcagttttattggacaaaggcggtgcatacaaagcgtaggaacgtgtctcggaatcagattatgggttcaagaagttgaaatcactgagaatttccttttattagatttgaccaagactgacgtggatgtgattctagggtatggtggctctcaaaacttggagagacaatggttaattggctgaatcaagatttctccttctttcacaaccaacaatgggtcactctttgtgctaaggacaaagaacttgagcaagttactacaaaagtaaagatgaagagtgaatatgagcaagaaaaaattgatcactaccttgaagacaaggtagttttaaaaggggggagtaaggttatgtggggaggaattgttaaggatataccatggaaacagaaaatgagtggtgaaagtcttgctaaggaaataccatggaaacagaaaataagcggtgaaagtcgaaagaatttttcagagattatgttgaaagtgtcagggctcaagagtgctcaaaccattggaaactatggcggattagaggcgcaacagggtagtctaggagtgatgcccatgggttacaagggtgttagagagaagcaagaggagtttccattgaggcttatatttatcggggaagcgggtcaatcgccacggccaccagaattgttttgtggtaaagtgttgggacaagaggtcgtaagagaaactaaagaagctgcaattcgttttcaaaaacacaaaggagagaaaggtggtcacctaaacttatggttaatgacgaatggagggaagtcttggttagaggctggaatttgtttaaaactgtagaacggagtctttgagtcgtt

SEQ ID NO: 22313 - DNA, 771 bp, Arabidopsis thaliana landsberg
  unsure (1)..(771): unsure at all n locations
tgaagaataacgagagagcttcacggaactcataatttcatttttcaatggtgagagcctcctaatgggaggggacggtgtttttaagtataaatcttttgaatttgtaagatgagagcttctgatttttttgaaagatttttcatagtccaatggtaagtctcttttaaaagagttctctggaaaaaaaattattcacaatagaagaaatgagaatcatagaagaaatgtctaacatgagaggctgagaccatatattcacaattccttaccatgtgaaagcaagtaaataaagaggaatgagataggagagaatagaaatgcagtagacttcttgacaaattaaaacataaaggtcaaggtcaatagaaatgtaaaacaatatgtggaatgttccgttgtatggttccggtcagacatgatattactctgttggaaacttgctgcaggaaataacaacatatcaggttcaccactaaatgattgcaaaggaagatctatggaaagtacatagatgcaccaacaatctaaacacatggccatcacctttccaagcttgtaagccctcttcacttagaagagcagaaccaacgaaaatgagttccttcactcagagtataatcaaccaaaatgagttctttcactcacttttgagaaactgcaagtggtacagccagacaaatacccacccaaatggattatccncttgagctctctctattagccatcanaagtgatattagtcagatacaaaacacccatanaggaaac

SEQ ID NO: 22314 - DNA, 612 bp, Arabidopsis thaliana landsberg
tgaaacacccgaagaatcccgagaaacccaccatgagtgaggaaaaatagattcatttaaatgctagagccaaaatttgcttgtatgaatctgtcacacccggttttggaaggtaaaccgaatgcgaaccatgtacgtgccaagatcagaactcacgtacacagcgattacataattggacatcatcacacaatgctcgaattaaataacggaaaggtacttaattacatccatagagtcttatacatattccatagtgtttaacattaacatcaaagtgtggagtaaagaaacgtagaagaaaagcctacacaggcagctgactaggggtttgccactaaagtaaactagaactcgtcgtagtcctggaactcctcaaagtccgccatgttgccagcttcacctcctgagcactgagtacagtggggacaacctagggtggggtggtttgtaaagcaagggtgagtacacatcaacgtactcagcaaatgtcccatttggctaaagtggactagctgtatgtggagttaaggttaagtagttgcttttagttggtcaagttttattactataagtagagccaagttttagtaataaccagttattcccaga

SEQ ID NO: 22315 - DNA, 2253 bp, Arabidopsis thaliana landsberg
actataaaatattgtttaatgaaattttgtctaatataccaaaataataatatttagttgtgaaatttatttttaacaacattttgatatattggatatttagagtattttgattattttgagtctaaacataattattgagggtctatcattatgatgaagggtactgtaaccattactttgccagtattttggatatacattccgtgactggatattgtgattacccatctgatttttggttcgatatggttctgctgtactccggatagggaatttgagatccattgatatattctataaactatattcagatttggtacggtttggttcgattttagttccggttattttgcccatttctaactgtttacctctatattttatattatcactttccctcaaacaaatatattctcctaatgatgatttgtatcctatctaatgacggcatttggttgacaggtcggatcaattgatggagttaagatcagagagaattacaaatagaagagaaaaatgaatttgaaataaactttatttaagtgaataacaaatctgaaatatagaatagagcaatagctctcctagagaatgcacttctctccaacaacggcgtagccgtccaatagaaaattgtaaaacctaattccttgatgatcgtcttttttctaaagagtacatatttaaagacatctcctaaacgaacaaaggaaataacaatataatcttataacataactatagaaaatagcaacaattaatagcatatcacgtttctccatccgcaaccaaggtccctaactcccaagcagactttagtcatagttaacgttttctacacaatataataactatatatttgttatatttgagaaccattcgaaaaatcttgtgtagtataaggatgtcccagtctcatgtctaatgagtatttctaaccttaacaacttgaagatggtggctgatcttatcgtgatgtaatggagtctggggctgtaaaagaattgggactttgttgggttgatttccgaactaattggtttaacttctcatacaacgctcctgggacgactgtttatcgagtcgtgaaggtgaacataactttacttcatcttgttttcgaaaatacaggattttatatacatacatttatgaattgacatttacatttttttggcaacaaattgatatatacatatgattcttaataggcacggaagggagtagcaaagttgcttaaatgatacaattcaactagatatttttaagacgaatctgacaatattgtacattaccctaatatctaaatatttcacatgcgcctatcttatattagacgagtctgacaatattgaatgcctattgtcaacttgggacgtacacgcttaacgagttttttttttcacgttctttcaaagcgacaacgtatcatttttgctaataaaacagagcatgataacacatggattcattataaaagattactctgtttcatttgcctctgcactttcatcaacaatggcagcaatgatcacctttgactttcaaaacagcttcatcttcatcctcttttttctcttctctctcctttgttactctctcttcttcaggaaaccaaagggctcacgagctggccgtgatcttcctccgagccctccttcttttcctgtaattggtcatcttcaccttcttctctctgctcttgttcacaagtcttttcaaaacatctcctctaagtatggacctcttctccatctccgcgtcttccacattcccatagtcctcgcctcctcggcctcagtggcctacgagatcttcaaggcccaagatgtgaatgtctcctctcgcggtcacgctccagtcggggagtctctctggtttggatcgtctagcttcttcttcgctccctatggagattactttaaatttatgaggaagctcatagccacaaagcttcttggaccacaggcactcgagcgttcacgaaaaatccgtgcagatgagctagatcggttttacaaaaccttgcttgacaaggcgatgaagaaggagagtgttgagataggtgaggaagcagcgaagctcaataacaatatcatctgcaagatgatcatggggaggagttgttcagaggagaatggtgaggcggagaaattcagacacttggtgatcgagtcgatggctttgacaaagcaaatcttctttggtatgatctttcacaaaccgcttaaaaagctcgggatctcactt

SEQ ID NO: 22316 - DNA, 538 bp, Arabidopsis thaliana landsberg
  unsure (1)..(538): unsure at all n locations
ggtcgccctaaggactatggagccctactcttaccttgaccttagagttctttcaaaagttggtcaccttgtccaactctatgttatcaacttatcccaaaaagttttgtctcacttttctttctgtttactttctggtctcctagttctgctcttactcttgtgcttacgatgtcttttatagatggaccnnnnnnnnnnnnnnnnnnnnnnntctgtgatcccctttttgccttctcgcctggcggagcgtccactgcatcgcacggtgcgaggtcagtccagtcacctggagagactgcatcgtcgcctgcacgaggagcaggagcgcagacgccaggagcaggaccaggagcagcagaactcttccccctcacctcagcaggaggtggagtctgagaggccgccctcccctgcacctcagccagagatgcccnctgcaccaccatagggcatcccggctgcaggaggagaccctaacggagannnnnnnnnnnnnnnnnnnnnnnnnnnnnngacacggagctcttagaggagc

SEQ ID NO: 22317 - DNA, 597 bp, Arabidopsis thaliana landsberg
  unsure (1)..(597): unsure at all n locations
tgttttttcgccgactgcaaaaacggtatgtatgtaaagtttcatgcatcgtaaagaattgaaccataaatagcttatatattatattcaaagttataaaatattacacacattgttcaacaaatattacattccaaatatttttacaataacatctaatcttcccttagaactacttctgcaccttcatttagtagttgatcaacaactttgtccatgatagctttggccatttttctgatttcgtcatccccctttacgttggggtccgctaatggctcggcgggctctgagggaggagagagtgcggctgtgttacaaagtgtaaacaagctcgaaatcaaaaagttacaataataagccaacaactagtagtcgatacctatttgcccttcaagatccgcacttttctcaacggcctctgctacttttctagcgtcatgaatacctttttcgcttctccgtataatttcttgagccatctcgcggccaccattttcccagatgtcggtgaaaaattttccacgaccaagcttgcttcggccgaggggtctttnnnnnnnnnnnnnnnnnnnnnnnnnnnnnnnnnnnnnagga

SEQ ID NO: 22318 - DNA, 637 bp, Arabidopsis thaliana landsberg
  unsure (1)..(637): unsure at all n locations
tacttacaggatcaaggttttcaagatttaggttagcaccaacatccaagctcttcttatcttgagatgcctaatacaatttccatcaagaaaccaaatctgttagaatcaaaactcacaaaataatcaaatttataagatacgatttaatacctttttaacacgtataggctccccatagagcttaatcatgttaaaaaccttaattgcctacacacacaaaaaaaaaactgaaatttgttaatcattgtacccaaaagaagtctataaaaaaaactcctcacataaaggaaaatagtaacactacttacatagtcagcatcttcctcattatggaattgaacgaatccaaatttttgttgaataaagacgctaactgatacaaattcaaaaaacagaggagataaataagctaatgtaagaaatatgaaccanaccaaaccctaaaccattcgaaactaacgagatacattgatattaacttaccaactcatccggcttgtacaaacaattcccaagcaaatcttcagaaatctaaaaataccagaaagagatggtcagttcacataatcattcaaccataaatactttcttacgactagaagtgccataaataagagagggcctgaagtgatgt

SEQ ID NO: 22319 - DNA, 548 bp, Arabidopsis thaliana landsberg
  unsure (1)..(548): unsure at all n locations
ggccttatctcttatgggccttccatgtggcaatctttggttggtcccggacttccggtgcgggatccaacaccaacagtctccattaaggaaacctctgttatgtctccgatagcttgatctctccatgccaaaaatctatctctccaccccagagaggggatccacgctaagaggggatctccatgatattcaccggaaaagtcgccggagatgatggtttacttggcactgaaccttccaatttacccaaatcttcagaatcctcggacctttttctgccaattgcaaagctaactgcacaacaaactataaaaatgaataaaccaaaaggaattaaaatattcattttgtttgatttgtttcaaaagaaaatggaaacttatggtttgacagaaccgaagcagaagtcgaaaagattctgaaacactgcaaaagtagaaaaatcnnnnnnnnnnnnnnnnnnnnnnnnnnnnnaacttacatccatcctcgcaaatttcccgcattattgcgagggaattgttgttcgtaattttgcgatgaat

SEQ ID NO: 22320 - DNA, 603 bp, Arabidopsis thaliana landsberg
  unsure (1)..(603): unsure at all n locations
gaaacgtgtaattaacagcttcatttaaaaccataattcattcgtttatgaacgactcatctaaaatgctttggcatgtgaaagtaatcactcatgcggcgcaacaaaaacgacgatgagtcatctcaggagcggatctagaaggtaattttatgtggagcatcatttatataaatagtattaattataatttaattacctaaattgtatgtagattataaaatattcttacaaaagtgacggtttggagattcgaacttgggttagtataaggcattgcttgctgaaaaaccatttgagctaactgtaatataatgaacaataacaacttatataatatttagtagatttaatatggggcacgtgctccacctagttgtaacgtaggtccgccactgagtcatcttgttaaattttgtttttactaatttaaaacaataaaaatattcatgccctcattttctcattaataccacgactttatangttatagcttatatattagtaatgatattaatcagctcgttatgttgctacttgctaggtgtcatgggtcatcatacaatatattgatggaagattgattgatttgaatctataaac

SEQ ID NO: 22321 - DNA, 567 bp, Arabidopsis thaliana landsberg
  unsure (1)..(567): unsure at all n locations
gaagacggaagatgtaacgatttgttgtagactgggaaatgattcagacttgtgtgtgctatttattccatggattttttgatcgcctactatgaaggcgatgtnnnnnnnnnnnnnnnnnnagttttgatcaaagtcgaatatagagagactaaatatacaacaacaacaaaaataaaataaatcaaaagctttaaattcacacacacaaatttcgatagtagctatggatttaagacaagtgtaagaagaaatcacacacatagtagttttcaacgtaaggaggatgatgaagatgacattattgtatcccacaattgtcacccattttttggaaacagatgacatatcattaaacgtttggttaactacatacaaggtgaaggatttacaacaaatgtggttgtagtatagcggctagtatcccacgttgtggccgtggggacccgggctcgaatcccggcagccacactttttgttacctcttctttttatttccagaaagggtattttcgacattacagtaatcacgtgatcattagatctggaccgttcattttacccccg

SEQ ID NO: 22322 - DNA, 595 bp, Arabidopsis thaliana landsberg
  unsure (1)..(595): unsure at all n locations
tattcttaggaaccaccaatctatcttcaaaccacaatatccccttccgtcttggcaaaaacacttatacttttccaacctctgatgaagattctccttgatgatttgcattcccttgtcactgagctaggccataattatctggtcttgcaaggttggctcaatggagatgtgagacaaggtaccagaaggaattactttaatcttcatcttgctcaactcatcacacagggtattgatgcgagaatccatcatcatgcaattgcattgtgacttctgactcaaggcatcagctaccatattggctttccccgggtggtagtgtacttccaagtcgtaatccttgatcaattctagccatcttctctgcctcatgttgagatcagcctgagtaaagatgttcttgaggctcttgtgatctgtatagatgttgtagtgggttccatcaagtagtgcctcacattttaatgcatgaacacagctgcaactctaagtcatgnnnnnnnnnnnnnnnnnnnnnnnnnnnnnnnnnnnngatgcgtagcgatgactcgattgcttgaatcaacacacccagtcggtgcagacgacaaaa

SEQ ID NO: 22323 - DNA, 295 bp, Arabidopsis thaliana landsberg
agatgtgttccaatgtttgtccatgtttggtgtgatgttcatttgtactttccaaatgtattgaatgcatgctcgctttatttagacatcgagcagtctgagtttcctgagtgtgttgttggagacctccctgagcaacaacctggtgaaggtaagtgtcctccaaacctactatgtcctactatactttatgattctctgtcccacattactttattgaaaactaaggattgactagtttgtatttaccttcaccttgtttacctttttgggttaatcatgattagcttatgct

SEQ ID NO: 22324 - DNA, 212 bp, Arabidopsis thaliana landsberg
aaatcgatttgaaaaatagctgaaaaacaagaagtagggtttctggccctggggaccggactgtccggtgcacctctgccaggtggggccaggttggccagggaagagccttcccccacgcagaaacccgagagcgcaggtttcagagttgaattatagtggtgcaccggacagcgcaccggacatcgcaccggactgtccggtgtgcaccg

SEQ ID NO: 22325 - DNA, 492 bp, Arabidopsis thaliana landsberg
  unsure (1)..(492): unsure at all n locations
ctttcttgtaaacccattgcgacagaccctaaataaggggaaaagagtgcaacggtcatatcccctctttatggtgactcggctcgctgatctttgagccttcttgaatcatcattaggcttcttaggattattttgctagtgaataattaaccctaggccttgtgcctgattgagactccaattgggcaaaagtcctccaaaatgctccttatcaatcgctttattaattaaccctatgccttgtgctggtttggtatgctcccggtttggtttgnnnnnnnnnnnnnnnnnnnnnnnnnnnnnnnnnnnnnnnnnnnnnnnnnnnnnnnnnnnnnnnnnnnnnnnnnnnnnnnnnnnnnnnnnnnnnnnnnnnnnnnnnnnnnnnnnnnnnnnnnnnnnnnnnnnnnnnnnnnnnnnnnnnnnnnnnnnnnnnnnnnnnnnnnnnnnnnnnnnnnnnnnnnnnnnnnnnnnnnnnnnnnnnnnnnnnnnt

SEQ ID NO: 22326 - DNA, 485 bp, Arabidopsis thaliana landsberg
cccgtccttagtggactcctcaacggggactaggccttcgagggccgaacctcggtaaaacaaatcacccgtgtcccttgtgtttattgcttgtgatttgtttgttctctcactttctaagttctcttgcgctactctttgctaatattattttgtgttgcttcaagttaaattcacatttagagaagcaactccttgcaagaaagaacttgtgtttcttctcttcttgtataaagccctcttgcattattctccacttctagtagtattgctattgattaaattccacactcttgaaaacaatactcgttgcaagcaaaggacttagttttatactccgataattgtgaatcttgttttaaccattaatcaagggatctagttaggatttagaattataattttcaggtttcactatccaccccctctaagcgactttaagttagcaaagatcaatctaagaaagagtattgctccttgccaca

SEQ ID NO: 22327 - DNA, 596 bp, Arabidopsis thaliana landsberg
  unsure (1)..(596): unsure at all n locations
actcttagattgtacaatatgtcagcataataactccgagatacgagtagcaaggaacctgattgtgtagaataagtatcatttcttaaaggtcgtagttccaaagttgatatgaaaggtgtagttgttcctgtcttgacaaggcaaatttgcaaggagtttgactttgccatgtgaataatctcattgtcttgtgcgccgtatgcatccatcgataaccacaaattaaccccaagatatacatcaaatcttggatgtctattaaggccatcatagtttccatagacaaacccagctcttattagatagttgatcccttggttgacttttagattataacagtttcgcgttccatctgggaaatatctcaaagcattatactgtttataggtatcccattgatccacgattctaccaggctttccacttttgataaaaccagcgtcagacgagaaatttaattttgttgttggttcgatatacggagactggttaggggttaatccacagtccaagctgatgaatcctgaanaatatacaaaaatgatgtctgacaacaggagaaaaatttcaaatattatgaaaaataaacaatg

SEQ ID NO: 22328 - DNA, 580 bp, Arabidopsis thaliana landsberg
  unsure (1)..(580): unsure at all n locations
gattgttatgaaatccatatattataatattctaaacttttcccaccatttaatccagttctgtttatttaaaaattattttttcttttttggttctaaaaatttttattaaaagatttataattcaaatcaatttaaaatttttcttttgaaatggttatttaattttatagattttatttattatatatattctaaacgttttttgttaaatattttaaacattttataaactttaaatatttatctttaaagtttattatctttaataaaatataatattaataaaatcttaagatttctcctttttagatttaataaagtataataatatataaataaatgctaataattaaaaatattaattaattaataataattaatatgaatagtttttttttgtaaataagttttaatttgagaatttatttgttaaaatggctgaaaaatgtatatataaatattttaattttcagtacagcgtgacacanaacanaagaataattcttacaaaacanaaaatgaaaaatctgtgaagcanaagtcaacgcagagcgaggatcatattctaataaaagag

SEQ ID NO: 22329 - DNA, 539 bp, Arabidopsis thaliana landsberg
tattttatttttttgaattatccttttgtttagattgacactgaatcttccgaggcggctaactatgttttcagcaactcgtctatcatgacttctaagagcacttcaaagatcactaaattgactccaacgtcaaaacgagcactaacttcatcgaaagataatgcagctcaaaagtcatctacaaagcctaaattgttgtccaaggctgagataaagaaagaaaaaaagtgatcatgttacgacctattaaaatatgtttcatgtctttgcttcaagtatgtaaatgtctttctattatttatgtttcacgtctttgatttaagtatgtaaatgtctttgcattatgtttttgcttaagtatgtaaatgtctttgcatttaagtatctaagttattttacaccagttatttgtcctgttaaactcatatgaatggttactgtatttatttttattaaaggcatcttcttttctactatcatatcaactaatttgctgctttaataataagtggcggtttaacttagaattaagccct

SEQ ID NO: 22330 - DNA, 502 bp, Arabidopsis thaliana landsberg
ttcccttttaactaaagaggacaagttttatgtgtgggttaagctcaaagcaggttcttttagttggtcaggtatttattactagttgaaagccaagttttagcaataatcccaagttattaacccaaatagtactccctccaagaggaaataccaagtaccataaatataatcatcaccattaagcatcatcataaaagtattccagagtaactctaattaaaggagctcccaaggttgctcataaaggtgagcacgactgatatactagtttctaacactctgcggaggtttcacactttacccatgaatcgtgatcccttcccatcctaggttgtatagacctgatcttcactaccgaggtgaatggctagggattcactacatagcctttacaaagattcccctggtctgtagttgcccattaggtttctccagtcatacaaacaaagtactcctccctaaggtgggtgactaacaagaccaaatcgaatgaacctcg

SEQ ID NO: 22331 - DNA, 430 bp, Arabidopsis thaliana landsberg
  unsure (1)..(430): unsure at all n locations
tttcaatgctggggttcctacgatttttaagacagtgtctaaatgaggtttaaacatctacaaattttcttaagctcagctcaaaagaaaaaactaatttttcttatttaaacaaggtttagtaggtttctgtttttaattttaaactctaaaatttagaacagaaagcatggggttcactatttttaaatgataggtcataatattccagagctagcaaaattggtttgacaactttcgattaatatttcatcaagttatggattttctaagttctctggtcattttaaaaagaataacagaattgattaaatggaaatccaccttgcattggggtccctggcgattttctaagttttcttcgcgaatcagtccttaggttactattcacatgagtcactggcattacagaaaacnccctcggttctac

SEQ ID NO: 22332 - DNA, 483 bp, Arabidopsis thaliana landsberg
  unsure (1)..(483): unsure at all n locations
gcactactctaggggcttgctgaggttcttgggcatcgacgtgattcactcaagccctgccgtgaaactgggtcttgcttagctagctgttggtggagggtgacttggaggcgggtgctgaaacattcttggggccattcaccgagttggagtatgcaggtacggatgtcttcaactgaggacaattattcttgtaatgactggggtctccatagtgccaacaagcattggttggaggttggctgcttgcaatacatggggtgtggagaggaactttgaccaggctggctgaaacatgatggagcggaccatgttggcttactgaagttcgaccctttggggggcacccataagatcgaactctctggtgctagtactgctgctgagctcggagaacttgtaacttcctcttgaggtggcctctctcttctgtcgtgccctttgcacctggatggctntcttttggaggtgcgagaagcttga

SEQ ID NO: 22333 - DNA, 565 bp, Arabidopsis thaliana landsberg
  unsure (1)..(565): unsure at all n locations
attatctctccattagaatacagctagtatcacatatctatctcatcttgacagattttgtcttacctttggacattcaccttatatgcctagtaatcccaatattgacaggtgttgggcacccaggaacggagtgcccaaacaaatcccaagaagtccctgtcgagcaaccttgcaacgcggagangcgaccaagtccttcccgagcaaccttgcaaggccaagcggacgaccaagtccctaccgagcaaccatgcgaggcggacggacgaccaagtcccccactgagaaaccttgcgaggcagagcgagcgactaagtccctaccgagctaccttgcgaggcagagcggacaaccaagtccctgccgagtaaccttgtgaggtggaggagacgaccaagtctctgccgagcaacctctccacagactagcataagagaaggtcgacccaatgatatgggtccacgtcagcaggacaagatgggtcatcacaaaactatgtccgggcctcgggtatggtgccgaaagtatctcacgaacgtcagatgacacctcacacatattg

SEQ ID NO: 22334 - DNA, 473 bp, Arabidopsis thaliana landsberg
atcagactctcctcgagaccaacatgggcatcgcgcccttcttcttgtaatacctcttcttctcctttcgtctccccttcttgtcacctcggtcactgtcactagatataggacatttagcaataacaatgaccgatgcttaccacacttgtagcaaaccttcttggagcgggacttgtagtctttccccctcctttgtttgaggatttggcggaactcttgatgacgagcgccatatcctcattgtcgagcttggaggcgtcgattggttgtctgacttggtgtagcctccgccttcttctcctccgttgccttgaatgcaacgggttgggcttcggatgagtcgccaagctcgttgattatcctcgagccttctatcatgcactcaaaacttacaaaatagccgataacttcctcgggggtcattttagtatatctaggattaccacgaatcaattgatcttgagtgggat

SEQ ID NO: 22335 - DNA, 477 bp, Arabidopsis thaliana landsberg
ccttaatataattataagccaatcatatatttataactcatttgtttatctagaagtcagtcggaatgtattaatagatcagccaaaatgagaataagtcagcacaatattgtaattacttttattctaaaatgcttattgataattattccgacacgttttggcttaacatccagaccaacgtcaccaataaagtcctgtaaagaactcccaaaacatcaagtgttgtttctcgagatcgatcagaacgttccgtcacataacatgtgtgttccgaatcgtatatacgaacaaaacaatatggctcatccccctgtgtagatgcacgaaccaacgacatccatcaaactagcacttacaaattagtgtagtcggatttgatattggtacattcaaaataaaatccatcccttatcacaagaagtttgagtcgatagtccaactcgtctttgctcacgtatcgttgtcctacatcaa

SEQ ID NO: 22336 - DNA, 550 bp, Arabidopsis thaliana landsberg
tcgatttctcctgtatatatcgccccgtattaatatattatatatatatatatttataatatttaaattttttgtttaattcaatctgtaatttttaaaacttcatgttttaaaattataaatatttaaaacattttttaaagctaaactttattaaaagtttttaaaattataatatttaacttttgataaagttaaaatatttataattttttctttaaaacaaacaacccgagtatccagtaattttaatttaggacgcctgataaaccaagcttcctactcattcgtaatcaaaatcattttggtcctttttataatatggctttgaaccattgtctaatttttctaagcgatgtggaacattatacatatattatttcttcatctattgaataatatatgctcgttttaaaatttttgaattacatcatgtacataaaatattataatttttattaactatatatatattctatataaatgcaaaatttattaaatataagatcaaataaaagtgaaagaagaatcatgtatttatgtttaaatt

SEQ ID NO: 22337 - DNA, 577 bp, Arabidopsis thaliana landsberg
ctaatttagaaaagattatataaaaccaaaaatgttatatggtatgtataatgttactatatatgaaattaaactataaaatataaatgtattagagaatgatacaatttgcaaaacttttatatataaaaaataattcttaaattttaaaaattactactttaaaaaaaaatcacgggacgggtaaagaaattatagaacatgttttatttaggaattgggttatatggtggatgtatttgaatcaatatttataaaattttaaaatattattaatatgctgttttaatagaggttacaacttcagttttttaacaattgtctcatggattcgtgttatagcgttacttaataacaattattaactataaaatataaatattttataaaaataaaatttgcaaattttaatatatattatttttaaaaaataaatcgtcccgcggtataccgcgagtaaaaatctagtttatatatatttgtccatcagctttcaaatccatgtgtaccccactcaaatggaaatacttttaaaccggttcttgctcgggctagaccggactgatccgatcaacaa

SEQ ID NO: 22338 - DNA, 748 bp, Arabidopsis thaliana landsberg
atgtttttgaatatctgaaagtttcggtttaaatgtccttcattttccagagacgagactcacaccagatgaaatgcatctctttaggagaagagattcctcccaacatgcctcgaatccagcatctccaatgagaaatttaccagtggatcgacagttcgttggtgctaaaaaaaaatcaaatccacaaattgtttttaactaaagaagtattttcaaatcctttcaaatctttcaaaatcaaatccacaaactgttttcaataacagtgaattttaaggtagatttttaaattattagtttaattactgtatttcattagagtttttaaaattcatgattaaataacatataatttgtaattttttacacaaattacttaaaatattagattgaatacaccccttttaactttgagtcccaataatccttgcgtatcactgttaaaccgatgaaaattcatttttacacaatctaaaaatctaaagaactcaaacaaacaaagaaacttgaacattaaataaataaaaaaacttgaacattaaataataaatacccaaaaatatatatattggacctgggtcgagcccacaaacacccattctccttttttctgttcggcttgtgatgttgtgttagggtttaactatcaaatccattccccttgttattactcttttagggatttttgacgttttgaagctgagtcttcacggttttggtgttatcatatctaagcttttgaaac

SEQ ID NO: 22339 - DNA, 997 bp, Arabidopsis thaliana landsberg
  unsure (1)..(997): unsure at all n locations
caggatactttactttctataagacaacaacaaaaaatgtgtaaatgaatcaaaatatgtgaaaaaatcaacttaacgggtacttaattcattgaaaaattgctggctagctttttgtagacaactttttatatttccagttgttaatatttgggcttttgttggagacgtttcttgaatattttagctactttctatgtcttgaggaatttgaactttctcaaggtgtgttataacctttattggggctgggtaaaatattcgttcgatccgctttgattcggtattcgatttgatttgattcaaaaaatccgaatatccgtaagattttggaccaaagcaaatatgaaaatgtagtatcgtaaaaaccgaatcaaatagcaaatattgtcttcttttaaatcgaatatccgctttgatccgtatcttttgatatatattagaatatatagttatatctatatgtagatatcataaatagtttgtatattgttgttaccttatgtttttatgttaagatgtttatttgctcatttttcttttatgttatgttttgatcaatgacaatttaatctattaggttatgttttggaattaattagataacattttgatgaccggtgataacaacaacttgatgaccggtgataacaacaacggttatgtttgctatttgaaatttattttgaaagcatgttaaatgaaaaatttgaatatctgatattgttatatagtttacagtcttgtttaatatttacattgtacaatatgtcagtatcaaaatggatattcgaaaatatcacataaaaattcagatatccaaatttttttgaattaaagtaaatcacaaaatcagatattcggttaaaacgaatcgaataacaaatatcacaattgttccgcatatccgaattcgtgtcaggcgtactgctcactaaatgggtatttcgatttcgcctcttttccactcactcgctatcagncattcgagcgatag

SEQ ID NO: 22340 - DNA, 727 bp, Arabidopsis thaliana landsberg
tcgaaaaatcaactaagtagagtttgtcgtctaatacacccttaaacgctaatgaaccatcactccttctaaagacagaaacatcaacatttgtaaacaagcaattgtagcccatgtggcacaattgacttacagacaggagattatatcctaatgactctactaagaatacattggatatggaatgctcgcttgtgatggctatctttcccaagcctttaaccttgccttggttcccatctccaaaaataatcgtgtcctgggaatctttgttcttgacgtaggaggtgaacatcttcttctcccccgtcatgtggtttgtgcatccgctgtcgttaatccagcttgagcccccggatgcataaatgaagcgtcccaatcctctgggactcaaatgtgatacaattactagtcccaggaggctagtaaacacatttatacatcagatgattacagatctgcttaaacgagacaaacctataaaggtggtgatcaactttaagagttggtccacaactcgggacatatcatcagagtggggctgaagtagcccgatatacgcaatgaatcaaatcagcggtccaacagccacaggcaaggttgggaacagtcttaacttttacccgaactcctttttctgaaaaacaacaaataagcaagggtgagtacaaacgtactcagcagtccaccttcacccgcggaatggggaaatcagatataatgcatg

SEQ ID NO: 22341 - DNA, 285 bp, Arabidopsis thaliana landsberg
tcctgaaaaaacgaaaccagctcaacataacccattgaaacatttcatgaaatacctggcaggcaatacttggtagcagtgcctttgtgtttaaagtttggtttgagaggaccactgtggaagaaatgtcttgggcagagtcgagttgggtttgacctggagaaagagaagaagagtcgttaaaaagagatctttgaatctggttagttctttggcacttcaccatcgttggacttcttcataggacccctgatctcagtagagcatcggaagctttattgacac

SEQ ID NO: 22342 - DNA, 756 bp, Arabidopsis thaliana landsberg
ccagcgtcggcgcattctcgagcgaagaaaattttacaagaggcaaccccgaagtcccatcgaatggattaatcacgaagctgaagccttcaaggaaattttaaatagccgcggagacatatgtgctttctcgggtgctagggggattgccaccattttggagaaaaagggctgcgagcatgtaaagattttagcgcaatccgaagataccttgtccttcgaagatgcgaaagatccttcagccgaagccagcatggttggtggaaaatttttcaccaatgtctgggataatggtggtcgagaaatggcccgagaaattatccaaaaaagcgaaaagggtattcacgatgctagaaaagtagcagaggctgctgagaaaagcgcagggtccgaaggacagataggtattaactaatggtttttattgtgctgtaacttttgattttaaacttcgcccgcaatttgtaatagcaatgtagccgtatcctgtcctccctcagatcctactgaagcgtcttcgggccctcagcctaaagatgacgatgaaattaaaaagatggctgaagatatcatggatcaagttgtcgatcgacttctgaacgaaactgcagaagtagttttgagagaagattaagcattattgtaaaaacttctgaaatgtaatatgtgcaacattttgtaaccctgaatgtaatatacctgtttttactgctcaactcctttacgatgcatgaaattttacttacgaaccgattt

SEQ ID NO: 22343 - DNA, 609 bp, Arabidopsis thaliana landsberg
gaatgattttgtttgtaggtctggagtaatggctcgaacaaagaacgcatgtgtgccagcgcggcggaggtggtttcagacaaaatgaatgatgaagtagtagtactgtcggctggaggttattctgaagcaacaaattcaatttctaacgatgattcaacgttatgaactttaaactttacacaactagcagattatgatagaactttgttgattttgtaacttacaaaattctgaaactaaagaagtataactacgtatgaattaggtatatctttgttgatattgtaacttagaaaattctgaaactaagaagtataactatgtattaactaggtatgtctatactgatttctaccttaaaattatatgattctaaaaagtatatctatgtataaattaggtttatctatgtttgaatctaacttaaaaaaatttcgaaactaaaatgtatatctatgtataaactaggtatatctattttggaatctaacttaaaaaaattctaaactaaaaggtatatctatgtataaactaggtatatctatgttcgaatataacttagaatttttagagactaaacggtatatctatgtattaattagatat

SEQ ID NO: 22344 - DNA, 788 bp, Arabidopsis thaliana landsberg
  unsure (1)..(788): unsure at all n locations
acaatcaccctccttcagaagagaattcaagagtcctccagaatattttactgccaaaagaagccgaagttgcagagaaaatctcttgagtgttagatctcctcattggtttgagagtttggaagttagtaacaatacatcacctacctggagggttatgcagacaaaagcttctcctggaagacccaacacttcgagcatttcctttgattcagggagttctacctccattgatacgcgtagcctaaaagactatgatnnnnnnnnnnnnnnnnnnnnnnnnnnnnnnnnnnnnnnnnnnnnnnnnnnnnnnnagaagcatcactcaattgactcgacactggagctagattatgggattccatatgctcccacaaaaaccgaaagaatggagatcagaccggaaagccctgcagatagcgttagaggaaacgagaatgcattgccaaatcctcaggatataaataaagaaaccacagatgccaccaataatcagtcacagagagagcaggttggtgattcggtaagccaaaaaaaatattttcttggggagacaaaaacttctttcgtttctcaacagtttggatgatcacaaaatgcaggtagaagaagcaaaacctaaggaaacagattccacagaggcttcccaggagaaactacaggtagctgctaatggacaatattcaagcagttcttcagactttgagacacagcaaaggaaaataatagagctttgggcagcatgcaatgtaccactggttcacagaacctacttctttttgctctta

SEQ ID NO: 22345 - DNA, 427 bp, Arabidopsis thaliana landsberg
attacgatccacaagttggaaagacagttgagaaggagtatctatgacaaactcacgactagaaggtgtagagagtgataaacgttgcaaagatgggacaataacagtaagctttcccatattgggatgatgagatagattcactactagatcttcaagaacagggcaattacatataagccgctgaagagatccttgcttgaagtatctcacacctttcagttccaaagttttcaaagagggaagacaaaccattcgaggaacattcaggagaaccccgtcatcgagtttcaagatcacgagcagacttgcaggtatataagctacttggcaatatgtgttgcttctctggacagtaaatatccagctcacgtatgtagcgagaaacaactactacaacccacattctgatatcttcaggtttaaa

SEQ ID NO: 22346 - DNA, 475 bp, Arabidopsis thaliana landsberg
ttcaactctaacataataaaaggggttaaaataataatgtttatccaatatggggatgtagctcatatggtggagcgctcgcttcgcatgcgagaggcacggggttcgattccccgcatctccaattttgttgattttttttaattttagtttgctcttcttcttctgtttgcttgctccttttgttctctctttccggtggtttaaaacagagaggagatcacgtcatatgtttcttcagtccatgaaatctatttattttttgaaaaataatttggtcaaccatattctactgcgccaaccatcgtcttacaaaaacttttattcagaaacaatgataactcgaacaccgaatacaatgacaaatggaaaataaaaagagacaaaaaaatgtttaaggaaacgtattctaaagaaacaaaaattggagtgtgaagagagggtccttgtctctctacttggaccaaacaactgc

SEQ ID NO: 22347 - DNA, 623 bp, Arabidopsis thaliana landsberg
ttttttgaaattataatttttactaaaatcttatggatatgtcattttctaacactaaaaaaagtatgtatttccgatttttttggtaaaaatacgtagtttatacaaaatattaaatcctaagaacaagcacaaccgactaaatcaaaacataacgaataaaacacatgttaaatcatattttcgtagtgtgaaaaaggcaaaatctacaaacaattcagaaaagggcaaaatccacagataccatcccaaaaaatggcaaatcgataattgattcaaagaataatagttcttactttaaattgctggggaaaacaattattctctatgtatgggtcctaaaagaattcaattgaaaattttcgtctaaatattgtatcagtcacatcttaaattttcgaaataaaattctacaattaaagtttcccacactacggtgagcaaatacattacttaataatctttttttgggggcaaaacattacttaataatcagaatacataattaagttaaaaagagatcctttaaccattattaataaacaacattagtttttgtctttcgaaatgaagaaacacaaatcaaacaattgacacttagactagttttctcctcttttgtg

SEQ ID NO: 22348 - DNA, 569 bp, Arabidopsis thaliana landsberg
tttccgtgtgatcgacggcgagtttcctcgcgacgaagatcttgagaagtatgagggattcgtcattagtgggagtttacatgacgctttcacagaagaggattggatcattgagctttgctctgtttgcaaaaaacttgatgtgatgaagaagaaaattcttggcatatgctttggtcaccaggtttgatattattatcatccaacgttttcttcttcttctatcatttaaaatatatcatacttgtataattttttaattacttaccactaggtaaaatctttacataaaagtgcatgttttttctttcgtaatttctctttttaaaattcgatgtacataactgttttgcctaacttcataagctatgttgtagactaccgttagactagatgaatctagttctatttaaagtaataaattttaaattataaaagcattactgcataatttgaattagaatcatcatgccctattcataacatatcggatgctatatcattttcaaggttttttttttttaagttataatgccatattgcctgctttataattttcaaattaaatt

SEQ ID NO: 22349 - DNA, 297 bp, Arabidopsis thaliana landsberg
tgccgcttcggagtcccatctgagctcacagttgacaatggcaagcaatttgacagtcaagacttcaaggatttctgcttctccattggcaccaagcttgccttcgcctcagtgtaccacccgcaatccaacggagtcgtggagcgtgccaatggtaaaaatttcacagccgtcaagaaaatgctcctcgatgacaaaaaaggcaaatggaccgacctgttacctgaagcggtctgggcgttgaacacgactgagtgcagggcgactgggttcaccccttttcgccttctatatgga

SEQ ID NO: 22350 - DNA, 505 bp, Arabidopsis thaliana landsberg
  unsure (1)..(505): unsure at all n locations
tggtttgggggttcgttcgtccgatcgttcatggtttgttcgtccgttcgtccgatcgttcgatcgttcgtccaaataatcttttttctgccgttatgctgccgaaattctgatcgttcatcattcgttcatagttcatattcatctttcatcgttcgttcatagtccctattcatcgttcttccagataatctttgtcctgtcgttatgttgccgaaattctgatcgttcgttcgttcaatcattcgatcgttcatagttcctattcatcattcatcgttcgttcatagttcatattcatcgttcttcgttcgttcatagtccctatttatcgttcttctagataatctttgtcctgccgttatgctgccgaaattccgatcgttcgttcgtccgaccattcgatcgttcgtctgttcngtcatagttcctattcatcggtcggtcatcggcactattcattgttcgcacgaactattcaccattactattcatcatcgttact

SEQ ID NO: 22351 - DNA, 592 bp, Arabidopsis thaliana landsberg
atcacagcgaggtatggcctctacaaatattttaccaaaagttggtgtttgaatagacacatcttttataaccaaaccaaatccaattaattgttgtaagagtttaaggttttttgaaacgaacaaaacaaaaatgcaaactattgaaacacatcacacatcggtggtgggggtggtgttgttgttggaaggcatgtgaccggtggttgtatgaccatcggctggtgttttggtggtagtgttttcttgtttcctttcatgtaaaggatgagttcatgctgtctatcatttcctatttgtggattaggctttttccttatcacatttgatatcatatttttgaacatctgaatactcatgatttggggcttaactgttattttctgggttttaagtataccatttatctaatatatcttagattcatggtctttttaaaactttatacgtttttacacaatttttatccattggtattatcggaacgtgctacaggtacaattatttgttccgttaccaccttactttgtgtatgttttactggattgaacttttaatatgatcttctttactttttttttgaatgggtttt

SEQ ID NO: 22352 - DNA, 771 bp, Arabidopsis thaliana landsberg
gcgccttaaatgctatgaatgtatctttaacttgtgatttctgcttcaagggatacaaccaagtatattttgtataatgatcaacgatcgcaagatagtacttatagttgtcaactgagatcaatggcgatgtccaaacgtcggtaaagaggtattccaagggtccaccggagacaatagaggtttcatagaatggaagcttgtggcttttgttgatagaacagtcattgcaatgtgtttgggtggaattagacactggtaaggaaaactgagagacaatagtctttaagacaggaggagctgggtgaccgagtcttgaatgccatgaggtgatggttgtttttgggcttggtgatgtagaaaatgcggttatgtgtgacgatgacattggccactcatataatttattttgagttctgccttgaagcaattttgtaccggtagcgagatccttgacttgaaagtgagcagggaagaactccacttagactttgttagtattacaaagtctgtaaaccgagacaagtttcttgtgaatattggggacacaaagaacttgtcttagaagaagaggtttgtcacatgatggcagcgtcgtagagcctatgtgagtgattgataatcctgaaccatcagctatggtaactgcgtcatgaccattgtagggttgatgttgaaagagatgttggaaattagatgtgatgtggtgcgtcgctccactatcgagtagccatggtgaggcagcgtgtgcttgtggcaaagaatggagtt

SEQ ID NO: 22353 - DNA, 547 bp, Arabidopsis thaliana landsberg
ttagaccttacctacttaccttacggtgattctgtctatacttatcttgatcctctcaccttctactgttctactctaattaaccttacctttgctactctcattcttttctaaacttatcttaatcttttctcgtctacttccgctttactctgattattcttacctttttccttctgaagacaaatgtggatttcacactttgaaatcctgtgcctaaagtgacttttaggaataggagacctactcttatgaataaaaacaaaactatttttatagttatctatacgcttgagtgtttgttcttatgatatttgtctgatttggatctttgattgagtgtgattagttgtggagtaatgtccacaattacatctgcataaacatataagcataaatagaattcataagataactaaacaacttagactaccctccattaaagtgtaccaatttcaaatagatccatctcatgttaaaatattctttcttaccttaatgatccatctaatcataaaagattctctcttatcttaatagacccatt

SEQ ID NO: 22354 - DNA, 497 bp, Arabidopsis thaliana landsberg
gatgtgttatcgttagaaatttgtattcatatctgccttcgctccccatatacttttccattttccataaaacctaacacaattgttctatattctctaacacagttttaaatattttatattgatacatgcttgaacatcgtcatcaaaagtaccaaacaacattatagcagttaacagaaagtttatcataatatatcacatgcatagaggaggtttgatggggatcgcccccgatagtaatattacattctaaggatcacattccgtacgtatatacagggaaaatctcctgatccttctgcattatttatcacacattcttagtttccaacttttatggcaccatcctttcaaacctcctctttttcaaaaaaccttttccttcccctaaaaaacaaccccgcgctcgcagttatggaacctgcacgtaaatgcattgagtggtaactctaattgtaccgctaattctgaaataataatagtaaaatgattgt

SEQ ID NO: 22355 - DNA, 802 bp, Arabidopsis thaliana landsberg
  unsure (1)..(802): unsure at all n locations
ggatcttgtcttggtgtaatgcttaatttgagatgattactaaaaccaaaagcatgagatcatcttaaagtttacagtcgagggcaaagtcaatgaaggatttaaagattagaaacctaaacgatgttaaaaggtcatgacaatttatattcgagttatttaggtcggtttatgggaaaaaacctgaaaaatctccatttaattttaatttgcctatttaatattcgtgttactaaatttgcccaaaatacctaaattagtttttatgtcttttaaatacttttattttttattttttttgacaaaatcagacatccgaattaacgagcgttaacagtggtaacaaaatcgttatttgcagttaaaacttaatcatgtgatgtttattagttatatacaattgttttttctaatgcatacgaatatatcgttttagtcaagtagttatatgagagtttattatcttcatgaacacgagtacgagtcccatatccgatgtttttttgttgcacttgatacttgtcttgaaagaaaactgtcacagaatcacaatctaggaaattccgagagaaatatctaagtgcacnnnnnnnnnnnnnnnnnnnnnnnnnnnnnnnnnnnnnnnnnngtcgtgctaataacgcgaaggtcacaggttcgatccctgtataggccacataattttggctttcattttgatcagactaaaacgttgtcgtgtgtttcagcttcttttttttttttttttttttttaatccttttttccggagatattttgcttttttttttcaattttacgga

SEQ ID NO: 22356 - DNA, 460 bp, Arabidopsis thaliana landsberg
ggcttgatatgcaattctcagaacaaaatccaaacaaacttttttttccagtttcagttgatttatcctcgggcggatccttgaatctagatggaacaatttctacccttgaaatccatcctttgacttgagcaagctgttgcaaacctttatcttcttctatggaaactcttcttaacaaatcatctcgtccattcttaagttcttccatagttgtgtgcagatcatcgagatttgcctccatcttgtgaatgtagtttctatcgctaaaaaagcagccacatgcatcagtgaagatcttgttccagggtattagtagaagccaatccgtcattttgcaaaaactttaagaaagaaaccccaaagattactgccacaaggcgatgcacgaaacaacacgagagaaggctgaagacaaagaggaatacaatcgtgaatacatgtactgtcataaaaaaac

SEQ ID NO: 22357 - DNA, 2276 bp, Arabidopsis thaliana landsberg
gatggtagcgtcgaatttgtttcgatagtaagatgaggtggtatatcacgggtgaaatccattagatatgtttggtttcacttaacggggttagataataaaacgggtttgggtggatagtaatacgagacggtatactacgggtaaaattaattatatatttttaatttcagtgaacaagattagatggtaagacggatttggatcgatagtaatacgagtcggtataccataggtgaaatcctacatataacaatcaaaatagaattatattatcttaaatactaaacagaacaaacaatattaacaaaaataaatataatttaaatttctattatttagttataattatctagattataacttaatgaattgtgtgttattgttcctacacttttagacagtaaaaatcaaacataataattgtacactaaaaatatatagatgtaaaacttgaacatttagaaaatacaaaacattaaatcatattttattaaataaattaaaatttagtattctatattttgacaggtccaaatacaatggatgactattacacaaaaatgggattagataaatgttaatatttataaatgagattagataaatgggattacacagatggataacatagaaattaacatttttaaatgttatcaaatatatattaaagggattagatgataaaatatatcaattacataagatatagaaacaaggtaggaaaagacagttcccagatgatataactctatttttaccgattttagctatgatttaggtacaggttttagaatctaattgttatttctagagtcttttctaatccttttcatgtctttacatgtttgggatgcatttgaagattatggagcattctggagatcaaaagagaatttatgcggctgaggaaatccgaagactaaaatgcacgtaggtgtcgaatgacaccacccatggtgtcggagtgacaccaatacctgacgacaattcgaagacgcaacttattgatgttttgaaaatttccaaattcggcccagaactttctcctatttttagtcaatgcccaacacgtttttaagacatatatatatatatatatatatatatatatatatatatagtttttaggtcaatgtttcgacagcttggagaggctaatctccttatctcttttgtactttgggatcaaaaccttgtggagactccctttggagaagatctttttcactctttctcttgctattattgatttcttattcagactttgatttgtgttctattatcatatatgagaaatcaagttggttggtgaagggagtctcaatagggatttagattgattagtagatcgaaaaccccttaggattattcttagagttcttcatcttgattgctcttattgctagttttagattgatcacctagaacttgatattagataataggtatacccaccataggtacttgttatttgaactatcatagatgagcctatgcatttaagaaagaacatataggctcaaagaagggctctggtttagatactaggtgaactaattgaacttgattagaatgcatgatttagtataggatctctcggcttctccagttattcttagctataagtatagagagttttgcagaatgccaccggttactctaaaattagagattgagtttaaaaacggtgcgataacaatcctagctttttctagatctacaatttatctattttccgagacaataccctaaacttgactcttttaatatcttgtttcacaaccaaccaatcttctattgctcactttttgtttctctttattttctttactattttacttagtttaattcgatagccattatctattgcgttgtcagagaactttgtgaattcgatccctaagtgctacaactggcctctttatttgagagagtggtctgatgattaatttgacctatatcaggttctagatttatctcttcgcttttttgggatttcttcttcttcttcttcttcttcttcccattgatctccagcttccgatcttctagaaattttcaatctttacacatttcgagtaaaaaacgaaaaacgagtgaaaaccaaacaaaacccagcttaatcaagctcgtcactcggtggaaaaaaaaacccttattttaatggcgaaaactcggcctggtgtcgctttttcttcaaagattaagctgggcaagaaagatatcaaacccgttcaatgcaagttctatgtgaattttgtatataactaaac

SEQ ID NO: 22358 - DNA, 992 bp, Arabidopsis thaliana landsberg
cttgattatgcggccaaaatgactcttgctatgagtatgcttcatttttgatgaagcctattggagtatggtggttaatgatgggggtcccttgtagcttcttatgtctaaagttggtcctgcaaccaatgtttagaattttcagggttggtttgctgtttcgtttgtgccctgtggcaaaagagacttatataacctgctgtttggtgaagaggtgtttttctgtctatgtcactgataagctacggcttcctttggcattcatgaggaggaaggcaaggacaggtggtcgtttggcaagaaaggagttgaagaagaaagacgcaagaggtggctaaagtgaagaaaggaagctatggtcactagagactctgagacaaacagagtctctctctctttatctattaatgcgatgtcgtttaagtttatgttaccctaaagtctggatgtatttaagttgggaatctctcattagggttccttatcttataacatttcaacagtaatatcactctctaagcggccgttttggttagcttctatttctgatctcttctttcctctttaatttgtctatctcaagttctttcttaacaatttggtgctttcgttgagagcaggtgcaatgacaaactctccacctgtatagggttgagaagtgtttcgcagtgaaccagacaccggaacatgagaagttgacccaagccttgtcacgtctcggaggagtcgcagtgggttggtggagataccgtgagggaagagaaggcgtgaccaactggcctctgtttaaggctaagtgtaagagtcgatttaaaccaagtatgggaagtacttctgcagaccatttaatgtgtatcgagcagaagggtagtgtggaggattacagagagaggttcgaggctgtctcagtggagctgccgcattgtactactaaaattttagagtctgcatttctgagagggctgaagaaaagcctcaggaatcaggttgta

SEQ ID NO: 22359 - DNA, 622 bp, Arabidopsis thaliana landsberg
tggaacgccggcggtttggaacgacgacggttaggaacaacaccggtcacggcggaattgcaacggcggctaaacgggatgaacgactatgcgaaatcgaacacgacccacacaatcggcgacagagataacaagtgatgtcgccggcgacggtgaactgaacggagagagaagagaaagtcgacggttttggatttttgaagttcgccgattgagagagaagagaagagagttgagagtagtcgacggttttgatttttgaaaagttacttaggttaaaaaaaattgatttgggggaaaacctaataatactgggtcggattctgagctaacccgtgaactgtggttggatcgtgtagtttcactaagtcactgaggttatgtggtaatctccctctgttttcctatttaaaaataaatcaaaaagaaattcatttttttgggtggtataatggaattttttttttcggatgatggtaaaatagataaaaaccaagtcattgggatattcctgttgtttgtggaagacaatttaatatttactctaaatgtgaataatactgatgcattgaagttattgggatatacgatcacacacggttatggtgaagaaatggtgttc

SEQ ID NO: 22360 - DNA, 803 bp, Arabidopsis thaliana landsberg
aggcgccgaacagtcggctttttactcggtagggtttgctggaattcaagatatcttgtgggactttgatggccggcactacttccagcggggtaccatacaaggcgcggtcgatttcatctttggtaccggtcaatctatttaccaggtgatccgttacattcttcacataataatgttggttttgagattatgacaggatgatattaatcctaaatctaaataatttgaaacttttagaatgtctttaaaatggccaaggaattgttaacagtagatgtccgtagatagttgtgatgttcaatctagatatatctttctaaccactgcgattggaatgtttttttcacttttcctatgcataaaaaggaaaatatcgaactgaagtttaattttatgaaaagtaaagatatgataaattaaaaattgaaccaaactaagaatgttcttgattggattttgatttgataaccattttcgaaaaaaaaactaaatatacatagctaatggaaccattcttaatagccctgtagttttcacatattaataatcctttataaaactaaaattcctatttattcgggccaagtttcattaaatgaaagttgtgtttggtgggttgtagagctgtgtgatacaagtgctaggtgggcagctagatccggggctagccggttacatatcggctcaaggacggaccaatccgtacgatgcaaatggattcatattcatcaactgcctcgtatatggaacaggcatggccttcttgggcaggccgtggcgcggttattctcgagtgatct

SEQ ID NO: 22361 - DNA, 859 bp, Arabidopsis thaliana landsberg
gtttctttctctttttgtctgaatgcaaaaggttcttcctttcttatcctttcctgatatatctcacctgccatttgcagcaagaaacgcttgagtctgtctgttatcgcctctattcttcttcttatccacccgagctttgcgaaccgctaactgaatctgcctttcatgttctttcaacatttcatctaagtttcctcctgcagaaaccaaaggccctgagcagtgcattctctctttcttttcaccgttaacctaaagataaccatacaaattgtgattagcccacaaagaattccattgcaaagagaagcacaattacacacagttcaaatgttctttttaccgttatagattctttgtgttttgtaaactctttgtgtttaaccaccaaacgttgggaccaagcacctccgttttgccttccgttattattgttataactatcttcaaaccaccgtggatttgctatagcgaaatgtgatccatctctagcagctaccgagtttgagaatcttgacaattgggctgttccgcgttggacaaaagaccgttgtgtcctcagttcttttctaggagaccgactcgagcccatcataacattctctccatttctattcaccgaggacacaccataacgagtgtgaccgtcttttgcagttccactcttcagtggttctatccggaagctagctgcatcttcaccaggattgaacttgtgactattgcttacctgggtatgctgcccttgacgttgctttacaaaacaagaattttgacagatgtgtaagatcacacgaatataatcatatatgtctatgtgtattatgctagaaccagacgtacttgtattgatgtc

SEQ ID NO: 22362 - DNA, 539 bp, Arabidopsis thaliana landsberg
agataaaagaagaagagaaaaaaacaatgagtcggcatatctttatcctgtagaatgataatctttcccattaactactgtagatcgtcaacgtgtactcacttccattatcgatcgaatcatcaatttaatccctcgtgaatcacgagatcatataatatgacaagaaattcgtcccgtttatctactgctggtcaataaatactcatgcaattcccaccaatagatcactcaaccaatttcttctcaggttctctcttcacacctctccccttctctatgattatagatagtatatgatttggttaaattatctatatttcttttttgataaaggatttggttaaatttttaattgcaggtaatactcgtaagatttatcaacacaagcaaaaaagatggcccaaaagctagaagcaaagggtggtgagatgggagatgtatgggatgatggtgtttacgaaaatgttagaaaggtatatgtagggcaagcacaatacggtatagccttcgtcaagtttgagtatgtcaatggttct

SEQ ID NO: 22363 - DNA, 566 bp, Arabidopsis thaliana landsberg
aaaataccaccaatcggaaatactagttaattattttttacaacttattaaattttgaaccaaagacattaatatgaagggatgtgtgaaacgctacatttttgtcttttcgctacgtggtttgttgttagatgtacatgttttttaatagaaaactagcatttaacccacggtttaccgcggacaatcggtttatttggtttttatactaaatatttgagtaaatttgatatcttaaacttataaatataaattttttaatcaaacataactaaaaataattgggatttttttttgttgttatttagtgagaagaagaatgtgttaaaatgtgtttaacttttttttgcttgttatttatttatttttgttgaacggtttagattgaagggaattaattttattgaacggcttagatttaatcggatcatataaagtttaggagattgttaagaccaaattacccttaatgattgtacttcccttttaataataagatgatacataacagaatccactaaactcaaatcaaatgtgctacaaaatgggtctcacaatattgtaat

SEQ ID NO: 22364 - DNA, 663 bp, Arabidopsis thaliana landsberg
ttggatgaattcatttccaatttgaaaatgcatccgagtagagctgaactgcgtaggtccattctaaggattgaatgcattagtattcatatacgctccattgtaacgccttgttttttctttaagagtccgcaacacagcaaactgaatacaatggttgagaaaactaacattagtagcccactaatctcattattgtgacactttattatatgtaataaatctctataaattaataatatcgagacaacaaaataaaatttataaatatattaatgtatcatcagttcataatttatagagaggtttggctaattttataaacttttaaaacttttatatcaaaaaaaagctttttctttataaccaatatatttgtagaactaattacaattaaaaaaaaaaaaaacaattactatgtctagaaaacaacacatcacgtttttgatggagtaaaaatattagaaataaactttactaagaataaatgcaagttttattttaaaaacaatagtagagtcatatttcaccaaattttcttacataatatatatattaagaatttcatacaattattaataatattaatgagatcatatatttaaatataatttccaaaaaaaaactcggggctaaaaaattatttaatatatagaaatatta

SEQ ID NO: 22365 - DNA, 569 bp, Arabidopsis thaliana landsberg
cttggaatacctgaatcggatctgattgctaccgagaagtctcacttaataaacctgttcactcacgctggtcctaatcaataaaacgggtcatagttaaagagaatccaaaccaagtacttcagatttcgaaatggataaagccatctaggcataagttctataaatcctcgaattaagccatccaggcataaatatcacaacaaaatataaaaacaaagagaatttcccgcttcgggtccatagtcaagctcttcggacgggcggctactctcagcaggcagaagcgacccgaattaatcggtaacccccgcctcatcggcgagagtgggtttgggaacaggagctttaagttcttctttcagctcggcaacaaaacggttgaggtcggcctcagcatcggcgaaatctttcagccattcttcaacctgatccttctcggtcgccagaaccccgcctttctcaaggacctcgatcagctgcgcgttagctcgcggttgagacatgtacatgaactgatcattgatcccgttaggagcgataccttctgctcagcagccttgagtttc

SEQ ID NO: 22366 - DNA, 516 bp, Arabidopsis thaliana landsberg
  unsure (1)..(516): unsure at all n locations
ccaagtgggtgttgtgcaacgggcaagacgagcacgggatggnnnnnnnnnnnnnnnnnnnnnnnnnnnnnnnnnnnnnnnnncaagtcgcaggtttggatttcgaggaccctagggaatgtcaccttgtggccgttaagcgaattcttagatatttagttgctacaccttgctttgggatctggtatccaaaggggtctacctttgacttaattggatacgcagactccgattatgccgggtgcaaggtagataggaagagtacatcagggacatgccaattcctaggaaggtccctggtatcctggagttccaagaaacaaacatctgttgccctatccaccgctgaggccgagtatnnnnnnnnnnnnnnnnnnnnnnnnnnnnnnnnnnnnnnnnnnnnnnccatccaggactttggctacaatctgagcaaagtcccactcctatgtgacaatgagagtgcaatccgcatggccgataatactgttgacacagncacactaagcacataga

SEQ ID NO: 22367 - DNA, 524 bp, Arabidopsis thaliana landsberg
gtttcgcccgggtttcggctgcacgagttccctaccccctacgtatacctgaggggcataccccctcccaggacttcggggagttctgccttcagaaaaccagggcattttcccaggaccccacgaaacccatctaagatggctggacacagcgtttttgctcagaatcaggggtttcgctagcgtgacccgttttccctcgcgggtggacccgaacttccacgtctcacgcggggggaccacgggagggtcccgtgcccttccacgtgcccgttttcgcggtcttggccgaaaatccgttttcggcccgttcgccatggcgaacccctcgttttcagcccaaacgaaaggccgaacagccctgccgcccgttgccttgcgtctcctcccgttttccctccgttccaccgtgcccttcaaccgagccctacgtagcagcctcggtgtctttccacacgcttggacttagcccgttttcgcggccgtggcagaaccgttgttttcggccgcgcgccatgggaaca

SEQ ID NO: 22368 - DNA, 1181 bp, Arabidopsis thaliana landsberg
cttttaaatcttttaatctataaacaccattccgaaccacttcggtaacaatgtaaggtccttcccaattaatactgagcttgcctgctcctttttccttcttattgtcaaaaacacggtttagcacgaaatcgcctacaaagaaaggcctgcttttgacttaggtattgtaatattgagctgctacttgctggtaattttaaatatagattgaggcctgatctcgcctttcattgatagtatctatcaaatcatcgagcattgcagagttttcctcttcgtttaggggagcctctaatcggcgaagtccaggcattttgagctcagccgaaaccaatgcctccatcctgtataccaaagaatcggagtttcaaggcccaaacccactaaccaatgcctgcatcctccactgggttttgcaaagggaggtttttaatgaggcttatgttttcatttcagataatccattttgatgattcaaggcccaaacccactaaaataaagagacatttttgtggcttttgaagttgaagggtttattttgaatttcaaactatgtttttaatttctgttgtgttctaggtagccttggagtatgttccaagacttgcctcttcatcttctcttctccttctctttatatactcttgtattctctgctgagaacttatctttcttttaatgagaaaccttttctaagaagatcatcttgttggtgtgtatatccagcaaaatccttagtctcttttggtgcgcatatccaaaggatctaagtctcgatatcttgaagcccttccgcaagcttctgtgatatccatcgattcatttaaatctatccatcatcacggcttcacaaccactagtatcctttgctaaccttaagagtgtcgagtccttgggaggatctcatcagattgccaccgaagttaccctgtggctgccgaaacttcatgtagccctgaccatctatgtagaagactccttcctcagactaattctcaggctcaggctcaatggattctgcctcagctgcaaagtggacatgcttcttccctgtaagtaagttatgaaccgaatccaacttagcatgtacctctgccatctgattgcctgaaatagctccagcaatcttcttcctctcaaagtcagcattcttggtgctgttactgcaagcgagattc

SEQ ID NO: 22369 - DNA, 164 bp, Arabidopsis thaliana landsberg
  unsure (1)..(164): unsure at all n locations
caagtctttttcaagtttagcgaagttnggctggactgtttgtatctctctaaagggaatgactcctttcggtagaagggttgatatctagatttggtaagggatttgtaaatcacaggtctcaattcaaatattttgctcatggtctgacagattaataccct

SEQ ID NO: 22370 - DNA, 611 bp, Arabidopsis thaliana landsberg
aaaaggcttaggctttgcattagatggtttcaagaactcgagttagattatgcatttgagcaagagaagttgaagaacgctatggagatgaatgagaagcattgcgccgatttgggtgagtttgttacaaatttgagtttttaaaagttgcttcttcttatgaacatttgggattttgtaagaacttatattgtgcatgcatttgtttgcagaggttaatttgaaaagtaaaggaagaggagctaaatatggtaattgatgaactgaggaagaactttgcatctgttcaggtgcaacttgccaaagaacaaacagagaaattggtaagagaactgctagtttcagttataagtatgtttcattttctgcggttttctaaacttggtattcttttgtgtaaggctgcaaatgaatctcttggaaaagagagagaagcaagaattgctgttgaaagtttgcaagctgccattacagaagagctagcaaagacgcaaggagagcttcaaacagctaaccagagggtgagaaagtcagaaagatccgtaaaggaaatgtttagctgtgactgacatcctgtttttttggttggttcagattcaagctgtcaatga

SEQ ID NO: 22371 - DNA, 575 bp, Arabidopsis thaliana landsberg
  unsure (1)..(575): unsure at all n locations
tttaaaatccttatgattttttaaatttgcaggttaggatttgattagacttgctagacatatggatttgtttagtatgatcatggcaatagactagagaatgttggaagttcctttgttttaaaacctcttccacaggttcggcctttgtgttttgcttgagggcaagcaaaacgaaaatatttttactgtttttagttatgttttagatataggttttggagtctttttgttatttctagagttcttttagagtcttttcagatattctatggagagagacaagaatggcgataatgagaaattttggagcaaaagctgaagaaaataagccgaagancgaattcactttcatatcaagtcaagagtgtcgatcgacacactcttggtgtcgattggcaccagttgcggcccagaaaggtccatgatggtttagagtttgaagatatggaaatttatcccagaagacttttctattttcattattagtctttgcatgtctttaggtcatatatatacatatatagttttaaagtcattgtttagacaaacaagtctttttcttagctcttgag

SEQ ID NO: 22372 - DNA, 409 bp, Arabidopsis thaliana landsberg
tttatctgctatccaaaagttcatccttctcatgaagtagagcctattaatacatttaatttttctctttgttgcatgttaagattggcaaaaaaagtaagcaaatcatcttcgtcttcactagaactaccctcatcactagatgtagtatacttgggtttggttctagattgtaccttcttctttttgcagtcctttgccatgaatcacttgtggccgatgttggggaagaggagtcccttgttaacggcgatgttggcggcagcttcgtcagaggaggagtcgatggagctctcatcggagtcccattcccgacacacgtgggcatcaccacccttcttcttgtagtatctcttcttctccttcttctcccccctcttgtcgtcgcccctgtcactatcactagaca

SEQ ID NO: 22373 - DNA, 492 bp, Arabidopsis thaliana landsberg
  unsure (1)..(492): unsure at all n locations
tgcacacttagctattttatatacctttgatcatatctctttgatttggtacaaatgcatatttcttattattcttgcgccaagactacgactaatgtgttttcaagtatatttctaaaactaagccgactaatggagttttcggcaaagacaacacttccactcaactctaacggtatcatttacccttttccggnnnnnnnnnnnnnnnnnnnngtatgactctttactcatatttactttaccatttgggagaaattgttaggccccaaagggggagaaaatactacagggctctcaagttctccgttttttgcgcttaatgccaaagggggagaaaatattaagcccaaagcaaaaggaccgcaccaccatttcagaaagtagaatttcaaattggtatgtatttcaaagcccctcttaaaaactaagaggggaatttaaaatagggggaggaatttcaaataaaaatgcatctagcaatcatattac

SEQ ID NO: 22374 - DNA, 734 bp, Arabidopsis thaliana landsberg
atatcataatagctatgggaaaaaaattaaaaaaaacctcaactaaattttatttgtacgtttaatacggaattgtatttgtttgaaagaaaaacacatgaagtaataaaactgtgcaatttaatacccaaacaattaaatgttgttattttcacactcatgatttgacaacaaaaataaaatttcaattttacctttaccatctcaattagctgttaatttttagattatatgattattaattttattagagaaaagttaattttattaatattttattttatgatgtctaaaaatttaaaatttcatttttattataattattttaaaatttaacattaaaattaggagaaaataaaaaatatcttaaaataagtcatttttacaattgtattctatcgtcgcaatatcggctccatttggttagggatattcaaatttctagttttcaattaaaaaaaaatatttgagacatgattttattttgatttgattcgagtggttttatatttaaaaacaatatatagctaactagtttagataatgttttagtgattttgttctctacaaaccttttgttatctaaatttattgttttcaaacaaacaaaaaaactaaatttatttgggacataattttattttcgcttgattcaatttcattttggattccgttttagtatatttaaatatatgccattgttaatatccagctaaacggttcggctttccaat

SEQ ID NO: 22375 - DNA, 528 bp, Arabidopsis thaliana landsberg
  unsure (1)..(528): unsure at all n locations
attagatcagttgattttcaattttccaattagaataaaaaaaattcaggagttttactattgacagatattaaatagttcttttttttgttggaattttcctaaagcttttcttgaatgagattacattataaataaatcagaatattcaagtgcatatgcatggtcaattttgtattgatatgtttttcatatttgataaattcaaaccctattatatttttaacgagacaattaatgataattttctctaaataacatttgtagtaattattataaacaatgaaagcaattttctcatttatacctttgtgttattaactaaaatggagatgaaaaatatactggtacacttcgtgttcctaatttggaacaattagataccacattgtattattattataaagtaaatagatactccataagcgaagagannaagatgcccaaatttaaaaggacaaagtctgggagacagataaattagaagcttgctaattaaaaaaaagaggcggataagggccatggcca

SEQ ID NO: 22376 - DNA, 492 bp, Arabidopsis thaliana landsberg
tgtttataaattgttatcattgatgtcccgtgcctatggatagatgaacagtacctgcgtactgttcacactgactggtaatcattcacacgtcactctcgggtttttaccttctgtcaagctgaaggtataaatgtaatttaaatgtcattgatgtttgttcatgattatataatgataatgtaaataatctaattgtttaagatgattattcatgctctttctgcatttcacatgtccctatttatatctttgcatattgaaatgatgaaggtacgcccttcatgaccttcgtctgaagatcattatatcctgaaggaaataatgttacgaaggacgaaggtttttaaccattaacatttgtgttgccttgttcttgatttatagcttttgtgaacaagtgaccaacagacaacttcatccttcttcggttctgggatagtctcttctccagcaaatcaaataagtttactctcagcttctccaaaatag

SEQ ID NO: 22377 - DNA, 543 bp, Arabidopsis thaliana landsberg
  unsure (1)..(543): unsure at all n locations
ttcgacaacttggtcatcgcgctggggggaaacaaatcaacatcttttgtaaattgaacgacaaataattgttcaatctttctttaaaccctggagaaatctatgattatagatttcatggtgaatttgtgaccacaaacaaaatggattgtgacataagggagatcatacaaaatagatttgtaaggattagggcatatcaaggttccagtggctcatttgatcatgggaagacaaattattgggatatcagagaggatggagtttactttacacatggtaaagacgtaccaaaattagaatataaatggtaaagtactgtcattaagagtgggcacataaatctttcgatactgaaaagaagtggaatttattatctttgttataattacaatttcctattttctgttatgaaatgaatacctattaaataaaaatattgatatncgattactgtttttgtgactacatgctctcgatgatttggttttcgacggaaaagccgacagaaaatttggttgctctcccattgtactgaaactc

SEQ ID NO: 22378 - DNA, 1440 bp, Arabidopsis thaliana landsberg
acctttttaccatcattgtatgcaaatgttgactttttggttttggagattaccaaaagattcatcgtttactagttcttcgtagataacatagtatatctagaaaactcggaacgaaatttttataaaatgtggataaacgtgaagtcctaaagctagcaaagaaatttggtcaaacgttagtttattaatttctctcaaaatattagctatttagtaatattacccaaaggatagacaaatgttacttacccaacaatatttcaaatagatgctttgtttctacttgatgcattattataatgaagtggccgctccttttttttttattttgtcaaacattataatgaaataatgaagtatgtttttggagaacaaaaatgttgtaaaattaccaataatttgggtagtggagttggtgtacactttaggcttatattccattaacttaatgacgttacttgtaatcattgtccaatcagtgacgtcatatatgattttccttttgttaatcttttcaactgttatgactgggtgaaggaaattatcatcttcgtccctaccaaatttttcagcagcgaaaatggcaaacatcagcgtagtgacgacagcgactaacaaccaggtgattctccgtaactacgtgagtggattccctaaagaatccgacctctacatcgccgcaaccaccgttgacttacgtgtacctcccggatccatggcggttctagtcaagaatctctacttatcttgcgatcctttcagccgcattcgcatggaaaaacccgacccttcgtcacctgcttccgtcgctcgcgcttactctatcggcaaggtataaaagaatgtatacattacgaatcttttagctttatagttcactcagatttcattgtgttgtgtttcttgtagccaatctctggatttggagtggctaaagcaatagattcatgtcatccaaattacaaaacaggagatttactttggggaagagttggatgggaagagtatagtgttattactccaactccttcttcacatttcaagattcatcacactgatgttccattatctttctacactggacttcttggtatacactttctcttggtgatttcttgatttggaatgttttttttttttttttttttttgaagactttacttattacctattatctgttttcctctgttctgttcttttaaaggtataccgggtctccctgagtatgttgggtttgacgagatatgttctccgaagaaaggagagcctgtatttgtatcagctgcttctggtgcagtaggacaacttgtaggacagtttgcgaagatggcggcatgctatgtcgttggaagtgcccgtagtaaacagtgtgtttatgtcgatgattacagagtaatgcaattcacattttgcatctgtttttttatccgcacagtg

SEQ ID NO: 22379 - DNA, 509 bp, Arabidopsis thaliana landsberg
  unsure (1)..(509): unsure at all n locations
agcctttttattgcactttgctctttatctgagaagttgtgttggtctgtgttggagatcagtgaggatgttcatctgttcagtgtggtggagaattctatactctnnncttatgctgcaagatttgctacatcagttctgatgtgtggttgcattctgtagatgtcagaaaacaggcgtagcggaggaaggcgtgctcagcaggagcaggcagctcagcaggatgaggcaccccagcaacaacaactgccacccctgcccccgatgtcgatcgagnnnnnnnnnnnnnnnnnnnnnnnnnnnnnnnnnnnnnnnnnnnnnnnnnnnnnnnccattcagcagcagcaacagccaccaccccagcctcagatgcctcagatgcctagagacaagcgtgctgaattcatgagaggtcatcctccgacgtttgctcactcttctgaccccatggatgctgaagactggccgcgcacagtggagcgagagtngcataccgctcaatgtgatga

SEQ ID NO: 22380 - DNA, 499 bp, Arabidopsis thaliana landsberg
atgcatgatggagtcctgccttaccctactatatcctacccaagcctatccatgctttaaagacttttttctgacacatttagtggctatacatatatacccatgccttcctaatcacctactcatttgtataaaaaaaacctcttgattttggtaccaactagaaactaaaagctacattacaaccaatcttttcatatcccttttcttgcaaatctcgaggacgagatttctgttaagggggtaggatttgtaaagcccaaaatttatatcaggaaaataataatgataataatgagataaataatatatataattatgtagtgttttgggattatggaacctttggagatcatttgagtttgttatatttgtgcagatacagttaacagagttatattagttaaacaataaataaacatagaaaatgcatatcatgctggaattcttatataattgtgtgggggaccgtaattaggggtacctccaatgctcctta

SEQ ID NO: 22381 - DNA, 338 bp, Arabidopsis thaliana landsberg
agccttgtgatccagtatcatgcatgaactttgtttattgaaagatctatgtaccataaagaagatatttgttttgaaacattaattagaatacgcaaagtttatttatttatcacatctacatatacatttttgagccattttagcaaataaatcctcaaaatcgaaattatttacaaggaatgcgaatgacattagttattaacaattaattaatatttttgattattaccattttttcttatctaatatatttccatcaattctaattacttttaaaaataagaaatctgaagaatatattaatattatactttattaaatataaatatgatagt

SEQ ID NO: 22382 - DNA, 420 bp, Arabidopsis thaliana landsberg
tgtatgattatgttgaagagatgagaaagactaatccaggttcaacggttattttaggtacaaaagatagattttttgagaaattctatacttgcttcgaagctcaaaaacaggctggaagacagcatgtcgacgtgtaattcatttggatggaacatttctaaagggacgcatgaaaggacaattgttgactgttgtgggaagggatcctaatgatgcaatgtttatcatcgcatgggctattgtaccagtggagaacaaggtctactggcagtggtttatggagttattaggagaagacttacttttggagcttggtaatggttttgcattatcttcagatcatcaaaagggactgatatatgctataataaacgtcctaccttacgcagagcatagaatgtgtgctagagacatttt

SEQ ID NO: 22383 - DNA, 1831 bp, Arabidopsis thaliana landsberg
  unsure (1)..(1831): unsure at all n locations
tgaagttattggtacaattttgaagggaaaatgggacaatgagagaactgagttctctttaccaccactgatgaatcttgtaagcaaacaatcagacctaaattcttacctggaaaaacctgttgtgaacttcaccaacttcttatttctttgacttctgtgaaatctggtgtactaacaagatgttgtcttatttagttccttggagaacctggaagtggtggatcctccacaccatcaatggtaggtgctgtaaagaagtggcaaatgtctgatccagagaaggcacgagaaaannnnnnnnnnnnnnnnnnnnnaaatttagaattggaaactaagctaaacggtctgagcaaattagctaaagaccactgggatgtttatctaggagtcattaagcttggtagtgtgctacttcctgaaaaggtatatttcctttcgctgagtattgatttcgtaggtattttacatgaaggggcagtttggttcatttgactcttgtatctcatgtttagtgggtgttacatgctactgaaccaatcaacgaagccattattaaagaacttttagaggcaagagaagctatgttgaggatcagaattcttatgcgtcagatgggtgagggggctagtgttccggtaagtgatttttgttctgttttgatagttgcttcagatctcaacggaccatttgtgcatgattacttagtgctgttgcataataatactcgtccggctgtagaatcttaacagcatacatgatatatgggttccacaaattccgcatttagaacaaattgacttgcatcataattgaccacgagggaccatggaattgcagatagagcctgaatctcaaactcaacttttggattctacaatgagtgctgaaggagttctacttgctggtgttcctggagctggtggatttgatgccatatttgcaatcactttaggggattccgacagcaaactgacccaggcatggagttcgcacaatgttttggccttgctggtgagagaagatccacatggcgtttgcctcgaaagtggtgatccacgcaccacaggtattacttcaggcgtttcatcaattcactttgagtaaacaacattgtttcagtgtccaattattaggtgcgtcaccaagttcggttgagtatactgttatgcatatagacttgggtgctaaatttcttggtgtaagcatttttatacccattgtaaggtctttaactcttggaaaacttgcgggaaaataaaataaagttgatttcaaatcttctcatttgtgtttgttccattcactgcttctgttattggtatatcttcatgcttgtaagagtctggaacaggaaattaacattagagaaagtgacggatttaaagctaccaataatctttacaagaacaagttccacctttaaacaggtgaaacctgtttctgtctcttacaacaatctctctttcgtagatcatggagattttctttgtataagtgtgacagtcactacacatcctcaggtttctagctattttaatgatagaccctggaggtgtatacaatagtccaaaggcaatagccaccttttggctgtgtccttttaatctctctttcttttcttcttcatctacgtttagcaatatctgtgtcaagtctggtgaatatccttcgaattttagttgccattccatctggtgtagcatcttgtagatttctttgcattttgggtgcgatcgatcttgtgaaacgaacctgtgggttttaccttttagctcgacgatgctaaaacctggggtttgtttcatacccttgatagcgatttctgttc

SEQ ID NO: 22384 - DNA, 1953 bp, Arabidopsis thaliana landsberg
  unsure (1)..(1953): unsure at all n locations
aacttgccttcacaacattacttacattatcattggcacaatctggctttgctcaatagtcccagtttctgtgttgcagcaaaaactagctcagatgctttccaggctaatcaaaattgcagaggagttcaacgttgctgtctacatgactaaccaaggtttactttacactagtttgatataatgagataaagcatcaattctttttttgtttcttggttgcactaacttagcaagtatcatctgtttcatttggtggtttgcagtcatagctgacccaggtggtggaatgttcatatcagacccaaaaaagccagcaggtggtcatgtactagctcacgcagccaccatcaggctcttgttcaggaaaggcaaaggcgatacacgtgtctgcaaagtctacgatgctccgaatctcgctgaagctgaagccatatccttttaaccaaatccacacacacacacttgctttgtttttgattatttcatataatgcaatgacttatttttttccttaactgaagaaatcacagtttccagattactcaaggaggcattgctgacgcgaaggattagaggagcgaactcttttatatgtcataatcacgaattatgtctgttcttaacttgctgcttgtttctgcatcgaatcagacgttttaattaagtctttttattcttagtttcttgtttaccaaataagacgatcattacttgattaggcttacanaaccaatctatgtatctgataaagctgcaaacaaaacaactctggttcgtttgtaaaaagacaataatggctttataacaagtaacaagtaaaagttcattatgatcattgattaatcagttgcactgaataatgtgttattcctctccaacttattcatctctattttagtggatgaaaaaactctttaaatttctcttttttattcatctaagtaacgtaaaatagaaatgaaagggatgaataattttaatcatctcgttttctcactttgccagttttttcctgcacatcaatcgatttcataattgctgcaaaactctcatattgttttgtctcctcttttgggttccatggcaatatgacacttttcaagttcgacaagtctcaacatgtttcagcttatatcgacggttttctgaactgctttgtcttctccttttgcatcctggaggttgcttgatttgcactaaacttggaacataaggacacacatatagccaactatcttggtgggcaggttctccgagatcaacatctcggacttgtccagcctctccaatgatgaaaactttgtcgcgtttcaacggttgcccgaaaatcacggcgactttgttcacctcgtcaatgaagaaactccctgtacaagaataaatcatcgggcagtcacccacaccaaaggtcaaaaacttgctccacgacaccttatcggattcaatcgtagtcgtaatccatacctcaacaacaacatcgcgacaaaataaagcagcaagcttctcttccctaacacaagatagagtcacaagactctccttcatagctctaaacggcaaaggcagaagcggaccaaacctctcacttgtaaaatcaaaacagatgatgtgatcaacaatgataaaagggtctgcgttccactctggcttcctttctttagcgcaccagtaagtgtttcccttgagagaaacgccaatatcatcaaaaaaccttatacgccagtatggagtgacatcaagagttttccataaaccagagtcgaaatcatagatttcatagaaaacaaaatcattgtaggtatagaaataatcaaaaaacctcaagagtttaaatgatttcatcatattattattcttgtagtacccgagagcgtaactgaactggtcccatccgcaagggatgtgtgaaaatctgacttggataaaccttcttgcccccaagcggatcca

SEQ ID NO: 22385 - DNA, 418 bp, Arabidopsis thaliana landsberg
ctgactatggcctccgtccggatcgacccgttctaactagcctcgggacctatatcaggggtggatcgctgtctgccatacacggtgtaagtctaatgtctcctatagacctgtgttaactgtcgctcgctatacataaacagtgacacacctgtatactaattgcacatggtccatcgataggctggcattcctggggctgatatatatgctgattctgcacgcccgtcgcgccgattgtggcttttctggatggtacacagcgacagtgggaatcgatcatatccattcatgctcgtcacttattatatgactaggcatatgctttccttatgagggtcgttgttacttcctccgatatcccgcgcttggtagaatacctgcactgtgacattcacagcgctggtcggaattcaca

SEQ ID NO: 22386 - DNA, 1163 bp, Arabidopsis thaliana landsberg
agaaaaagatcaaagcggtcatcatccacggacattgaaaagactgataataacattaaccaacccattatactagcgtccaatgactttcatcaaggtaataactcattaaactttttttattgtcaaaaagtattatacatcaaataatcttatggttttctaactatgtaatcatctggttgcagagaataagtctgtacagaatccaccattggttgagacaaagaaactggatacgtcattgtcgatgaatctacgtcctccaccatctgagcgacataagtcgtttgatgatgatgattcaacaatgagaaaacctattgttgcaaagaaagctgctgttgttgttccttcaaatgtgaacacatatacggtttcagatcttcaagtagctaccaacagtttcagcgtagataatcttctcggtgaaggaacatttggaagagtatacagagctcagtttgaagatggaaaggtatttaattttatataatcctcctctacttgtaagagcacaatgtcataatattctgctactgagatattttctttgatctactaggtacttgctgggaagaaaatcgactcatctgcgcttcccacggaaactgctgatgattttaccgaaattgtatccaaaatagcgcatttggatcacgaaaatgtcacaaagcttgatggttactgttctgaacacgggcaacacttggtggtctatgagttccatagaaacggctcattgcatgactttttacatcttgcagaagaggaaagcaaaccggtgatatggaatccccgtgtcaagatcgctcttggcactgcacgtgcattggagtaagtctttaaacatctcaatcacattattgctcaatataatagcatgcagcagagtctcatggaaagtattgttgttgttgcaggtacttgcatgaagtttgctcaccatctatagttcacaagaacattaaatcagcaaatattttacttgactcagagctgaatccacacctctcagactcaggtctcgctagcttcctttccactgcatacgaggtatatatagtatagactaaacttctcagaattctagaatctgtctctctcttttgttcctccatggaacttgttcctaagtatgcatgacattgcgcagctactaa

SEQ ID NO: 22387 - DNA, 498 bp, Arabidopsis thaliana landsberg
aaacactcggcgcacatctcgtggaaggctcattctccgatctctcaaagccttgtctctgccgtaaagcaagtcgacgggggtgggtgcgccatgtccggtgtccacttacgcacccacaatatccccgttcagctcaagctcgacgcagccatcaaagaggccggtaacgtcaaggtaaaaggactcatacatcactaaacacttttctctctagcgtagatgtgacctttctcatcagagtgtaaagcaatttaaaataccgattattgtagctggtattccaaaaaagttgctttggcacatataccaacataacataatagtatatgtgttaaaaaaatatgacggtacaatgtatctgtctgcatcaatgacatatgcatcaatgacatatgcatcttttgaaaatagctgatatattacggctatcttctgctaacaatcgcaagtgactcgaatttaactctatagacatatactcatttttaaaattta

SEQ ID NO: 22388 - DNA, 1236 bp, Arabidopsis thaliana landsberg
ttcttatacaattttagtggtggggttccttcttcaattggaaacctctcttatctcaccactttgcgcctctctcgaaatagattttgtggtgaacttccatcttcacttggaagtcttttccatctcaccgatttgatcctcgatactaaccattttgatgggtaaattcccacttcactgggaaatctttcgcatctcacctgtatcgacctgcacaacaattattttgttggcgaactaccattatcacttggaaatctttcttgcctcacctctttgatcctctctgataacaacattattggtgaaagtccatcttcttttggcactgtgaaccagttggacatcttaaatcttaagaccaataagcttagtggcagcttccccgttgcactactaaatctaagaaaactgtcaacattatctctctgtaacaatcggttaaccggaacacttccttctaacatgagttcacttttcatcttgaagttgtttgacgcaacggaaaaccatttcacgggacctctcccttcttcccttttcaacattccctctttggaaattattactttggaaaataaccaacttaacggtagtcttgagtttgggaatatatcctcatactcgaatttaactgtgttacgccttgggaataacaactttagagggccaatccatagatctatatccaaattagtcaaccttaaggaacttgacctttcaaactacaacacccaagggttagttgactttaccatcttctcgcatctcaagtctatcgaataccttaacctctcccatttgaacaccactactacgattgacatgtacgagatcttatcaagtttcaagttattggatacactagatctctcaggcagccatgtttctactacaaacaagagttcactttctaattcttcattggtattgataagtcagttgtacttgtcgggatgcggtatcaccgagtttccaaagttcctaagatcccaagagcttatgctgactctagacatttccaacaacaagatcaaaggtcaagtgcctggatggttatggatgctccctgttttgaactacgtgaatctttccaacaacactttcatcggtttcaaaagatcaacgaaacttggactcacctctatccaagaaccaccagctatgaggcaattgttttgctccaacaacaatttcacaggaaacattccatctttcatatgtgagttgcct

SEQ ID NO: 22389 - DNA, 453 bp, Arabidopsis thaliana landsberg
  unsure (1)..(453): unsure at all n locations
gttctggcgttatcagtctgcttggggttggcacgtggctgggaggcgacacccggcgttatctcaggtgcgaggacaacacccgacatgtcccccgcgggggtgccggcgtcgtcaactcgctctggttcgacagccgacgaggtgtcgcctcctgcctagccatggttgccccgtctcctcctcctccggcgagaagggtggcggggtaaacccaggtgttcctcttccgccgtgggaggaagtcgtcgtcgagttcgccttcgccgggcgagccgacaaccatcgttgttgccgtgctgcgaggggagcagtaccnnnnnnnnnnnnnnnnnnnnnnnnnnnnnnnnnnnnnnnntgaagcggagcaccgtcccgggctgaagaggctgctgaaagctacccatctggaactcaacgggaaagtactcattaacacgcagcgagccccta

SEQ ID NO: 22390 - DNA, 1569 bp, Arabidopsis thaliana landsberg
aaaaggttaaaagtttaaaaaaaaaattccaaaaaaagttcattccccaccatccatttaaaattctttccccatccaatttctattaaactttcttttcttcaaaaaaaaaatttaaaaatccaaaattcatgcttatgaagcaagaactcaataataattacatactattgtatcaatatatcttatattgttattttatgtatttatgataacaaaaaaaattaggatcttatatatatagataattatattacacatgaaaaatgtatatttgatatttcacgtcaaaagatgaatcaaagcatacaaattgtaactatataagatgaatctaaacatatatgtaactacacaaactagcaacaaagaacatacaacatagtttttttaacaattttcaaaacaataacccatgcgtagcatgagtatttatctagtaacgttaatagtttgtcagaatagactaacattgtttttttagtttaaatggactaatcaacataaacttctcgaatcttggttgtacgcgatgaattagagattttatttgtgaactaaccaaatataaaatgctttatatccttttaaatctattaatttggctagagtttactttgaactctttcttttttattttattttcacagtttttttttcctatcttagttacttatttttttatttttgtttctaaaatataataatcaataaaaaaaaccaaatgaattgtggactgaatattatacaagccattcaatatgtactatttttgattggatatagcttaaattttcaaagattttaagtttttaggcctacaaagtatattttttgtttagtgcaaatttaacttctcaactattttttaaataaagccatatttgataattgatcgtatgtgagtgggcctaataatgaattaggcctcgacgtcaaaagaaatttgaaggtagcccatttatctttacttaacaatacaccacgagcggttcacttaagcctttaacagccaaatcttgtaccgttagattaaatcactaatcgcatcttgtccgttcaattttcatctttcctcacctacacgtaaccctaccattatagcccaagtccagagagaagaagaagaagaagaagaagaagaaacaaaataagaatacaaaacacagagtagaagcgaatagagaaagattagggctttcttggatttttgaattcataattttcttcttcacttgtgttttttctcattcattatcccaaaagcttttgataatccaaggttcgtttttttcttctactggtaactgtactgttctatgttgttcatattctcacactgtaatttgttggctgttcaatgggttctgtttggttatggggcacagtcaatagaggaagaaatgggtttctgaatttaatttgatactagttcttttgaattgttatgctttatgacattctgtttggttatggggaagaagaaatagagaaagagttaggtttctggcttctactgaattggtttgattcggggaagaaattactttatggcatttggatcataaa

SEQ ID NO: 22391 - DNA, 2597 bp, Arabidopsis thaliana landsberg
ggaccagatgatgggagattccccaataatcatcgctaaggtaatgttatctttatcttttcttcagaggttattcttgaggtggaaattggatctgatggggtttgtcatctttgatgttagttccaaacgcaagaaatctactgcgttcgtgacgagaatggagaaatccaagaaggtgggcaggtaaaaaggaaactgtgaatcaaaatcataaatcaaaccccaaaacatatgtgcaatgccagagtccttaaagaatttgttgttgttgttggattcaggacacgatacacacggtgtaccatgaatgggcaatgcaacaagtggagacaacagaattaggggaagatgctatttatcccatttggaggctcagagagatgcgtagaaatggtgttcaagctctcatttaaatcttttaaccttataataaaagctaagcctctctaatcttctctgcaatgtactatttatatatatgaaaacataaaaaatttcttaaagcataatcattataaaataaagagagatttggatttaggaagcaccgtagagattaagcaagaagtggaatattattggccgcttctgtcttgtcttgcgtccgaattaagctgaaacaaacttctatataatcctctgcttatctgcctttgctttatccaccaattttttttctcatctctcttcactctctcaatctcaacaatcttaagagtcatgtcttgccttagaattaggcttttacctgccaaaagagcttggaaaagcttcaccgccagcttccataaactccggggatccaaaaccaaacaccacaccaagtacaaagcatcaacttcggacaaacatttccttcgttcaagccaccgatccagagagaatgttcgagacagagattcccgtgtttttttcatccgcctgaagagaggttgtttgttcaagaagaaacgcaaagatgttgtatatgtggataagctcttcagggagcctgtagctgtgtccaattggattccagcaaagcaatggaaaccgaaggaagaattgtttccggagaagggaatagacgaaagagctgaagagttcatcactagagtcaaagcagagattctcgcttcacgcaacttgtagtacccatcatcaacacaataatatcaagacttgataagtagtaattcttctgtgtataagtaaaccaacaccaactattctgtacaaaattattgtctttggcttttggctcaactctgtaatcattcttgtaaatcgtatatattcctcgaacaatatattgcacatagtagcaagctgaactaatgagaaaagcatgtgactttgtgaaaaaggtctcttgaatatgaaattacccgtttgatgagaaacctgcacctgcattttagtcctttaaaatccgaacgatcagtccagaagttgtctgaacagttttcaggtgaccggagccaatgagatcacgtacgtgaaatctcacatccagaggagagaaccggagccgtttcttttcaagctcagccaagaacatctctttatgtcgcttgcgctttatcaatgagaggagttcgttccttccctaatttttagattaagagtaagaaaaggtgcttgaggcaatcacttgggaagaaattgataaaaaattaaatagaggtacctgcgatagacccttccacaatttaccgatactcggaattgcaaaccagtacatgtctggatcgataagttggcgtgtctgagataaaactatttctagttataagagggaacgatttacatggagtaacagataagtagaagtataactctttacttacgagaaggcctgcgtttattaagagagtgatgtgtgcatctttcacctttcctcccaatgacaacagcgaaagctgcagttcagtatcgacagcttgtgttagttagaaactcatgttgatagaaagtgataagtaaagagcataatgattaaaaaaaacttactagctcatgatgcccgatactaggttcaagttttgaatcaaggacatgcattttgaacaacttgaaaatttcaagatcactctgtttcttctgttccatcctcttcactattcgatctacctaacatacggattataataagatattgtccacatatattgattagctaaaaattggaaagaccacctttagaataccaataataagaaaccaagtctattcatgagaacgttccaaaatactaaagctaacacatgaacaagacgaaagactcttgaaatggagcaaataccaacctggttaagatagtcatccaaaaagatgatggcatgatcatcttgtccagtgttgagtttaaaaacacgaacaactttctcccttcgtaaacactgcaccaaattcaaattgattgatcaatccaaagaactctaggaagtccaatagagatgataaaaatgggaaattagatagaatccaaagtacaaatattccaacatcaatagaaccaaagtagacccacccattacgatacaaaaacacaaatggtacagttctaaacttaccaggagacaccttacagatacaacacagaggttattatt

SEQ ID NO: 22392 - DNA, 811 bp, Arabidopsis thaliana landsberg
cctgcaatttacttgatctgcgactgattggacgttcgatagatggcccttgactagtcttcatgtcacttcgtgctttgatgcttctatcgattagacttgtaccttatcagctatatttggttttcctttgatccttgctgatatctctcttctgtcttggattattcattgcatatactgtacgaatgtgacagttttggaaaatatactgataattcctgggcgtccccccccaatgggtgtaggcaagggacgacttggtacgctgagcatttagcaaactgcttctaagtagtaacttgatgtgaccgcgggtgtaatcatatcgcccgcacagttgactggagtcccaatgggtgtcgtgttacgtgaaacggcgtcagccgcctgacgtgtcttcagacggtttgaattgcatattgaatttttgcgactgttcagtggctgtggtaggagatgagcggttgccttcttcttcttctataaatagtgcctttgcttctctggctttttcacgtctcttgctgctgtttactctcctcttcttccctccactggcaccatgggcaagagtaagaaaggtaccggttcttcgcctcgctctggtgataagcgcaaacgtgagccgactcctccatcggaggactttgatcaactcagagtactcggaggaggagttctcctccgagtccgagggatctccggctcctgtctctcccccggcgtcgtctgatgattcagacgactcccaggggattgccgcagaggtctggacctacatccgggccatcgagcgctccgagctcga

SEQ ID NO: 22393 - DNA, 942 bp, Arabidopsis thaliana landsberg
  unsure (1)..(942): unsure at all n locations
agttccagttcctcaaccacacggttcaggtcatctcacaaccaatacagtgtggaatctcattaacacttagtgtcatgaatgagattcaagggggaagagtgatcttggattcttcgtgtgttaacaattaggaagatccactggagtgggacctgaacttaattaagtctgtcaagctattgggatctgatatctgcaatcagatcattgatcaagccggtcttgcaatccgtcttagacatatgctgttggctcagggctatattcgcatgaaagaccagtcaaagattgatacacatcttgctcgatgtgaatctattaggtttctgctaggatgtgtgtgtgcaacacagttctatgtttatcagatggtactccagaaagggatcttgagtagtggaccccagagggaatggtttgagagtcatccaagagcattcggtgttccgggacatccatactcggctcatagattgaaaacagctgtctactgcttaaagcagcttccggagacatactatgagcgtttgcccatgtttcttgaagaaagaggttatctccaaagtggtcgtgacaagaggttgtttgttttgtcaaataacaggggagtgttgttggtacaactgtatggagaaaatgtgttgtatggctcgacaaatcaaacacttgtacaagcttttgttgaacttattaccagagagtttgaagtaagtatgtacggagttctgaggtacatgcagggcatacagattaagtaaactgatgagggcatatctatgtcgcagaatatatacgcaagaacaatgattgagaagttcaaactggatgcacaagagattgtcacaacaccgatgaagatctcgacaagacttactgcagatgagagaggaggagatgtaaatgttagtatgtatcangggatgatcgagagtcttcagt

SEQ ID NO: 22394 - DNA, 347 bp, Arabidopsis thaliana landsberg
cacgtgacatgagagggtgaaatgcgctttgatatgatgcaacacccatgacacttaggttttgtttatacacgacacggacacctgtcactatactggtttgaaattgggaaaaaggaggcgaaatgggaagagaaaagagagtaacgcccaaatttggtgagagaaaagaagaaaaaaattataccccccaaattcagggtgttacagctcctaaggccgacgagcgatgacgactcacccccatgcccgagcggtggcgtcacaccctaacccacgaacgatggtgcgcacccccgacatgcgagctgcgtcgatgccacacaaggtgcgaggttcgtgcggcg

SEQ ID NO: 22395 - DNA, 576 bp, Arabidopsis thaliana landsberg
tatatattaattctttatagagttcaattttaatatttttactacatcaaaaaaaaaattgttttttttatatctcaataaatatattctatttgtaattaattgagaaagattattgattataggggtgtcaaaataggttaagattcatgggtcaactcatcttaacttaattcaattcatgaactctgatgggctgaaatttttaactcaaatgggttgattgatcaaatgagttattgggtcaaatggttttatgaatgaaatgagttgggttgtaatgagtcaatggtttatctatttaaacccatcaatttttgtaaaattgaatcaaaccaagttaaatctctaaaccaatgttaatttgagtttaaccaaaatctataaaccaattgaataaagggtgattttgaaaattgtcctatttttgagtttctgtttgaaaaagacactctatcctatttttaattaaatacaattttaaatatcttaaatgacaattctgtttagatttaaaacaaaatctgtatttttaataaactaaaattaaatacaaatttttggaaaaaaaactta

SEQ ID NO: 22396 - DNA, 1382 bp, Arabidopsis thaliana landsberg
cccgggaggtaaaaggttccgttaacgtcaaggtaccaatggacctttgttttgtcaaaacaccaagtacactctcagatggctcagaccacattctgaccttctctgctttgactatatcgagtagattatctggaagctgcagatcaccacccaagatctggaccaccttagacatgtctggcctaattgctacagcctggtgcgaacacaacactcccaatttcaaaacaagctcgagctgttctctattgtcttcgtgacggattccatcattgactgcctcgagaatatctccgttttcccagcactttaatgtccattcagctaggacgacctcgtcgggggctgttcttcgctctatcagcctcctaccgcaagagacttctagcataaacagcccgaaggcatagacgtctgtccctgtggttgctcttccgcttcttatgagctcccgggcaatgtaccagaatgtcccagcaactctagatgtctgaggatcataaccctgatcgtacaacttagccaacccaaaatccccgagccttgcattcatttggtggtcaatcaggacatttgccggcttgatgtctcgatgaattacaacttgtacccattcatgatgcaaatagcagagtgcagaggctatgtctttgatgatcttgaaacgttgattccaagtgagttgctcttgatttgctctgtggtagaggtacttgtcaagacttccattgggcataaagtcataaaccaagtagagttcctccttgtacctacaataaccctgaagcctgactaggttctggtgtctaagccgaccaattgtcgatatctcagccaagaattcctgcattccttgttttgaatcatgtgaaattcgtttaacggcaatctctgcatcagaacctggaagtgtacccttaaagacctgaccaaaccctcctttgcctagaagttgtttgaaaccttttgtggctttgaagagttctttgtaagcaaacctatgaggcccacattggatctcccattcctctagaacctctttaacctttttatgtctcctgtagaaaaagatacttaaagctgatgcaacaagcgcaacaaagagaaccaatgccaagctggtcaccaaaacaatccgataaaccagagatttttccttgggatatggaggaaatgttggtattcccaagtccaggtttggaacatcaacgccgccatgtacaaaccaactcaacatgtaatgcattgctctaacagaccccgttgaggctgagaagcccacatacatgttctccaaaatatagggtgatagatcttggttcaatgaaagaagaggcttgttcgggtaataagcctcctctggtgatgataaggtgaca

SEQ ID NO: 22397 - DNA, 603 bp, Arabidopsis thaliana landsberg
  unsure (1)..(603): unsure at all n locations
gtatatccttacaatgccatcatgggccggggctccatcaataagttcgaagcagccattcacagactgtacctatgtatgaagataccaggtccgttatgcgtcatcacagtcttcggcnnnnnnnnnnnnnnnnnnnnnnnnnnnnnnnnnnnnnnnnnnnnnnnnnnnnnnnnnnnnnnnnnnnnnnnnnnnnnnnnnnncaacgcgcccgccagcccaaccaataagcagcacgacaaggcacagctgcagagcaacgacgggaccaagactgtccccctcgaccaggccacgcccaggcagacagtcattatcagcgaagaccttgcttcgcatgaagaagagaagctcctctgctgcctgtccaagaacaaagatgtcttcgcctggtcggccctcgatctggtcgtggttagccgctcaataattgaacacagtctgggaatcgacccttcggtaaggccgaaaaagcagcggcttcgcaagatgtccgacgagaagacggaggccgccaagcgagaagtgcactgcctcctggaagccaaattcatcgagccggtgcgttacccacatggctctccaatgtcgtgatggtgcaga

SEQ ID NO: 22398 - DNA, 593 bp, Arabidopsis thaliana landsberg
tcatctcactttcttcattcctaacaaaatcatcaacaagtaagtttttcaaaatctttcattaaatttataaacttcataagatgataagcaaaggtagagctagggaaagagatctcacgtatcagcaatagacaaatctgggaacagcttccgaagaatgtctataatgtcgtttacactcatatttggaccatcgatgatgtatctgccattggctgaaggagtctccaacgctttgatatgaaccaaggcgacatctcttacgtccgagaacctgtagtatcttttattgaaagggttcttaccatttatgaaatccacaattagctctaccgacatgttaagagttggttgcaagagtggtccgcaaataaatccaggattcaacacaaccatgtcgattccattgtctttggcaaattgccacgctgcattctcggccaaaatcttggagagtgaataccaattctgaagaagaaaataagaaaagtgtaagaaagaatccgaactcttgaaactgataagtccacaacaaaatcaaaggacctttgtctccctgcatagacttggatcggagaagaaagtctcgt

SEQ ID NO: 22399 - DNA, 539 bp, Arabidopsis thaliana landsberg
taaaagatttatttatttttgtgaaagaaaacacttaaagacaaaatttgagtgtaaatgtgataaaacaaaggttgcttaataagaaaaagaatgagaatttatattgtattagctagaatttgccgaaaaatgcatgcgtcttttacatagtttgggaccttatattatatggttggtatcaccattattgaccattaatcttctttaatatgtctgttttgattctcaaacttaatgttccaatgttcaaatttgaactactttgacctcttcttgggatttgatttccggcccatcatgagctcctgagctgctaccccttttcgacgtcttcacttcgcgtaactcaaaacctctagctcaactcgaaattaagggtcgagttgtttgtgcttatgaggcaatctttggttgactctccttaaatcgtctttctgtctatgaggcaatcttccgttggactcgaacgttaagttcacgttagggttggggttcgataccaacaattagtcccccaaatctttcgagctgtcatg

SEQ ID NO: 22400 - DNA, 348 bp, Arabidopsis thaliana landsberg
ctccccaccaccacacttcaaggcatccaagttttcaaccattgcattcaatacaagagctctagacttcactcccagacacaaaacaaaagatcaaatcctctccaagtcccaatctcattccaaagacttagtggcttgtgagagagagacatttgtgttcatttgagttcttgtcgcttggatcgcttttcttcttcctccattcttgttctcaagcaacttgtaatcaagcacgagacaccaagttgtggtggtccttgtaaggggccaaagtgacccgttgaattaaggagaaaagctcactcggtcaaggtgacaatttgagagaaggaaaagggttgtaag

SEQ ID NO: 22401 - DNA, 593 bp, Arabidopsis thaliana landsberg
  unsure (1)..(593): unsure at all n locations
tctaatgcatcgaaacatccaggctcctttctatctttgttgtttacacaggttcgattccgagcgtcnatgggtggaacatcaatgttgagattagcgctaacaagaaaaacatcactttggtttgttgcattttattttttgagaatattattttttagttgttttgtgggtttggattggtgagatgataagacattgtatcgtatataaaaagaaaataatttaggattgtatggaatgtaatcttatataacaaagtttcactggaaagattgggaaatttttatttatttgtttgaccccatataaatataattattaagagaatccacaattaatttgtgtatataatatgtcatggttttaaggaaattatatattaccgtctgaggtacgtaccaccaatattcagatgtatcaagtgaaaaagaaatgtatagttgatgtaagaaaattaaaacgttttctttttcttttatcgtatcatttgaaagagagaaataattaattttatcactttattcagtttggtagacaagattcccgttggagccagtataagtactttctttcttttttcttttttttac

SEQ ID NO: 22402 - DNA, 516 bp, Arabidopsis thaliana landsberg
gcaaactatccaaagcgctacagaaacaaagcaaagattttctattaccaaaaccccttaaacaaatcaattaacataacaaagaataagaaaaaaacttgcaattcacagaaactccagaccaacaaacacaacgcgaattcgtttggctgtgccaatatcaaagcagcttcaaaacgaataaaaagataataaaacgaataggacaaaaaaaactggtaaatattgaaagttagaaaccctagaaattaagagaattggaagaatgcttacagtaattattgatacaaatcttctcggtcatgaatgatttcatcgagagaaacctgccagccagagaaagaagattactgtacagtgataaagttaactggttacaagttacaaatcggaagattaagaaaaccctagaaatcaagagaatcggaagattaagaaaaccttagaatcaagagaatcagaagtttacttacataggtggaaacacgcttccgtcacgatactagcaatcgagag

SEQ ID NO: 22403 - DNA, 527 bp, Arabidopsis thaliana landsberg
agaacatcagagacccatgtactatcagaaattgggtagatgatatcatcattaagtaatttaagaatctcctttttaaccacatctttcaaatttggatttaatctcctctgtggttcatcactagtatatgattcattttcaagatggttcctatgagtacataaactaggtgaaattcttttaatatcagctaatgaatacccaattgccctcctatatttcctaagctcatttagcaactggttcacttgtttatcacttagtccattattaataataacgggataagtatcatttggaccgagaaacgcgtacctcagaccttttggaagaggcttaaggtcaacctttggagctttgagttttgaccagtcatctgaagttatattctctcctccatggtcgagcatctcagtaaagttcgttttttcaacgattaggctcatggtgcatcctgatactgcttcttctgagggaacaatcaattcctcaaactcttctggtccttccattggcatgtgggc

SEQ ID NO: 22404 - DNA, 614 bp, Arabidopsis thaliana landsberg
  unsure (1)..(614): unsure at all n locations
ccaatttagaccctggttggaggaagcttatcaccggcgtttacgaggtcatacatcaaagctgtgaaggaagcatttggggctgatcaacctgcaaaatatggagagtttctcgacatcatgctggatttcttcggtaataggtatgtttggtttgctcttaaacagtctacacatgtgagagattgattctcatgttatttttctctttgtagagtcgatttagctaccgtcgttccaaggannnnnnnnnnnnnnnnnnnnnnnnnnnnnnnnnnnnnnnnnnnnnatgccttccttccagctgaggctaaggaaacatttcatgatgtacgttcatacatctattctgtgaaggaaacatttcatgatgaacctgcaaaatatgctcagtttctcgagatcttgaatgattatagcgcccgtaggtatgaattagtttctccatgttatatttgattttctcctaatttttgcttacaaaacaacacacacatgtgaactgaactgattctgatgttactaagtctctctttgtagagtcgatgctcctagtgcccgtgcaaggatgacggaactcatgaaagacccaccggatctggttctttgtttca

SEQ ID NO: 22405 - DNA, 602 bp, Arabidopsis thaliana landsberg
cgatatataaaccctccataggtgaagagcatgtggaccaagaggagccgccctatacggaggagtacgagttgatctaggtggcgtctccgtgtcagcttgatggcgacaaggaataactatttagttcgtcttattgttatcatttatttttgtaagacttccgctatgtaataataatacttgtggcatttatctctatatactttgtcattatatgtgatgttcttctttgacgtacatatgagacacactcgtctttatctcttaaattcaggtgtggcataaaagtacaaagggatatagccctattcatacctatgcattcactgttttggactgaacttactttatgattatagatgttgagatgaatattaaaaatgtcaagccaaaataaagagggtataaaaaaactatgaattgccttgaccatatcgatgtggattcatataaataaaatcatgtgaattaaattaaaccttgattgatcttaacattcatgtaaagaaaatattcaattaaggatcatattgaataaatgtgttctaatatatgcttattatgttgtgatttgagtatggtgataagataaatatagc

SEQ ID NO: 22406 - DNA, 1017 bp, Arabidopsis thaliana landsberg
acaaattttctcgccatacttctgaattttctttatacgtatgccgtcgacgaatctctccacccatctccttctagttctccctcctctatcacgaatctcttcatttctttgaaactttcaacctttgttgtttatttgcccactggatctcatattattaatactccatgctatttaacaaagtcacatataatatttgtcatgttatttaacaaaaccccatgaaatatgtaaatatttatcatgttatccaataaaaacccatgtaattttgtaacaattctatatatttgctaatatttcgtattttataagagaattgcatgctttttataaatatatcatactatttctgagaaacacattattttagagaaatatatatataatgtatatatatcgtttatgtattttaaagaattacatgatttttgtaaatatatcatgctattttaaacaaatacatataaactttataactaaagctaatggcattattgtaaaaataagtaaacacaaagatatttttgtattttctctttttcagaaaatgttatttacctaacttttctgacttattatcattctctcaattcttttccatttcaggggtagtttgtaatattagcctaaaagaaaaaagaaaagggcaaaaaccctaaaaattcaataaaacggtaatagcaatcaactccttaatctcttaatgatttataaaacgtaccgaaacaaaacttaattattataactagcccctatagttattttaaataaatatctgtctaataaatttgaccaaacccttaagatctaattttctctgtgtgatctgacctctcaacaatggcggcttcatcagattgcggtgcctccgacgtctcctctgatttttcagactctcatcgtcgccgaaaggatcgccgtcatcatcgtataaacgatcgagacagagactcgctcaaagtaccgaaaaagagcccatccaactcgaaaaaacgccgaagacgccaacac

SEQ ID NO: 22407 - DNA, 677 bp, Arabidopsis thaliana landsberg
caaattgatcattctgaagcaatatattctaataatggtttaattttaatcatacttttaaaaatagctacctttatataaacagtgtaaaattgcttaatttgttctactttcatttcatctcctgtctacagataggtcagaagaatttgatgatcatatatttgactgtagtagtcaagaagagtatgagtcggacaaagatttaccgagcgatcaggttgttggacctaaatatatgatcgacatgaaagatttgttaataaggaatttaaacaaggagtttggtgttgcagcttcaaacaaagatgatttgttaatatattatatatattagaaacaaggaaaaacttatataacatttttgttattgatgttttttcgattcaggttatcataacgaaggtgatgcgaatcacacatgtctacattgtggtgtaattttctggtacagtgaggactaaatagaagaaggaggagtgctaatccaggttttacaggatgtcgtatgcaaggacagattgtcatacttatgttaaaagaatcacctaaatatatgtggtggttggttacaagcgaccatgaagatgctaaattgtttagagcaaatatcagaccatacaacatgttgttttcattgacttgatttggtggcagggtagatcgatcaataaaaa

SEQ ID NO: 22408 - DNA, 509 bp, Arabidopsis thaliana landsberg
tgtgtccgtattttatcatctacatatacatttttacagttattttgtgaaataaatcttagatttggaacttatttataatggctgccactggcttatttaatgcgaaaattaactaccaaatcaaagcaaatcttattcaaaggaatatgctcttattccatggcctaattatttttgccaaaatggttaaaatattttaaaaataaataatcatttgaaagaaaattttaaattaatttaaattataaatcttttaataaaaattttattaaaaaaagaaaaatttaattttcccgaacatgattagatagtgggactagatggtgggccgggttatataatattataatatataacctttccaccatttaaataaccattcaaaataaaactttaaaatggattagaattaaattttttttaaatgaatgttttatcaaaacaaaaataccatttgttgtctatctttactgacggggtttagggcaggacggtttttttttttt

SEQ ID NO: 22409 - DNA, 602 bp, Arabidopsis thaliana landsberg
tgttgtaagggcgagagactccaagttgtgtagattcctcgcaaccgggatatagtgaaaggaagaagatcaccgtggtattcaagttgatcattggatcacttgaaaggggttgagtgcaaccctcgtccattgggacgccagaacgtggaggtagacaagtgttggacttgtcaaaccacgggataactcgcgtgtctcttgtgattgctttttgtgtgattgctgtgattctcaagagctcgctttatagtcacttggcattatctctctaacacttaaccaagttttgtggctataagttttaagtttctacaggatcacctattcaaccccctcgaggtgctctcaattggtatcagaggcgttctcttcacaaagggactaatcgcccgaagagatggatcctaagggaaaggggatggtggtcaacgataaagagaaggagtcatcttcaacgagccaagggacgataaacctattgattctggctcgagtcataagaagaaggacggaaagaagaggcgtatcaagaagatcgtctactacgacagcgactagtctcttcttccaaaaagacgacgactacgatgagaaaaaga

SEQ ID NO: 22410 - DNA, 565 bp, Arabidopsis thaliana landsberg
gctctcaggagtctgtgaatagagtgcaatctgcagccgaggctcatcgggctctgtcaagacctgtcttatgaaagctcttctccaccacacctcaaatgctcgttgcacatttggacaatcatcacctttgctcagaaaccgatcaaaccatttcatcagaatcacttgttgttgtctcaacgacaaagtcaatatggtctggctgagtccatcctccaccagtttcctatccagagatctcgaggataaccgtctcatccacccgaaatcatcatacaaagcctctaaccatgtattcagaaccgcaaacctagtctcccgattcaccaagatccttcctttaccaataccaacacatatctgcgcggtgatcttgcttatttcgtgtctgtacatcgttgggatcttggaatgaagattcgctagctccttttgatccgcccatagtttcacaaactcactgcacagtttcttcttaatcaatatatctaccatccacagcatgttatcagcttctctggcgatttctcccatcaaagcaccacggtcttttcccggatca

SEQ ID NO: 22411 - DNA, 1078 bp, Arabidopsis thaliana landsberg
cctgagccatgaatatgtttcatgcctaaatatttcatgccataaatggaacctaaatctgttttgaaacaattatagaataatttcttgttaaaatatatacaataagaaaccatgagccacatcatacaaataaatgtttattctatctcaaaggaaataagaaaacctaacttgggctataaggtttcccacctaaaaacttctatccacgtctgtgcaaaatctcacgaccttatctggaacggtgagtgagaaaggaagtattagtcctatgaagctcgtagaaccgtttcccaagcaccatacttggagctgaaagtgcctccaccatgtctgtctgcgtactcaaccattgtcgctctcgcacaatcagtccacgtttgagctatttctttcagagaccctggttctgaaatttccctcatggacaaactgaaccttgatcttgttctcgcggatagatcctcatacttgtgtacactgaaacatgtgaatataaatccttaagatcatatatgtttagtccaaccgttattacttgatttctatgtaaagtttcatacctagtgtcaaaggagatttcatctagaaccatcggggaactatacggataatccaaaggaactagtaagcgtaaaggttgaatctgtgcctgcatcaaacattggagacatcaaaaagctgagcacagtgaggaaaaagaagaagtttggagagacttacgatttttccagacttgtaatgatctttgaatgtgacactgagagccacaggagcataagtacacgtgactattgttcctgaagtatcttcatcacatatctccaccactgtctctacaagtctcccatttgtttctttgatttcttgcaaaatggcatcaccaggctacaagattgaaaaaaagaatttatttcgacgtttcatttgctttcgtagttcgataaaacagagtagatcttaccgcaatattgttaactttcaagccagatgatgctgtggaatcaacttcagattcaaggctactgaactgttcataactatcaatatgtgatgacatatctcgcgacacaat

SEQ ID NO: 22412 - DNA, 658 bp, Arabidopsis thaliana landsberg
  unsure (1)..(658): unsure at all n locations
ctcatagcactatatcaatatagtatcatagatattccaaatctatcttcatcaaataacccctaaagctataatcaggatggggatatttctctgggctgtaaggagccaggggctggagccgagcgcaaagtgcttctgcagtatgcacgagcttttatacgagacgaaggctactatcaaagaacagtaccataacaacttcggttgttatggatttattgctcgccccaatgcaagccacccagtgccaacattccggaaaagatggcccagagcctagatggaggagtggttttacattaaaaatgatttaaagaaaatggaggatatcaaggaagttatccagcgccccatctggtgctgcttcagtctccgaaggccgaaggtggatattgatggcgacgttgaagtgtgtcagaaggcctttagtacatgtgtgctccttcattagcacgagggatttgattcaagagcacatagccttcagggtatggccacttgtggagagctgggatatgcagaagagaccactgccgaatccagtgaaggtggtctagtcagcatgaagtacaactttagatttagggagcagtttgatgagtcagccgannnnnnnnnnnnnnnnnnnnnnnnnnnnnnnnnnnnnnnnnggggg

SEQ ID NO: 22413 - DNA, 1004 bp, Arabidopsis thaliana landsberg
actattcgttgataaactaaacgaataatatcgactatccaaccaagaatattctagatgcatctttactgtgtatggataagtcagcaaatacattcatttgctctatccatatagaagatttaagttcacaaaaaaaaaatctagaagacggcttaaaaatgcatgaaccgacgtcaaaaaaaaaatatgcacgaaccagattttaataacttcgacgaccaatgagaaagataataagttgttctagtagtcttcaaatattgtattttgtggaggaaagcaccaagaacattccttttcgtaacacttgactttttcatttttctgagtctcctaagtgttacgcgtgacgcggtgacgctaataatcatatttccttacactttagcttacttacgcagcaagcacaatgggtattttcgtcaattaatattaactaaactagattctagtatataaataggagtactcatcacacaacacacacaaactaaaaaaccgatcatagaaaggaaaaaaaaaatcaaaaccctagaagtcactaagtcgattcaaaatggttgcgagaagtgaggaaattgtgatagtggaagaagatacgactgcgaaatgtttgatgttgttatcaagagtcggagaatgcggcggcggctgcgggggagatgaacgtgttttccgatgcaagacttgtcttaaagagttctcatcgtttcaagctttgggaggtcatcgtgcaagccacaagaaacttatcaacagtgacaatccatcacttcttggatccttgtccaacaagaaaactaaaacgtctcatccttgtccgatatgtggagtgaagtttccgatgggacaagctcttggtggtcacatgaggagacataggaacgagaaagtctcaggctcgttggttacacgttcttttctaccggagacgacgacggtgacggctttgaagaaatttagtagtgggaagagagtggcttgttggattggactagatc

SEQ ID NO: 22414 - DNA, 531 bp, Arabidopsis thaliana landsberg
  unsure (1)..(531): unsure at all n locations
taaggaagcttgatagagccattgttaatggttgttggcttgctaccttcccaacggcgnnnnnnnnnnnnnnnnnnnnnnnnnnnnnnnnnnnnnnnnnnnntatggtcattctcaataactctccgcctccttcaaaaaagaaaagctttaagtacttttctttcttatcgaggcatccagattttatctcttctattttggctgcgtggcagaaggagaaagctgtgggttctttcatgttttccttaggagaactcttaaaagannnnnnnnnnnnnnnnnnnnnnnnnnnnnnnnnnnnnnnnnnnnnnnnnnnnnngagaacaaaagaaagcttgtcttccctcgaggatattcaagctcaattgatgtccaatccgtctgacttcttattcagggctgaacatgttgcccgcaaaaattggaatttcttcgcttcttctctggaatccttttacaaacagaagtccagaatcacatggttaaaggaaggtgatgctaacacaagatttttcacagagtgctgct

SEQ ID NO: 22415 - DNA, 587 bp, Arabidopsis thaliana landsberg
gatactacaagaagaagggcggcgatgccatgtatgtcgggaatgggactccaataagagctccaccgactcctcctctgacgaggacgccgccaacatcgccatcaactagggcctcctcttccccaacgtcggccacaagtgcctcatggcaaaagatgacaaaaagaaggtaaaatctacagcctccactaaatatgcaacatatagtgatgaggataactctagtgatgatgaagataatttgcttgctctttttgccaacctaaacatgcaacaaaaggaaaaattaaatgaattgataggtgttattcatgagaaggatgaactcttggatagccaagaggacttccttattaaggaaaataagaagcatgttaaggtgaaaaatgcttatgctcaggagttagaaaaatctgaaaaattaactagtgagcttagcatttgccatgacattatttctaaccttagaagtcaaaatgccaaattaattgctaaggttgagacattaaatgcttgtgacgattctcttgtcaaccttagagattataatgctagtttgattgctaagattgataagttgaatg

SEQ ID NO: 22416 - DNA, 609 bp, Arabidopsis thaliana landsberg
  unsure (1)..(609): unsure at all n locations
tgagcctcaacaatttgattatagtcaacaaaatcataatagtttatggtccatgatgcatttcttgaaannnnnnnnnnnnnnnnnnnnnnnnnnnnnnnntaatttagatgcttgacaattttatgatatgttagatgctgcaaatcaaccgatctacgatggatgtagagaaggaatgtgtagattatcagttgcatctagaatgatgaacattaaaacaaataacaacttacctgagatttgcatggattcatgggctgaattaattaacgatattttgccagaggataattttgctcctgagtcatattatgagatacataagtggtatacagtcttgggttgccatcagagatgatagatgtttgcattgataattgcatgatattctagaaagaagatggtcaattacaggaatgtcgattttgtgggaagccaagatataagccaagttcaggacaaccaagatcccgtaccaacatatgtggtaccttccaaaaatggataggcttaagcgattatatcaatcagaaaggacatgtgcatcaatgagatggcatgctgagncatcacgtgaagatggagggtcacacatccatcagatgc

SEQ ID NO: 22417 - DNA, 346 bp, Arabidopsis thaliana landsberg
gaaaacgacgacgttggagatgactatgacttccccggattcttccgagattcttcgattacgtctgatatggttccttcaatctcagggaatctggaggttaagttgctgccggaatctgccgttgtggaaaccgggaaaaagaaggagacacacgtcgtcatcatgaaactaaaagcgtctccgtcgccgtcgtccatcaccgatgcgattaaggcgcgaagaccatcgatagatctggtaacggttctcgatttaagcaacggcggtgctaatttgcaaacggttaaacacgcgatgagatcgggtgatctctcttctccgagaaatggatcgtttatcgatc

SEQ ID NO: 22418 - DNA, 490 bp, Arabidopsis thaliana landsberg
cgacgagagcacccgcctgcgcacgtggaccgggcgattccggccacccccgccgtcaagccgtacatcgttgtgaccgccaggacctcccggagcctaccccgcccctcgccggacctctctcaccgccggtaagccgcgccacccttttctttcttgcgggtaatgtttaaacctagggagggaccgcgggggagaagaagaaaaagctaggggattttgcgcattgtcagtgactcagagaaatagtagcgcgggggtataactgagagagttagtttggaaataacccgaggacttcggtgcaaagtggttttccaggaaaccttttattaaatctgatttaaaagtaaacaaaacttgaataattcatatcttctgttttattcaccaaatcaagtaaaccaattttgccaagtcttaaataatggtaactacctaagaaaaattataaacccctaagtgcttacagaaactttagggttctgat

SEQ ID NO: 22419 - DNA, 476 bp, Arabidopsis thaliana landsberg
attcttggggaggtgtgaagcaaccatatcttcgtatggtggcaatactgcagtcatggcaaagtctttcgtcatggctgtcaagagtgttgcacaaacctggtactcctctcttcggccaggaacaatcacctcatggcaaaagctgaaggacatgttgataaccagcttccaagggtttcaaacgaagccggtcactgctcaagctttattccagtgcacccaggaccacgaagaataccttcaggcgtatgtccgaaggttcctgcgtctgagggcacatgcaccaacagtgcccaatgaaattgtcattgaggccatgattaaggggcttcggccgggaccttcagctcagtactttgccaggaagcctcctcaaactttggagaagctgctccagaagatcgacgagtatattcgagctgacaatgacttccgccaaagaagggaggaagcatacaggttctctgaaatga

SEQ ID NO: 22420 - DNA, 449 bp, Arabidopsis thaliana landsberg
cacaaaaacgtgtgtctctttgttaaaaacgttatttttgaatgtactcacacatgtaggtatttttctctcattctttttgactattatactcttccttaggtttttaattaatttttggttttccttctcacgcccaaaattgtctaatatccgtcttctacacgagcttcatcttcgctcactcttgacctcaagttgatcaactttacctacacctcctttgtttgctgctaattcaaaactaaaatatgctatttcaaaactcatacaagagacaacgaaacaaccaaactacacatccagtttgttattttcatcaaatttttgtttaggttctttatataccatcaatcttagggtttaattatcctgaattaacgagtgtttgtaattagaggatatgggataatccattttttttttggagatggaagttgaattgagaa

SEQ ID NO: 22421 - DNA, 1239 bp, Arabidopsis thaliana landsberg
  unsure (1)..(1239): unsure at all n locations
tacaattaccacctatagcatctaaatttctaagtaacattatcaggagccccatactttaaacgctactttggtgtggcatacctgataccttaatactgtttattaaatctggagtgataacaggattctttagtgagtccgaatccgaaggatctatactatcagctgatagatagattctntcttcacctgtccaaatcaagtaacatttaaatcttcagcaaaataatgattaatacagaacataaaacgatgcactaaataatcaatatagtatatgtaaacttactatcgagatgctctagcatatactgattgattgtgttaacatcatcattttttggagctagaatagctcccttctaaagaattttggatcattgatttcgtgcagtttagttgcatctccatatatttctctactaatagcttctataggaatatctgcttcttgaatcaacaactcttcaggtatatctattagcgcctcaccatcattaggctcattgacccttccatcaccaacagccaataaccaatcgaaaaattcttggatttctttagcttcatcaacacttaaatcattgtttaaaagccgcatattcttagtcaacttcaacactttgcagtgatcccaaatatataaagcatttagagatgacataacagtttctgctctccctgcaccatttattactggtagcacttgtctaaaatcacctccgaacaccatgacctttccataaaaaaccttattgtctacacgcttgataatatcagagaagcttttatctaatgcttcaaaacaaaacttgctcatcattggagcttcatcccaaataatgagagatgcttctttaataagatcagctaaatctgattttggtttgattttacaaactgaaaattcgtctggattcaaaggtatagaaaacctagaatgtgctgttctacctccttctaacaacaaagaagctatgccacttgaggcgacattaagacatatctgtcctttagatcttactgcagcagctagtgttttccaaataaatgttttccctgttcctccaaagccataaacaaaaaaaactcctcccaagtcattgaatactgcattagtaatctgatcgtatatacctctttgttcaggagtaagcttttgtatccaatcagaatgcttctttttcaaatcggattgattgttgtacctcaactcagcaataataagtcagtttt

SEQ ID NO: 22422 - DNA, 393 bp, Arabidopsis thaliana landsberg
taagacggatccctcttctccatccttggtaagagcactctgtttatgatttttctcattaagttcctcaagcaactgatctgcgaatctatccatctcttcaatgtagaaaactcgaccctgaatggttggcttcctcatggttttcttaatatcaaaggtcatattgaggtttcctccaaggtgtacatcaattttaccttttctgacatctatcaaggctctagcagtagctaagaagggtcttcccaatatgagaggatccttaggttcttcatccatctctagaaccacgaagtcagttgggatttctactgatccgatcctcaccggcaaatctttcaacatgccatgaggtattctccctgacctatcaacatgaactagctgaat

SEQ ID NO: 22423 - DNA, 740 bp, Arabidopsis thaliana landsberg
  unsure (1)..(740): unsure at all n locations
atagaaattatcatcactgaattcacggcaaaatatcatcactttatttgtttcaaagtttgtatttgaatgtttcttatgtatcatgtaaaactttgattatataatatgatcgatttgccgttaaaaaaaaacaaaacaagatataaatatgacttgacagagttttcttttatcttaatttgaattgatgttattagttcacttaatttttttatgtttaattcaacgagatatttgtgtaacaaaacccccaacacttcatactacaagtctacaacaaatatgaaccgtaaaatttaagatatgctctgcagaagaaagtggtaccataaaataagtaactcatgcaatattatagatcttaatttgaagaataatagtctatatcaagcagttaggaatgacatatatattataagtctgatatagacaatggctttaaattttgttatgctcaattcgtggatcttgatagttggtttggctttaaaaataccgcagatatactagattgcaaaaaaaaatactgtatatgcatatatagaaaacaccggtagaattttttttatcacaaaaaaaaaaaaagaacatcggccatatacataatgaaagatatcgatctaaggcatatnccgtttaattggcaacaatcatgcanattaaattatttaataaaataggagcctggtcacataaacacatgtatatgtgtgttgttgaaaaaaaaaaatacatgc

SEQ ID NO: 22424 - DNA, 1033 bp, Arabidopsis thaliana landsberg
  unsure (1)..(1033): unsure at all n locations
gttaatggagtttcattctcttcctcctcatcttccacggcaacagcacaaacaacatcctcattgaggtcagcagcaggcggacgcacccattgggatcaatgtcagcaagaccagttgcagtcatttcttcggcagtaggagctaaggtgctggcatcctcatcaaagctagacactcgccggaggcngttcttttccttttctgctcatcagcagaaggctcgggctgactggttcggctgggacgcctcggggcagtattggcaggtttcgagacatccaaggtcgcatcaacctctggaagcggcaccactatcaatgtaccatcaggagcagtatcagatgaatcctcagctagcagatcgagcatgtcatttatgtctgcgtcactagggttcaggggcacttcaaaataaatctgccgttcatcatcaggtatctccccgagcgacatactaagcgaacggacctcttcagcagaaggtcgcactctaggacccaaattgctatctgtcacgggtggattggacacaaaaagagtgaaggcttgggaagaaggtaggttccaagccgagtatgccactggagctccaacgttcgaaactttacccctgaggatcatttcaagtcggctcaccaaatccacagaaggaattctcctattagtaactcgggttgagtcggccagccctcggtaaagatatgccggataggccctnnnnnnnnnnnnnnnnnnnnnnnnnnnnnnnnnnnnnnnnnnnnnnnnnnnnnnnnnnngacctctctctctcgagtaatccaacttcagtaagcaacggcccgcttcggctacttcttggtccgtgggagattcagtccaactcggactacgaacgtctgcctgtcttcccgagcgggaagggagagaattccataattaccattataagcactccagacgccacactttaatgctgtcctcaaggggtatctgagaactcggtcttccgccccgatgcactctaaactggcactccgaccaattgatgttg

SEQ ID NO: 22425 - DNA, 565 bp, Arabidopsis thaliana landsberg
  unsure (1)..(565): unsure at all n locations
ttcgagctccttcggccttatcatcagacatcttccgaagcttctgctttctgggtctgaaggatggatcaacattgagcgagtgttcaataacatccctgttgactccgcaaagatcattagctgaccatgcaaaaacatctttgttgttgaacagaaaccttatcaaggttttctcctattcttcggacagttgggatcccaataacaccttctgctctgctatgtcatcgcataagagcatgggcttcggctgatcggccgaagcagctttctcccttctgaacttgtattgctcacaagctagagctccatctatgttatgggttgcttttgagtctgtccagtttccttcggcccttctggcagcttcctggcttccatgaatagcaatgggcccttggtccgaaggtatcttcatgcaaaaatatgtcggatgaagaattgcttcgaaggcattgagagtacatgaccaatgattgcattgtaagggtatccatgtcacaatatcnacacaacttgttcgtccttgtgttgttgacgaatctgaagtcaccagcatggt

SEQ ID NO: 22426 - DNA, 877 bp, Arabidopsis thaliana landsberg
  unsure (1)..(877): unsure at all n locations
gagcctacgaacgaagtagtacgttgaaattcattcccgagacgggaactgcgcctataatcctaaataagtcgtacagctgcatgtcagggagttttgagccagtttttttggtaaacatcaatggatgtgccagtcctcgcaatagaatgatcctttctttcaaaaaatgaagtgctattgcatgcaactccataccaagcaacatgtgattgccaacatacagaaccggtccctctgaaggtattcctgcaagcgatcttaccactgtaccattctttatagttgaaagaaagactggggaggtgacagcagttagcaatctggaccagagaaattaaaaaagaatactacttcagtatgtgcttatggtagcagaagcaaatattctattctagctaagttactatacaaaatattttcaagaaatcatttgacagagaaattagaaaagtgataacatctatgacgcacagatattaatgtgataagtgagtcattttacctttgtgattcttcatactctttaaactcaaatggggtaggcagaatgtaatccgaaatgtaatcaagtgacttcccacgnnnnnnnnnnnnnnnnnnnnnnnnnntactcaccagatctactccatcctcctgacatgacatcaaatagatcaatcgagctatatgctaattaaccaaacataatctgaaagtttttctgtgccaaatctgatgcaagaagtttctattggctataaactcgtagagactagatttgcttgtgaatttattaaataggagtcatttacacagggaaaacttcttgcatcaggagaaagggctccttaccaagaagaggaactgttcattattctaagctcacgaacttaca

SEQ ID NO: 22427 - DNA, 329 bp, Arabidopsis thaliana landsberg
ggtcattcgtttaatgtctgaccaatcacatttttctacttacaactttgttttaattcttaaagcatgcaagttgttccttggtgaaagcttaagatcctcccatcgctcctcttcttccactctctcaaagaactgatctaccatgctatccttcatgtcctccaatcgccttggctcccactataattccaacaatacaaccatatataatttcaattatatgacataacaacaaatactaaatggagagatttgttaaacctttggattctatctttgctatcaatatgctctgaaccctgcttaggtaaacatgatttttaata

SEQ ID NO: 22428 - DNA, 530 bp, Arabidopsis thaliana landsberg
cgtcccctatttctttgtattgttcatgaagttgaaaatctttacatttacttcacacaacgaagagattcaatgggtagacttggattataatctcttcaaaaaataacgctagtgttttggatgctagcatatgatcttcctgcagatgccatggacgagtacatgaagataggcgaatcaacgacaatcgaaaacatgaaaagattctgtcgagccgtagtggatatattttcagaagagtacctacgatcaccaacacctaatgatgtttctagacttctttacattggtgaaaaacgaggttttcccggaatgcttggtagcctggattatatgcattggaagtggaaaaattgcccaactgcttgggcgggacaatatgcaggccgtcgtggatcacctactataatacttgaagcgttagcagattatgatctttggatatgacatgcatattttggattgccaggaactaataatgatatcaatgtgctcgagttttcccatcttttctccagactcgctta

SEQ ID NO: 22429 - DNA, 743 bp, Arabidopsis thaliana landsberg
taaaaatacttattaatttataaaaaatagtaaaaatacttcgaaaataaccacaaatattcttaaacaaccgaaatatcccaaaatattcaaagcaaaataaccgaatggataccaaattttaaaaccgaaaaaattggaacaaaaccaaaatcgaaccaaaatttcaaaaatcgaatagatactaaactttagaaaaaaaaaacgataaccgaatgtatacgaaccaaagccgaattagataaccgaacgtccaggactactcttaatctttccgccacttatgatttgggctattactttgtttataatgagccttttcaagctcaagttcatgattgtccgtgagatgagaaactgacttgttggattcgaaaccctagctagtattggttaatacttaatacataaatgacctgcattgacatcatcattcaagaaaataaaaattgtatgcttgagatatttagttttcctaggttttctttattttagtaccgaatctttaggtgtgccacgttaatttagacccattttttcatacttaccaactgagtctagtttaatcatgactataatcgtataaaatgattcagtcgacgtcattgcgaacgtatataaaatcatccaaattgacgtcattccaaagaggtaaccatgcttatctaagagtccgagcatactaaacaagacgacattttatttgcactccaaatcaaattttgtattgcctaccgaaaaac

SEQ ID NO: 22430 - DNA, 613 bp, Arabidopsis thaliana landsberg
aattgggatgtttatagcattcggcctactcttcttccgcaatgagtacccggttttgtttgtggaagatgaagaagttagaaatgtggttagagaactcacgccaatgcttgccttttgcattgtcatcaacaatgttcaacctgtattgtctggtaatatttgtttagtggactccaatagtccaatataatatggttgtacattaacgtaaaccgaatgtatatgagattatgataaatttgataacgcaggagtggctgagggagcgggatggcaagcagttgtagcgtatgtgaacatagcatgctactacttgttcggagtcccatttggtctattattgggatttaagcttgaatatggagtaatggtaatgaaattcacatccttttatctaaaagtaaaacctttatcaaggaaagacgaaagaccggggtttttgatgttttggaaacctattttgatcagggaatttggtgggggatggtgacgggaacttttgatcaatcgatagtcctgacttggatgatctgcaaaaccaattgtgagaaagaggtaagaaaccaaaacactttaagaccgaatagtcacgactacgctcaccgagttt

SEQ ID NO: 22431 - DNA, 895 bp, Arabidopsis thaliana landsberg
tttagatctgttgatgaataccttcagtgttttgttcctcatctactcgaggaaacacggtcagagttgttttttaacttcaaatctttatcaaaatctcctgtctttcaaatttcttccgtggagacaaagggatcaagtggtagctcatccaacaacttgttctacgatataataataagtaatgcattgagtattggtgcaaagtatcagccaaaatgtggagatcttattgctctaacaaaggaaaggcctagacggatcgatgacttgaatcctttacttctcgcctacgtttcctcggatggtgattttataatcactattcattcgtctagatcgatgtcttatcttgaaatggaccaccaattcaaggaaacttcacttcagtttggtgttttcctaatgactttaacaacaaacactcgaatttggaatgctttgcacaacgaagctgacatatcgactctaaccaagagtgtgcttcaggctaatactgagggtacagaacaatgtttttgttctgaaaatgatgggagatctgaccttgttttggatataatccgttcaacgaaattgaactcttcccaagaggatgcaatcttgggctgccttgaaacaagaaactgtacccataagaacagtgtgaaactgatatggggacctcctagaacaggcaaaacaaagacggtcgcgactcttctctttgcccttctcaaactaaggtgcaagacagttgtgtgtgctcctacaaacacagctattgtacaagttgcatcaaggctcttatccttatttaaggaaaactcgacagcggaaaatgctacttacaggctagggaatatcattttatccggaaaccgggacagaatggggattaacaagaacgatcatg

SEQ ID NO: 22432 - DNA, 466 bp, Arabidopsis thaliana landsberg
atattaatagcaaaattataattaattatcttggaaattaagaaacatgtaatcaaaagttttttaatttttattatgatttgaagaattaatagaataagtcgaaagatgtaaaaatatttatatacacagagcaaacttcacattgaagatctctctcttttttccccctctatgttaatatcattccccttgtcggcacgtaacaacaacgaccgagacaacacaaacaaacaaatcccccacgtgtcgtaaactgagaccaggtggtcgtcatgtacaatatttctataaaatatatggttacatcaagatctattccatatagccctaacctaatttgcttccttttgaagcttccttcatctcagaggcaccttttttattagcttcaacttcacttgctatttgtatacccatcatgtctctcttacaccatctaatatcttatacccaccattataat

SEQ ID NO: 22433 - DNA, 572 bp, Arabidopsis thaliana landsberg
  unsure (1)..(572): unsure at all n locations
acatacatactgttgcttatatgtttcttaatagttaataccacatttattcttcaaaatgtaaaaagtcccgattttgattgtagttttaatcacgggttggcttaacgacagtataaccaccatccaccggcaaattctgaccacttatataagccgaatcatcagaagccaagaacagagccacttgtgcaacgtggctagctttaagcaccatccccttgagaattcccttggcgtcaaaataatcctccaactgctttcccgttacctcgtcgtggctagtcattggcgtnnnnnnnnnnnnnnnnnnnnnnnnnnnnnnnnnnnnnnnnnnnnnnnnnnnnnnnnnnnnnnnnnnnnnnnnnnnnnnnnnnnnnnnnnnnnnagacgccgtgtaaccatgatgccccccaccgatctccgccgagacgctcgtcgtacaaacgatggagccacgcgtgcctttctccaccatggctcgtgccgcgggtttgataaacgcagctgcaccgcgaacgttaacagccattatgcggtcaaaccgttcgaggtcaaagtcgaggaagctt

SEQ ID NO: 22434 - DNA, 611 bp, Arabidopsis thaliana landsberg
taacacaaaatttataacaaaactatacttgatattcaaaaattattgatttgctcttgtgaacttcatattttcctatagaactttgaaaacctttcaataaattgtatgtcgaataaacttttacaaacatttattagccatttcgattaagactattgtgagcaaaagttttttttattataaaataaataatatgtttaagataaattgtgagttaggcttcttatattttaaaaattatataaatttatactgaaaaagagttagaattttcaaattttaaatttatttggcttaagaacataaatatgtcaatttgaaccttatacccactaaatattacatgttagataacgaaataaaagaaaattaactattggtttcttatattgaattggatattgctacttgtatttaatgttttttgtttcatttttaaacgttgataaaaccattaaattaaagttttgtagtatatttatttgtcgaaatttattctcattaaatataacgttaaaattatttgtcttttttttaaaattactatgtgattttgattcctatataaggttagataacttcaattttcaaataacaaatacaaatac

SEQ ID NO: 22435 - DNA, 327 bp, Arabidopsis thaliana landsberg
  unsure (1)..(327): unsure at all n locations
agatccttgtataaagnnagaaacagcatcaaggggcattatccgttaagtatcataccccctcgaatcatncgaagtccagagataccaatatttctcttgggnagatttcgtcgaacacctttccgtgcatnncctccagtttcccacanagttgaatacataatcgatcataagccgaagacacaaagatgtcggattgataaccgaagacaaaagcttgctgatgggtctgtttgccggagaagatattaaatagagacgaacatgcttcaatggcgcaaggaaagctagagcgagttgggtatagagatagcttccgcattg

SEQ ID NO: 22436 - DNA, 574 bp, Arabidopsis thaliana landsberg
cactcttccatccaggcctcgggaacctcttccgaaaagttggcactgggtagcttgagccagaacgagcaacgaagccatagcaaccaaaattgttatgatactgttctttaccccagggcttcgtctcatacgaaagttcatgcatactgcaaaaacattttgcacttggctccagaccttgacttctcacagcccagacgaagatccccattctaataattgcttcaggagtgatctggtaaaggaaaatctaatatgtctttaaaacttcaacaacaaatctgctcaacgggaaccgaagcctagctttgaagaagcttcgatagatcacaacttcgttttcttcaggaacaggaacaaccctgtctgcgtgagcctcacaatagacatatctcgaaaataccttcctctcatattatcaagatgactctgtttgatagtcgatttctcgaagactgcatgacttggtcgccagggccgatcttcagagtcttcgcctccactttccgcatcataattgtcgttgtcatcagtatcttcagataagccttctagaatctccttagtaatc

SEQ ID NO: 22437 - DNA, 470 bp, Arabidopsis thaliana landsberg
tcacagttttcagaacccatatttttttctaaggccttaaatagatgctgattttctatttagattttagatttagacttgagtttgtagattttagatttttgttgttatatttttgtttaaaaaacccccaaaaattggtttttgggttttgagaaaaataacgttgattgagtaaaaactagatttcctaaattttaagagaactaaaaaaactaaaatcatgaatggaaaactacaacaaaatagtttttctaaattgtagggaaatcaaaattttaaaatcttgattgtataaaaataagtttttgaaaaataaaaaccaaaactattaaaaatctacaaaacattcaaggcctaagtatctgaagtattgcagtttcatcttaggatttttaggaggcatttatggtcactcctgagcatagatagaccaagcgacggtggtttctgacaaacaaagtgtcagg

SEQ ID NO: 22438 - DNA, 539 bp, Arabidopsis thaliana landsberg
  unsure (1)..(539): unsure at all n locations
gttccacccgagagctcgcccttcagacatcccaggtttgcannnnnnnnnnnnnnnnnnnnnnnnnnnnnnnnnnnnnnnnnnnnnnnnnnnnnnnnnnnnnnnnnnnnnnnnnnnnnnnnnnnnnnnnnnnnnnnnnnnnnnnnnnnnnnnnnnnnngaatattagatcttgccaaaaagggtgtgtgtgttttgaaagattgtgccatgcttgtaatggatgaggtgagttcctaattctattacccctgagctagatttttcttattaacaaaacattgttggatttttgcccaaaaggacatttctagttttttccctgaacataactttctctaaagttaaaacaaaatcgattcctcttatgcttcatatttgcagattttgattgaataattttcttttcctcatgagctcatggtcttaactcgcaaacatcttttttcaggccgacaagcttttgtctgtagaatttcaaccttctatagaggagttgatacagttcttgccagagagcccggagatttgatgtttcag

SEQ ID NO: 22439 - DNA, 579 bp, Arabidopsis thaliana landsberg
tgcgacttgggcgagctgtggaacacgggcagaagaaaacctccatgtgttcgacgcgctctgcgacgccagagcacgcccgcgcccgaccccgcgccgagccgcgccagtgtcccccgtgtgagcccgcgcctataaagcccactcaggcgtcgaccatacccttccgcgcacgctcaacctcaccggagctcaaactcaccggcgtttgcccgcgcacggcgtgtccgcggccacccgagcccctgccaccgtagaccggccaaccaagccctttccagccccgtctgaccctcggagaggactgagcacaccttggtgaagctccccgagcgaggaatcgaagtctgcttcgccggagaggctagtccacggtcgccggacatcctccgaccgccggcgagcatagacccggtaagccactgcgccatttttcgattcaatgcatagatagcctctacatcacctcgtgaagctcaccgtgccattggattgaactagatcgccgtgatttggccggcacacccgcgccgacgaggataccgcctgcgcatgtggaccgagcgatgcggccatccc

SEQ ID NO: 22440 - DNA, 871 bp, Arabidopsis thaliana landsberg
  unsure (1)..(871): unsure at all n locations
gaagttaaggactcaaaaccagaaacacaaaggaattttttcttcgaaatatacaatgttttttttacctttctcttgaccatgctatcaccagcttctatgcttgaagcgaaggaggagcgttcttttcttcctcagcgcgttgttgtcgtttatcttttctagatttcgccgcannnnnnnnnnnnnnnnnnnnnnnnnnnnnnnnnnnnnnnnnnnnnnnnnaagatgctgctttcttagctgcttccttctacaaaagaaaccaatttggtaaaagaatcctttttatgtatgttaaccacaaccaaactctgaaaggaacccaatattctatagcctaatgaaccacacctcatcatatccggggttttcgtgatcaaagaagatcttaaccaggcgcacttcttctggcgtccgaaaataacaatccaactgggaaacagtgaaacgatcagactgaaacatatttgttgaagttaaagaatttataatacaaagacaagaaagtaaaagttatttgcccacctctctatcatcgacgtcagacaaggtgcttgattcatccgaatgtccatccaactgccaaaagtcggatttgaagcatagtaaggttttacaaacaaagtttcctcagagatcaactaaacttacatttacttgtttgtcgttttcttcactagaagctttttcctccattctctctttctctgctcgctggaaggcaggaggatccgacccaccttcaagtccaccagaaactgtcatgaactgcagaaagcatctgcatgtcaaaaactcggagttgcataaacataataaaaaacataaaccggagaacatacatacctcatcgtaacagctctcacat

SEQ ID NO: 22441 - DNA, 584 bp, Arabidopsis thaliana landsberg
atgtgaccacaccaaccacctagttttgacaagttattaatgaaagacacatcttgcaactctctttccaaacatattttaaaactgttttttcatgtttaatagtaattgattaccaagtgtcattagctcaattggtaaataccttatgcgacgcttagatgtcgccggttcgagtgacgcttggaacaaaactaatattacatgatgtggttttggatctggtgaattacggattgtggccagaacatcttaatattcagaagaaaaaaaaaatgattttaattattttaagattaaagctatatcaaaattgaactcagaaatttgataaaaacatatgatcatgcatttgcagttcatactcaaatttaaaaacagaattggaacaatcgtaagttacataaataacgtttataaacgcatacctaaagacccgatttgtaaacttaagttggttggagttggaccacgttctactttctagtcttatatagactcatagtacgttcagtgccaagggtattggtaataattattatttttgttaaccatacaatttcttttcacacaaccaatttaca

SEQ ID NO: 22442 - DNA, 1091 bp, Arabidopsis thaliana landsberg
  unsure (1)..(1091): unsure at all n locations
tcacataaactgtaaaaatggttaacgcaatacttctgaccaaaatttgaaattgattcattacattgtatttctatttttatttagtaaatacattgtattctttttctcaggaacatacaatttttgaaggcaactatcacatgcatgtacacaatcttttttaaaaagcaatatatatcgtttagcaagaagttttataaccataaatgtatataaatactataaacaatgtagcagtaccgatcacaatataaaatacaagttttacaaacatttaataatgggtgagagcatacaaagagtgtgtgcgtctatcttaacggtgatggttgtgatgttatcacttcttgaagatactaaaggtaataatgattttgcaatggctccaatttcagagaatgggttgctaccaaatccaatggcttgtgtgaaagatgcaggaaaaattccagattgtgtagaggcaatgaaacaaggttatttaaaagatataacaaaagagtgttgctgtattctacttagtcttcccgaagattgttttgggattctatttcctatgcgtttatactatcttatcgtacttaaggttacatgcaaattgttaagctttttttaatcacaattttttcaatcattagatatttcttttcatgtaacggtaatttattattaagatttataataaaatcatcgttcttttagtgattcattaattattacctaaatgattatactataagtaagaaataatatgtgttggctatactaactaaaannnnnnnnnnnnnnnnnnnnnnnnttagtgagtagattaacgagaaaatgatattttcatgcatatacaatttacaaagcgtgttttcctacttttacaaacacatatgatcaattcatacccaaactacacaaaattcaagttatatatcattctaatttattagtcaaccattacggttgctcagtctgctaacatgtatctcatgatgttgcttaaaacgacatccgtttgtttgttagagctgaaattttataaactgtatttggttgactaacattcattaattatgattctaaattatgttctaaat

SEQ ID NO: 22443 - DNA, 562 bp, Arabidopsis thaliana landsberg
  unsure (1)..(562): unsure at all n locations
tcggctatggtcaaaattttcagcagcacaacagtacgatagtaatgaatgttgtggtaacttcacacctacccgtctatttatatagggctgcaggtgggaagtgaatcgtcaagccacctgcacccgccgaatagtcgctcacattcactgaacggtggaccgtagggcgcgagaaggagaatcaccagatcgtgtgtacccgtcctatggtgggaccacctcgcactcggaatatttaaatcgtttctcgacaacgagctcagggaaggtgtttttcggaccttcggcattccgaagcctaaaagaatttttcacgggtcgagctcgttacgaaaaacgatctggcaccgtgaaggggctactgttgggggtctgcttcgtcgctgaaggtcctgtgagaagaagcaccttcggaaggccagaacaggaacaatgccgaagctaccaatcagggagcttcgtaacgtagttccagacgcactgacttaaagatgnaatgaccaatcgggccatgatacccctgtgtatgatcgtaatcatntgtagaggacatgaatgt

SEQ ID NO: 22444 - DNA, 474 bp, Arabidopsis thaliana landsberg
  unsure (1)..(474): unsure at all n locations
cacagcgttcgaattcatccctgaagctctggtaaacatgttgctctctcggtctagcggaccaggactcagcttcatctacattgtaatcagggtccatagannnnnnnnnnnnnnnnnnnnnnnnnnnnnnnnnnnnnnnnggacaaaactcaaaaaataaacgtaaatacgtaagtaacaacaaaccaaaaacacaaaccaaccaagtgaaccggtcgagtgatttaatagagtaaaccgtcggtttttaattttttttttcggttgatcgagtgatattgcttggtcaagtggttattgacagccgagtgaagccgtggagcctgagtggtgaaaacgacgaggattggagttgaatcgagtgaacttggggaagtcgagtgattaagcgatgaagaagatggtgattggggatcgagtaaagtggagctcgcggaagaagagaagacggtggtgtgaagcggtcggggt

SEQ ID NO: 22445 - DNA, 584 bp, Arabidopsis thaliana landsberg
tttattatctgcgattttgaggtcaaggtgggtctgtgatttcgagattatgaaatcgatttggggatataaggtttaaatttgtttcaagacaaaacgacgttgtttggtctgtgcaataaacgacgttgttttgttctaacagggcaaataaacgagtcattaatgttgtaattttttttttgaacctatttaacgacatgactcaaatggcaagtcaacaaacactttctcatttatttcgaaagtcaacaaaaactttacgatttatttatcttccatgaagttcaagattaaatcgtcccaaatttaaaagttcgtgatttttttgatatttttcccttttttatttcgcttatgtccttaaaaactcttggcaacaggaaaaaaaatttgcgttgtaaaattggatatatgaaaaatcgactattttatcttctaaaaacctttacacattaactaatacacaatgttttgtttttcaaagtctcaaactacgtatattgtttagggttcacactagctttggtggtaaaagttgagacactaaaaaatatgagggttttaatgttaataaaagaaag

SEQ ID NO: 22446 - DNA, 643 bp, Arabidopsis thaliana landsberg
tagctaaattattagttttataatttcatgaaaaaaaattattattattatgaatccattgattttatgatctcacccgtaatataccgtcccttgaatgattttaaatttatactactaatatagattttaaaatttatcatataaagtatatgatttcaagtttttgtgtttttttatttaaataaagtaacggcttaaatgatgatagatttagttctttttcttgtatgtgtatatgacttttgtgtgaatattttaattattataaattagtatttttattgctatagaaaatgttaatatacatatttgctataaatcggatttatgcatattttgtggaataaaattcacagattttgtttttgaatatatatatggaaagattgtgtagagatttttaaaaacaaattagacaagaaattgtttagttaatatcttcttaaaattttgtaaaactaaataataaatacatgtggcttttcttgtaaataagtccaaactacagaatttatttcacaaaatagttgcaaaaatatatatatgtagatatcattatatatgtatacactgttattttgcgagttttattttgcaaatttgtattattcaactatattattaacgcaatggtccaatc

SEQ ID NO: 22447 - DNA, 563 bp, Arabidopsis thaliana landsberg
aaaatgattgatgatgaacttggtcctggaacctccaattttcacggctgaaaaagaagttggtggatcgtgtcttctaggaaagcaaacaagaatgacatttccacatgcaactacttacagagcaacgaagaagcttgaattaattcatggtgatctttgtggtcctataacaccaagtacaagtgcaggaaataggtatatttttgtacttattgatgactattctcgatatatgtggactattctattgaaagagaaaggagatgcgttctacaagtttcagaatttcaagctactggtagagaacgagactgaaacaagaattcagacttttagaacagataggggagggagaagtttgtattcacttgagtttatataagttctgtgaagagaatggcatcacaaggcatctcactgcaccatacactccacaacagaactgtagtagtatagagacgcaatagaaccatgatggagatggcaagaagtattctgaagcatatgcacatgccgaattatctatgaggtgaggctattaggcacacaacatatcttct

SEQ ID NO: 22448 - DNA, 331 bp, Arabidopsis thaliana landsberg
cctatagtttaaactgtaattaaattataaccaaaccatcactttcaatcatatgtactttgataatttataagtaatctctcttttttgtttgttttgtcttaatctatttcgtcacgctttattctttcgagctaaatccggtggtagtttgctagaaacttcggctaagcacacaataatcaaaattcaaaaagtcagttaactaattataactaagaagttgcttgcgtccatggaggtcttgtagaggaaggaaaaacgtatttcgtgatgatgaagtcagagttcgaactagaaccaggattatcgcattacggatgcatagttg

SEQ ID NO: 22449 - DNA, 564 bp, Arabidopsis thaliana landsberg
  unsure (1)..(564): unsure at all n locations
tatctgatccatttgcttgcttcgcaaccggtttgttccttacatgtaccggtaatcacttaggatttcctcccaatcagcgaaaagttctgggaaaatgacacccacccttgaagctggccacgcggtnnnnnnnnnnnnnnnnnnnnnnnnnnnnnnnnnnncacactgaaaatgctcgccgctgggaacggttttggaggtttgtccacccgccgagttgcgtagggcgatgcacgttccatcatggctgcagggtttgttttttctactggtacgccagggagattgctatattctactagaagcaaagctgctaaagtctaagctactctactcggctctactctcaagtattttgttatgacggatgcacacatattttgcaacacatgtgtgtgcttcgttcaacaatttaagttttatgaatcgttccaactttgttccatgttcaagtttatttatcctctgaatttcggtttatataaactgtttgtcctttttatgtttctggcttttgaatgaatgaagtttaagttttatgatatgtcttcgtttatgtac

SEQ ID NO: 22450 - DNA, 823 bp, Arabidopsis thaliana landsberg
tcttgtgtcttaattctcataacaatttcacctagctcagctggttgcatccgttcaaggaattgagtcttgaaaatgtaggaaaacaaaaaagaaataaatagtccagactaaaattttatataacacacttatcagtaaaggaacaatgaaaatataaacgttcttacctgatgcgagtcatgttaatctctgggtaagtttgattgaatacaatttttgaagcaccattatgtgaaattagacattgacgacctaaaataattatgtttttattatatgtattagctcgataaattaaagatacgatgagaagagtgttaatatttaccttcgtgatcagaaatcttccaaaatcgaaacacacaggttgtaagattcataccgaaggtcccctcataatcaagaccaagaccaagatccctccataaacccataaacaaatcacaagtatatccatttgcaacacatgttagagatttttccctaataagaacatcaaaattattcctctcaatcatctaagttctataaattaagacacctataaagataacaatatttactatgtttcaatataaacatatataaccatatagatgcggaactatatagtcggaaatattaaccaaatatttttaagctcaaactcgagaaattgagaaagtcaaggattttcgaaatcttgaggaacataatcgggtcttgttatatttttaactctcacgacaacaccataagcatatacacaaaataaatcgaaaacatgaaagctttacatttacaaattaatagaataaatgtttttaaaaaataaaaatta

SEQ ID NO: 22451 - DNA, 396 bp, Arabidopsis thaliana landsberg
ctgttcattaatttctaatgtctttctgattttctctaagttttggacaaaatagctttgaatgaataactacatcataatttctaatgctggggttcctactatttttaaacagtgtttaaatgaggtttaaacatctacaaattttcttaagttcagcacagaaggaaaactaattttccttaattaaacaaggtttggtgggtttctgtttttaatttaaaactctaaaaattagaacagaaagcatagggtttattatttttaaatgatggttcataatattcaggagctagcaaaattggtttgacaactttttatgaagaattcatcaagttatgggttttctaagttctctggtcattttaaaaagaataacagaattggtttaatgga

SEQ ID NO: 22452 - DNA, 523 bp, Arabidopsis thaliana landsberg
catcctatagtacctgttcttgacctaggggatgtgagtacaacaaaggtgagctcacatatgttcatcgctcaacaaggtgtggggaataatgtgcatgatctcaccaaaggtgggagctcatgtgaagtataaggcttaccaaagaggttggttaaagctgagcattgcttttaaagatggtaaaaattttattagtagttactaagtataagtaaatatcaacccaattaaataagatatcacaattgataataacaccggcgatgcaatgcatatgacaaaataaatttaattccataaattaatcatgtgagagttctgagtcgctcttgaccatgagcgcgactgataaccaatattacactctgcagaggttgcacatatttaccacaagttgtgttcccattttccacgggttgtcgaacccatacactctacgaggaacgagcagggtacactcgaggcttccaaagttccctagtcgagaatcccattacggtttcaacgaaggagcatagta

SEQ ID NO: 22453 - DNA, 553 bp, Arabidopsis thaliana landsberg
caccattagcgtcactcgtcctccagccgggtgccttggtcgagtatcctccttgtcctccttgtgtttcccactcggcctccagtcgtgtgtatatgtcgagtatggcttcatgtccttttttgatccgcagacttgagatcgtccatcccttgtcctagaaacagtcccaatcgagtccaaaagcattggtttcacctgtaaaacactccaaatgcaactatgctatgcgatgcaatgcaaaatgtgaaaaggaaggaaaatgaactaagaatgcatgaaaagagacatgaaactaagttaaatgcatgagaaacaagggcttaaaatggttaaaatctagtgttatcaacacccccaaacttagctttttgcttgtcctcaaggaacaaatagaactaagctaggagtgaggtttgaaggttgggattcagagccaaaatttgcatgtaaaataaatgttctcaatgtccatgttgctagttctagagtgctaagttgaatgatctcaacttaaaaactttagccatcttcttcataacacaacctagcc

SEQ ID NO: 22454 - DNA, 631 bp, Arabidopsis thaliana landsberg
  unsure (1)..(631): unsure at all n locations
ttgatattctacatcaacatcattattatttttattgttgaccaataaaaataagaaaaaaatatagttaatattattaaactaataaaataataatattaaaatgtaaaaattatttttttaatttgtatgaaaatttcacaacatcagacttgataaacttgatgtaatagagggaatactaaagagtcaatatgtagttagccatgagcccatgattgtgatgtaaaaatatgtgttgaaaaatataaaacaattaaacacgagggaattcaacaattaaagtagtatgtttcactatgctacattacaaattatttagagaaaattaaattaaaataagaggatgaggaaatgatgtgataaaaatgttctaaagtacgtatgtaccgtgaaaagtgcaattatatggaagaaaaacaccacaaacacgacactgaaacgttgtacatacgattgcttcatctgcaagtatagaacgaatatttgttttattttgtctnnnnnnnnnnnnnnnnnnnnnnnnnnnnnnnnnnnnnnnnnnnnnnnnnnnnnnnnnnnnnnnnnnnnnnnnnnnnnnnacagatagatatcgggaaaaatgttatttaataccttaacttttaaaaaa

SEQ ID NO: 22455 - DNA, 544 bp, Arabidopsis thaliana landsberg
  unsure (1)..(544): unsure at all n locations
attctgacacactttcttaatatattgaatgaagcccaattgntctgttatatcttttgagcagattacggaattgacttgaatatgtctcccccgtcatccgaagaagaattaactattgttaagaagtttgaaaccgagaaacctcaagagtcttcttcagtttcgctgcatggaaaacacggttcagatcagccgcaaggggttgtccaagcgctaccatgtttaactagcactttacttttggacaagcgatataagtcattgatgacaaggtcaaggtcaaggaacaaggtaaaacattgtccaagcaacaaaaccttcaaaggctcagatcatgacccgcactcgagtggtcaagcctcctcagaatctcaaagcaatcaaacgagtatggagaaagggagttcaagttctttgtctgaggcaaaatctgcaaaaaaggggactagtctaggaaacaaaaggcattgtaaaccacaaatgaaatccagtaagggtcaaaaagttattgcgaaaaggagtgggaagagttaaacggaag

SEQ ID NO: 22456 - DNA, 2431 bp, Arabidopsis thaliana landsberg
ttttaaggtaattgaaagaataataacacatatatttatatattatgatccaattcttaaaataaaactgggaagagtgaatttacagtagtaatttcaaatctattttccacagctaaatgagaagatcatatacgattgtgtggatatatataaacaaccctcgttaagtcatccacttctccaaaaccataaaattcaggtatccattcatcaaaaacgaatattttcatacatgttttctgtgtttttcccaactttgtttatttttacatttgctttatagttagaatatatttgaagaatttgatatgtctatatacgtataatattctatttccttaaattttgagcaagattactcttttctattttattggttttgcatataacaagcaattgatttatttgactcagaaaatcattataccgcatgacaaaccatccaatgaatgtttttcattattagttagtattttttttttgtcaaacattattatcagttagtattagttttaattttcttatagagtctaatatacatcgtctaatgttaaaaagtaattttttattaagtaaaagttaattacataagtttaatactaactcaatatatacattttgtggaaatgaattttgaaattttcaagaaagattttttttcctgtataaaaaacataattagagttgattgtttcaattaacttttaaagttacatttcttgtggtttgtgcaaacttttttcgataatatctaatatgttttagtaaccacatcacgtatttatcgcgtataattctataattttgaatagatgaaaccatctttttcgatctctaaaccaaaaagtcaagttaaaaataaaattgagggtaaaaagatcatcgaatgtccaaatggaacggttcctatattaagaaatacaaaagaatatgtcgcaagagcccaatattgggagaaaaagcatttcaacccgcataccgtcggaagtcatgggacacatgtaaacaaaatacttgaattaattacttgagttacaaatgtgtatatttggaaaatatgtatgatatattttttttggaaatttgaagtatgctggagttaaatcacaaggtgatggtccttatcatgggttggcagcttatatgagtgtgcatgatttgaatattagtagggaccaaacttcatatgctagcatttttgttggtagtggagacaacaagaaaattaattttattcaaacccggttggacggtaaattttatgttgatgttattaaatttatatatatatatatatatatttatatatattggttttaaaaataggttacattactatgacttacaggtgaatccaagtttatttggtgatggacgtacatggagttttggggtttggaaggtacatctagatacaaatacttctttatctcgtttcccatgaaatgctaaatattctcggaattttcttttgtaaatactaaatatatacccttttgattgcaaaataatttatctatagggaaataatttgacacttagtatgtgttttacgcttctatcttttaatgtacattacattttactattttttcaattatcatatggaatatattaatatattaagattaaatattggcagggtgccaatggaactggttgttataatacaatatgtccgggttttgttcaagtgtcaaaaactgatcttttaagtgcaccttttccatatccacacaaaggacaagaaagagctgtttatgctagcattgtacaggtaatatacatacattacattttagtagcaaatatgttatgttggtaaatcaaatttgacatgtaggtctttttaactatatattgaaggaaaaagatgtaggaaattggtgggtaaccgatgtaagatatgacagaccagatgtgcatattggttattggccaaaagaactatttgatcttataggtaatagtgtagacatggttggagttgcaggagcagtccaggcttctccttctggtataagtccaccaatgggtaatggtcaactaccaagtgaagatgaaaataagtctgcacacgttaaaggcgtccaaatagtacattctgattttaaatatagtaagaaactgaagttagaaaaactattggacgacaacaaatgttatggcttaaaagatggaaagaagcagttttttaaagaatccaatttgttcacatatggtggacctgggggtaactcttgtggaatctaatattacaaaaatgatgttttctcttcaatatctatgtatcaggatttgtgtttcctacatgctctgatcattagtatatttggtttactacaaagttgctatatttccattagttgattaacgaattcatgatttcagttaggtttaggcaaaaaatccaggacttgaaaacccc

SEQ ID NO: 22457 - DNA, 514 bp, Arabidopsis thaliana landsberg
  unsure (1)..(514): unsure at all n locations
caaagcaaaaaaatcatatcaagagcaaacacattgtcaaaggttaaatctagtaagaggccgttgagattttaccacgacagagtaaaggctcaatacagttgccatttcagtctcagcaatggaaatgaagtccttcaatgtctgttatcagatacataaaactaggtttcaggatccggaggtcagatatctgaagattagttacgtggtgcacaatcatggaactaaactcaaannnnnagacgaacaaaaaaccaacatacattacagaaaacttcagaagcaggaccatcagtttcggatgcagtgagctcctgcttcagtttttccaatcttttgattatagcttggatattctgagccagagacttcacttgtatctgaaatagacaagacaatcagatgatgagccaaaggagtagatcgacgacgaccgaaaaagcacaaatgcaaaccttttgagctgattcaagactttgaagatccttatagacgttcagtagttctgatg

SEQ ID NO: 22458 - DNA, 535 bp, Arabidopsis thaliana landsberg
  unsure (1)..(535): unsure at all n locations
tggttctactaaccaaaagtcttgtgaagagtttagcagggtgatgactcaaaagtttgaaatgtcgatgatgggcgagttgaactactccttgggttccaagtgaagcaactcaaggatggcactttcatctcccaaaagaagtacacgcaagacttgatcaggcggtttgggatgaaggacgccaagcccgcaaagactccaatgggaactgacggacacgtcgacctcaacaaaggaggtaagtccgttgatcaaaaagcatatcggtctatgataggttccttgctttacttatgtgctagtagaccggatattatgcttagtgtatgcatgtgtgatagatttcaatctgatccaagggagagtcacttagtggccatgaagcgaattcttaggtatttagtcgctacgccttgcttcgggatctggtatcaaaggggtnacctttgacttgattggatattcagactccgattatgctggatataaggttgataggaagagtacatcagggatgtgcaattcttaggaa

SEQ ID NO: 22459 - DNA, 272 bp, Arabidopsis thaliana landsberg
aaggctgcgttgacaaggagttgttaggtgcaccgttggtcggcgctctttgattggttggaccgttaaggaggtcgctctctgatatcaggggaaaggatgggaagttgacggtaaaggtccgttgttgtatcaagttcccagggatgcggtagctagacgcggttgtttggtttctcgtccatgtgtacctcgggggcaagtagcctagtggtagcattggtgggagcggtagctttgtgaaaacgggagttgtgcgcgtttcggttcct

SEQ ID NO: 22460 - DNA, 604 bp, Arabidopsis thaliana landsberg
ttcacgttggatgagaatattagaatagaagcctggaggaatccacagtggtggacgggatatgaacattaaagtagctggacgtggctaaaaatcatcatggtcaagggaacacgaaaccatgcatttcctacctgtttcagaaactaaatacttagagagactctttctctctctctaataaaggaaataaaaagggaataaggatgagaagatcgatgcttactggcgacctcgtgataaagagagattccagtggaagagaccacttcaaggatgtcacgagggacctttgatagtgagccaacagcagtgatggtgacaggaccattgtagcctgatttccttaaaatccgtttaatacacggaccaacccgacgagcatcatagtcatctggaaccggacacctcttcatgtcccaatacacatatactggggccaaagcaaactccttcgtaggcggcggatccatcatcattcacgaatcaaagacttttaaccttcaaaaaaaaaaattgaaattcaaaactggttcggaacacggccgctgatagtttcgatcgcaaatacaaccttgaacttttagggttctttatctatata

SEQ ID NO: 22461 - DNA, 467 bp, Arabidopsis thaliana landsberg
tttaaacttcaattgtgtatttatttatttagaacaagttaatgaaatttcagctttgaattgcatacaaaatcatctataattaacaactaattaactaggtaattagagactaatcagacactaatcaagtcttaatatatcagaaaaaacgttgcagaacgcttgcaaatccatcgcaaattctgctagagatttgctaggcggtaaaaaagaatcgcaaatccgtcgcagttattgcgagggaagtagtaggcaacaattgcgtgtgatttgcgaggaaaacagttcctcggtacaattgcgagggaattgcgacatataaccatttgcgagaagagatttgcgaggaactcgttttcctcgtaaatcccttgcgtatacctgcttgcgagagatcaacgagtaattcttccctcgcgaaacgactgtcttcttgtagtgtttgcagtaatctcatacaagtg

SEQ ID NO: 22462 - DNA, 294 bp, Arabidopsis thaliana landsberg
  unsure (1)..(294): unsure at all n locations
tctcgggggcgttacaatttgtggtatcagagcatggttaatgatgctagcaagactcgcgtttttcaaaatgtattatcgagtaagtaagtcgnnnnnnnnnnnnnnnnnnnnnnnnnnnnnnnnnnnnnnnnnngtagatgggttaagtttaccttggttgattgaatgcagatttcttgtcaaagaacggagaggagcgagtcgatgaatttctcacctgtttatgaaaactggagtcagcacttcgggccggaagactgggtaccgtatgttggaggagaaggggatgag

SEQ ID NO: 22463 - DNA, 601 bp, Arabidopsis thaliana landsberg
  unsure (1)..(601): unsure at all n locations
cttccgcctcttgtcatgatagctcttttgactggcctgagcagcttctaagttctttgtaataaccctgaccttttcctctgcctcaagtaccaaatctggcccaaatatttccctttctcctgcttgagaccaattcagcggggttctgcatcttnctcccatataaagcttcaaaaggtgccatctttagactggactgatagctgttattataagaaaactctgccaaagaaaggcannnnnnnnnnnnnnnnnnnnnnnnnnnnnnnnnnnnnnnnnnnnnnnnnnnnnnnnnnnnnnnnnnnnnnnctgtctggccatcggtttgcggatggtatgctgagctttgtattacctgggtcccaagtgattcttgcagctgctcccaaaagcgtgccacaaacaatgctcctctgtcagatacaatggtctttggaataccatgcaatcgcactatttgatcaacataaatttccgcatacttctctgtcttgtgggtggtatgcaatggtaagaaatgagcagttttggtcaatctgtccacaataacccaaatggaatcatggtgcctggaggtattgggcaacgtacgataaag

SEQ ID NO: 22464 - DNA, 614 bp, Arabidopsis thaliana landsberg
agtgaccgcggttggaggtgagcggttgccttctccttctataagtaacgccgttgtctctctggctttttcacatctctcgctgttctctgttgcttccctttcttctctcccgtctgcttccaccatgggcaagaacaacaagcgcaagtcgagccaactcctccatcggaggagtttggtgactcggagtactcagaggaggagttctcctctgagtctgaggagtctccggctcccatccccctgcgtgagtcgtctgacgactcagacgactcccaggggcttgcggcggaggtctggacgtacaaccgggccgtcgagcgttctgggctcgagggctcggatgagtcggagtactcctcggatgagtaggactcggacggtggcggcgaggacgaggacgatgacgatgacgatgacgacgacgacgacggtggcgacggtgacggcgacggcagcggcaggagcggcggcggcggcacgacggacgatggcggcgcacagcagggacagcaacggggcgcacagcaggtgcagcaccaaggcgcacggcgcggcacaacaggccactgctagatcatatgtctttagatatagtatatatattagat

SEQ ID NO: 22465 - DNA, 749 bp, Arabidopsis thaliana landsberg
taaatgtggaagatcgccctcaccgttgaatcaagtgacccagggagaagtattctccaccgtttgatgaagtatttcacacttcaagaagatactttattctttacttgagctctcatatttcgaagaccaaggcataacttcgtgacccaacttgctccccaaacactcctttactcaacggacaaagagattacccatgcccctcaccatttacaatcaacttttctatcctttcccaaagaaaccaaacaccattctcctccacccattgaattcgacaaacccacttttgaaactctctctttcatcatctcattttcgcaaaatctccatctctcacaaagcttcaaagtttcactccaaactcttcacgaattcgttctcacttcatcataattcaccaaagtcactcgatcacttccaagttcatcctcaagcactcaatcggtttcaagctcaaaatttcatcaccaaagaaagcgattcccttaccccttgatacctcttggagagttgtttttaattgcttggttgaaactcatggattcaagaaggaagagttcgtctcgggcaagaagatcctctgtcgatcatgaagaagttgaggcgtttgacatgagtggcatgactgaacgccaaattcgccaagctcgccgtgctcaaagaacaaacttgattcaaggaggaagctcaagccgctcaaccatgcaaagagaagaagtagctcggggaaagagggtggttga

SEQ ID NO: 22466 - DNA, 928 bp, Arabidopsis thaliana landsberg
  unsure (1)..(928): unsure at all n locations
tccaatgaggatattatatagttctaaatcctgagttaaaacctcaaatcctatgtttttttgttgtcattgcttggacataacatattgtttcgaccaaaaccaaaaaagaacataaantgttcttaagattcaagttctttttcatatcaattaagaaataacttacggcatctttaatttatgtttgttttgatcaatcacataattatagtgaatagtatacttttagtgctattatcctatccttacaaatccataatcgaatttcaaagcaacgcgacctaccctcaggtctcaaaacgcacgttcaccaatacaaagtggcattttcgtaaaataacattaagaaaaaaacaaattaaaacagttttgtaataagatcaataattatatattattagatgactcggataagccattcggctttggtctttttgttattgccaacaattaagctcaggcttacgaaagtgattgtctgattgacgttttctttttcatttccttttttggtccctgaatacaccttttgagtttgaggtatatctgtgtcctctttctaatttttttcttagtgattcctgattactaagaccatctccatcaatggttttttattgaaaaactgttcaatataaaaataaaatataatcaaaaaatatgaaagagagtagaattagtctcttaagtgagaaactctgaaaaatctataaaaacacttatatatcatctatttgtcaaatattattttattgttaaaatttaattatataactaatatttattaaaatattaatatcttttattttttagaaaccaaaaaagtatttcactgattgaaatttatttctttttttcccgtattttatgaccctgaaaaaagttaccgtgttttttttacttttttacatgacataattaatta

SEQ ID NO: 22467 - DNA, 771 bp, Arabidopsis thaliana landsberg
  unsure (1)..(771): unsure at all n locations
aattataacttccttcattttttctatataaacataaatttatatgttaacaattatattaatattaatcaatgtatgataataattatttctatgtaaaaaatcgttggttcagataaaatgaaaaggtatattacattacattacattacattatacacaagtaaatttcagattttaaataataatccataaactttgtaatttactataatacatttatttaataatcattttatcttgtacatagtgcgaacaaactatctagtgaaagataatcttcattcatttttttcttctatacgaagctaatcatatccctgattagctccattttgttgattcctagaacggtattcagtaagcatctttcggaaaaacgcgtgatggcgatgtgagctcttcaaaaatccaaaagatcctggttggtttacaaaggagtccatcatctcccttttatcctccaacccctttctggaaattagatgtgccaccgtcttgataagaattcttatggaataagatgcaagtgactcaatgaatttggtatttgtgtcatcttggtattaaacgagcttttgcttatagtatatgtgtaaaggatcttctgagctcttcaaaaagttgaagttgattctttcatctcggggtttttttagaatttagagatatgattaagaacacaatataaagattgactctttatttatggcttagaaactctctcanaactaaagatctcaagttctctcaaaactctaaaaaactcat

SEQ ID NO: 22468 - DNA, 1018 bp, Arabidopsis thaliana landsberg
tattgcttttctaaaagtctattcttttcgtttaaagcatcaatcaattcattgattttttctatcttgattctatctagacctttaaacaagctagaatagtctacctcatcatcactagactcttcatcgctagaagaagcacacgtagaggtatttcgagcacttaccttcttctcctttgccatgaggcaggtgtgacgctcgttggggaagagagacgacttgttgaaggccgaggcggcgagtccttcgtcgtcggagtcggacgaagagcaatccaaatcccactccttgccgaggtgagcctcaccctttgccttcttgtaagacttctttttctccctcttcccgcctttttcttgtccctggtcactttcattatcgagacagttagcaataaagtgaccagtcttaccacatttgaagcatgagcgcttcccctttgtcttgttcttgttgggatgccccttgcgaccctttagcgtcgtcttgaaacgcttgatgatgagggccatttcttcatcattaagcccggccgcctcaatttgcgccaccttgctgggtaacgcctccttgctcctcgttgctttgagagcaacgggttgaggctcattgattggaccgtttagagcgtcgtccacgtacttcacttccttgatcatcattcgcccgcttacgaattttccaaggacttcttcgggcgacattttggtgtacctgggattctcacgaatgttattcaccaaatgaggatcaagaacggtaaaggaccttagcatcaatcggacgacgtcgtggttcgtccatcgcgtgcttccgtagctccttattttgttgataagggtcttgagctggttgtatgtttgtgtcggctcctcgccccttatcatcgcgaatcgtccaagctcgccctccaccaactccatcttggtgagcaaggtgacgtcgttcccctcatgtgaaatcttgagggtgtcccagatctgcttggcgttatccaagccactcactttgt

SEQ ID NO: 22469 - DNA, 935 bp, Arabidopsis thaliana landsberg
  unsure (1)..(935): unsure at all n locations
cggcagcnaaagagaagtttgagagcaaggcgcggagggaaccgacgccgaccaggaancnnngacatacgcactcncaaacctatctcctttagattaataaaatccagaacaaactctcccacataatcaaccatattggttttacgcgaaacaaagaactcaagcatctccaggtttcgcaattcacggagagatgacgatagatttcctagagtacacctttcactcaaggatacagcgagcgacctgagcttagtcatacggaggaggtctgtgacactactgtgttgcgttgagaaataccacaagtgctccaggttcactagatcacccaattctaacttagttttatcatgcataaacaaaggtagagaaaggtacctcaactctatcatctctttcaaaacatttggcacatgaactgttaccccgtcagcaaactctaagtttaaatagagcagaagcttcaaattctgcatagacgaaagtagatgagatgcttttgcccgatataaactcaaatatctcaagtggattagcagtccgatgctagagggtaactcccctccaaactcaactccatggagatctaaaaccctcatcaactgtagcctcgtaaaccatacttcgaatcccctataaccaccaagctcctcgataaacaagagagatctaagttttggattcttcagcttcccctccatatctgttttatcacccccttttacgacaagtctgcgaggtttactaggagatttagagttttcagtttctatcaagttctcttcttcagctttaagaagacaaacttctctcacaatatcatgcaagtgacatgtttcaaatctcctagttctagcgtctctctcagaaataccatgtttctctttaccaactcttctatgtatccatctccgacctttcgatagtcg

SEQ ID NO: 22470 - DNA, 553 bp, Arabidopsis thaliana landsberg
gatcggagtaaggcggctagagatttgagtgatctaactggagattgaatttttgaaagtatgctttcagttgagatgggtttgagagagctagcatcattaaaggtatccataattctttctgagttacctacaagtgttgtcacctagcagatatctccaaggactacgttttcaaatcttcttctctcttttgaatatcaggtggaggatgctgttgtgcttatattcgcccagcagagaaagttgagtttggttcgccacactgtttccggtatgtaatgtatttgcgagctataacaccacaatgacaaatatatgcttctttcgcttctattcttaaaagtttaaacgatggatgagtaatctgttttctgtttagatacttaacgcttataagctcttaataagaaggcataactaaaagcaatttaacttttgttttctctgtatcttacagactccaaaggtcatggagaatccagatttatcgatgcatatggtaacggaaaagtctcactaactcttttctctttgttttccacccttatgt

SEQ ID NO: 22471 - DNA, 471 bp, Arabidopsis thaliana landsberg
agcaacataactaggaacacaaacccaaaaattactgaaattataccaaaatgtagatctaaacaagataaacaattttactcaaagaactaaatgccaaaacgaatagattaagagtaattaaggttttaagattcaaggacacaaagaaaaactaagagataaaagcttggtcctttggacaaatcccaaagtgacctatttatattaaagtctcaaaaaccctagattcactagaagacaagacacgtgaggcggtttagatggatgctcgatcttggggatcgagtaaagagggtgctgcaaaatttgcgcctttgcctccatgctctgagtgatcaattggtcaagcagatgcttcttcctttcttatctgtatgctcagatgtctggttgagtggggaatgaggaaggatccgaaaacgctttgatagatcagcaagtcttgtagagtaggtcgcccttggtcga

SEQ ID NO: 22472 - DNA, 588 bp, Arabidopsis thaliana landsberg
gctacatcgataaggattgttgaacctgatcctgttttgccttaagctccttcgatcgtggatagtgagacggtgatcatcccagatgatgaaggtgatgtcgggcatgaaccgggagcctcttccgaggaagtccctaccgtcgaaccgaatgaaaccgagccagttgacgttaagctcgagatggctacggatttatagtggctgcgtccacttaaatttggggtttgtcccaaacatttaagaatttaaaatttaatattgggataaatatgtttttgcctaaagaggctttttttttttttttgaacaacattttgccttagcagacttctaaaccttttccactataatcctttgagggtattgctaaaatgaaatgcgggtttgcaaagtccgcattaagtatttttgaccatgtggttaaatttcgagatttatcggcttatcaggcctttctcttagttagtgagaactgagctcgttttcaacgtgaattctccaactcgggtttagtcaattcggtaaacttgatgagcttgggtgtttactttgtatttaatgggctttttgtctttaatgcgatgg

SEQ ID NO: 22473 - DNA, 565 bp, Arabidopsis thaliana landsberg
ctttttatgaacacgtactgtctcgttaaaaccttatcatggaaaaacccactattataaaaaccatgacaaggaaaaaagagtacagggacgtgaactccccctcgaagagacttcacaggtctcgtaggtgatacatcttgatcattcttttcgttccttttgatctcgtcaatatatgacaaagattttgtaagagagatagacctttacttttatgtctatcttttgcgtgttctttgctgcctcgttaaaaaccttttcatggaaaaatcaagtgggataaaaaccatgataaggaaaaaagagtacagccacgctcatcatcatatgtctcctcctggaagcatcttcttcaaaagatgaattttgatatgtgaagaagatttctgaatgttgtagctcgaagcgcttttctgctacattgtgttttgggcgaacgtactggaaatcaatttcttgatttttcttgaggtcttgaatgttacagaagaatcttggagaaatatttcttgtcatgtcgctcttgacatagcttcctttgaactgggaaacatatgcaaca

SEQ ID NO: 22474 - DNA, 998 bp, Arabidopsis thaliana landsberg
agaaacaaaacttaacctttgcatgaagtgaatcagagaggagagatcggagaaaggaagagaattgattgtgaagagatcggagaagagagtcaatcggcgaaggaaaaaatcagagagattagggtttcgcgatgttgcggctgtggtttgagcgagctcaaactaggttatccccatatatatagatatttgacacgtcgcaaatccctcgcaaaaatagctaggcttttgcaaggaaccaccaatacaaccaattaaaacgaggcaagcattgcaagggaattgcgaggcctccaagtaaatccctcgcaaagtctttattagggtttttaaaaaacaaaagacatgcttaaatattattaatcatgtcttattcattttctgatttattttctcttgtttctagtaagatcctcagcaaaaaacaaacaaaatatgttaaataatttagggtttaaggtaaaaaatttgcgagggaagtgctacgagcggcttgcaaatccctcgcaaggacctcgcactgtaaaatcaatttgaaaaaatacaacaaaacactactcaaaatcattcggattcgttattctgaatcattaggaagttaaatatctacattagaatctactttctcatcatatacttcaaatgtgcatttttcccaaatacatcaatgatgaacttatgtttttttataagttgaatcataagtgtttaacattttcaaaaagaaatgttaatattgaaacatatataatatgtttttgtgcatcaccatataatcaacttgtatgattatacggtcatttagatttacatttataaatgaaaatcaaagatcccaaatcacttctatgtattttagggtttagggtaaagatttgcgaggttgttgcgggagatttgcgagggttaatattattctttgcaaagtactcgtacttccctcgtaaatttacgaggaaatagtccctcgcaaacattgcgaaagatttgcaatg

SEQ ID NO: 22475 - DNA, 781 bp, Arabidopsis thaliana landsberg
cattggcgagcatgggtttgaattggaagaagtgaatggagacttattcgatgtgcctgttatccaggcggatcgtgcgttcggagaaatgaatgagtatggagccaacgacgagtatgaaatgctaatgcttatgggaaatgacgaggaagacgagaatggagccatagagaatgagttagagcacgcgattgatcatttaattgccgagtgtgctcaagactttggtccgaatggggaagaaggaggagaaaatgggaacgatgggggtgatttcctcatcggactcatttgagtcattgacgctagagcctaagagtccgagtgtgatcaacatctcatcggacaacattgtgatgatgctgaatcccagcaagccggaatcatgttgggagattgagatgtttaagggagatgagccaagtgaagaagaaggaagaggaaggtgggatccgatgctgcttgaacaggaactaaaccacgagtatttaatgaatcatttaaaacttgatgaagaaaggtcgaaagaaaagatggttgataaggagggagaagacgagaggcgaaagggaaagagaacgaccgaagtaggaatagagtcggagaagtctaaggcccaaaggatcgttggagtaaatctgcatccacttcggatcggatatgggattaattccaaggttaagcccagaatacgggcaacggcgacccagtcagttagaaggaagttacccactccggataagaatccgtgaagagatatgtgaatatactgatcattcga

SEQ ID NO: 22476 - DNA, 613 bp, Arabidopsis thaliana landsberg
gattcatttttcgcgaagtggataaattctctccttccacccagaggtgataggtcatgatcaggtgaatggatacgttcaggctgctgcacttgtgagccaagcttcgatgatgccaggaggtaaaggcgagacgcaatgttgccaaaggaggttaaggatggtccaaggctagagggagctgaaagaaccaggggttaagagagctttgatggttggagttgggcttcagatactgcaacaggtaatgttttattcacagatctttgtctgtagtaaagagacaaaacaaataaggaagtaaataacggaaaagaagcatgtttgcagtttgcaggaataaatggagtgatgtattatacacctcaaatattggaagaaacaggtgtgtcaagtcttttgacaaaccttgggataagtgccgagtctgcatcgcttctcataagcgccttaaccacactcttgatgcttccctgcattcttgtctccatgaggttaatggatgtaactggcagaaggcgagttttctctgcttcccttctcttggtttatagctgaatggtataatttgaaagagtacaataccagaagcgtgattgcgggctctgatgct

SEQ ID NO: 22477 - DNA, 1414 bp, Arabidopsis thaliana landsberg
aattagatgtaatctttttatataaaatcagagtaatttcataccagaaatcagactaaattttgagatttgtaggaagtctcaaaaatcatagtgtgatatcttttgatgattttttctaaaacaattacaattacgtgccatagatagaaaaacgctaagcataggtttttgattgaaaatggaaaatggaaaaagaaccttcaactcattaaaagaaaacaaaaaagtgcatataataatttaaaatatcatcaaaaatgaagaaattaattcagaacttggaactattatggagctatggaattagttttagttggaatttctgtttagtagacataattaacaagaaaccatacaaagtcatgtgaatccaagttttttttttttttttgatttttttttatttcgcttggtagatgttatagtgttactttaagctttctttgattttctaaaaacaaaatattttacactgagaggtgatacaatgttttaggtttaaactgataatgatccaatttcttcaatacagtgattgcaacacttgcaatgcaagatttcatggaggcagcagcagttgtgttcctattcaccatatccgactggctcgaaacaagagctagctacaaggtttgtgtcctaatattattaggctaataatcaccatctataacaattgtgaaatctcttgctattttaataaatgattttgaagttgaaactagaatggtttattaacgtaatgattattgcaaatgtaatatctcaggcgacctcggtaatgcagtctctgatgagcttagctccacaaaaggctataatagcagagactggtgaagaagttgaagtagatgaggttaaggttgatacagttgtagcagttaaagctggtgaaaccataccaattgatggaattgtggtggatggaaactgtgaggtagacgagaaaaccttaacgggcgaagcatttcctgtgcctaaacagagagattctaccgtttgggctggaaccattaatctaaatggtatgtaatcctattttaagagcttcaagctttatacatttttgttgtatctttcattcttttggtctttcttggtgttttttttgcaggttacatatgtgtgaaaacaacttctttagcgggtgattgtgtggttgcgaaaatggctaagctagtagaagaagctcagagcagtaaaaccaaatctcagagactaatagacaaatgttctcagtactatactccaggtaagcaaagacataaccagaatttctttatgtttttgattcgagtaattttgagacctctgtgtttcttgttttgtttcagcaatcatattagtatcagcttgcgttgccattgtcccggttataatgaaggtccacaaccttaaacattggttcctg

SEQ ID NO: 22478 - DNA, 501 bp, Arabidopsis thaliana landsberg
  unsure (1)..(501): unsure at all n locations
ccttgattttttaaagaatcgaaactgttttcttgtcaagtttgagtctttgtcatcgctctgtagttctttgtgagtgagtcactaagtacttcaagaggtgcggattaagtttgttgagtgattcaacatccttcattcgttcattgatcgagtgagtctattaccccaccgattgagcgagtcaatcacacttatatccatcaattccccttgaatcgatcccacacgagagaagcgatcgatagcgtgtcatatcaccaccttcatcatcccaccttccatgtggcaagtttggaactcctgatcatcaagtgatcaaaggatggattagctccaattcttgcatcnnnnnnnnnnnnnnnnnnnnnnnnnnnnnnnnnnnnnnnnnnnnnnnnnnnnnnnnnnnnnnnnnnnnnnnnnnnnnnnnnnnnnnnnnnnnnnnnnnnnnnnnnnnnnnnnnnnnnnnnnnnnnnnnnnnnnnnnnnnnnnnnnnngttg

SEQ ID NO: 22479 - DNA, 546 bp, Arabidopsis thaliana landsberg
tgttttatgttattgaggatggtgtatggcatttgaacctaattttgttatgtttctggattttatgtaatatttgaacctaattatgttatgtttctggattttgtgtaatagttgaacctaattagacatgtatttacctattttaagttatgtgtattgaccggccaactggacaaacttagcaactcttgtattttaagttgtgtgtattgaccagccaactgggacaacttagccactcttgtattattgaccggccaaccgggacaacttagccaaaacgttttgattttaatacaatcctaaaacacataaatcatttcagaaaataagtttgtcctctacacataaactacgcataacattcccaaatacacaaaaagaaagtcaaagtcctatttcttcaaacacctacgagtccacacacacacataagcaagaaagaaaactcaaagtcctaattcttctgtctcttcctcgtttgctttccctcagctgtaaactttttccccttatacttggaaggttttcttcacgtttttt

SEQ ID NO: 22480 - DNA, 473 bp, Arabidopsis thaliana landsberg
ttaaatcatcatataatatataaaattaaaaataaatctcaagtttttatcctacatatattgtgattcgaaattttaaaaatggacatatgttatctaatggacgaaaaatgtgtgggttcacggttcaccgtttcacatcagctaaaattaaacaatgagttaaaatcatatcataaataagttcaacattaataaaataaataggttttttggctagacgaatttaacgaaacgggtttttaaatcaacattaataaaaaagtaatatatcattaattcactgttttaatacagattaaatccttaatttattatttttaacaccaccaatattaaacatatcaaatcagtttgaatagaaaatattgtataaaacaaaaaaaaacgttccgtactattatgttacttaataacaattataaattataaaatataaatatttcaaaaaataatataaatttgtaaccttt

SEQ ID NO: 22481 - DNA, 510 bp, Arabidopsis thaliana landsberg
gccctgtgcggtttaatgctcgtatacttctccagcttcttcctgttgtcttcatacttctgctcaacttcatgccttcttctcaaccagtttaccaactctctgcaacttatccttaccagtacaagttcactacgcagaaaggtgtcaattactttgtgaaatcgtctaaattcgagcaggattatccacgagatagcaacgatcgacacacgctggaagaacaagttgagagagattatgtgtctatacttagtcagaattgtaggtatgagatgcagaggaaacaatggggatttgttcgtgaaacgcctcattgtgacatgatgaggagatttgatacagctgctgcttgaaacaactgatgctagtaccaacaatgaggcacacattggtaatgaatcatcagcttataaaacttttataatgtcaatgccttcacgagtcaaactggtatatgtttttgttttcttttgttttggattataatgctttagaacctaacatacg

SEQ ID NO: 22482 - DNA, 1276 bp, Arabidopsis thaliana landsberg
gtgcctcttcttcttcccttctctcttcttttgactcgagcctgagttagtaggcttgtcgtctcttggttcgttgaggacggactccttttccttgtcgttgaccaccatcccctttcccttaggatccatctcttcgggcggttagtcccttagatgaagagtacggccctgataccaattgagagcacctagaggggggtgaataggtgttcctgtaaaaatcaaacactaatagctacaaacttagttatgagtgttagtacggctaagtagcttgaagcgagttcttgtggacacaaacaatcacagagagatcaacacaagacacacgatttttatcccgtggttcggccaagtaacacttgcctacttccacattgtggcgtcccaatggatgagggttgcactcaacccctttcaagtgatccgatgatcaacttgaataccacggtattttccttagagtattttcccgtttgcgaggaatctccacaacttggagtctctcgcccttacaattgagttcacaaagaatacggagtaaggtgggaatgagcaacgcacacaagactcgaaaatcagagcaacaacacgcacacaagtcgcaacaagagctcgcaacgcaacacaaagagttcacaactccacaagagctctatatgctatcacaatgaaacgaatgcgtgagattgatgtcttggtgcttagaagagttgtaggaatgcttggtgttctcctccatgcgcctaggggtcccttttatagccccaaggcagctaggagtcgtggatgtccatttggtagcaattcttgccttctatcggttggcgcaccggacagtccgatgcaccaccagacatgaacattgctcgatttctttccttcttcaacgaagccgaccgttgaaccctcggtccatttggcacaccggacactgttcggtgcacatcggacagtctagtgcagcctagtgatcgttggctctggccacgcgtcgcccgttgatcgcgctgccgaccgttggcgcgggcgctgttggctcaccggacaatccggtgcacaccggacggtccagtgaattttagccatgacgtccacggtgattcccgagagcagagagttcatctctaagccagcctgggcacaggacagtgtttggtgcacccgcagctggtgctccactggctgtttcagctaaactccttttgctctttttgaacttgacttaattgagttcctggcacttagacaagcatgtttaggacataaaata

SEQ ID NO: 22483 - DNA, 1151 bp, Arabidopsis thaliana landsberg
tgagctgacggtcctgggcgaagccccttgatcatggcctcaatgacaatttcattgggcaccgttggtgcctgtgccctcaaacgcaagaaccttcggacatacgcctgaaggtattcttcgtgatcctgggtacattggaacagagcctaagcagtaaccggcttcgtctgaaacccttggaagctagttaacaacaagtccttcagcttctgccatgaagtgatcgttcctggtcgaagggaggaataccaggtttgagcaacactcctgacagccataacaaaagatttggccatgaccgcagcattgccaccatatgaagatattgttgcttcgtagctcatcaaaaactgcttcgggtctgaatggccgtcgtacatggggagctggggtggcttgtcagactggggccaaggtgtagcctgcagttctgttgacagaggagaagtatcatcaaaagcaaaatttccttgatggaaatcttcataccagtcgtcatcgttgtagaagccttcctgatgaagctctctgtgcggaggccttcggttctggtcatcttgagcaagatgacgaacttcttcagaggcttcgtctatctgcctttgcaggtcagctagacgagccatcttttccttcttccgttggacctgttgatggagcatctccaagttttggatttcttgatccaattcgtcctctagaggcgttggactggtagccttcctcttctggcttcgtgcctctctgagagaaaggacgtcttgattggggtccagcggctgcagcgtgccagcccctggtgctgaagccttcttcggcggcatgacgaagctgatgcttgccgaaggtgtcgaaaagctcaggaaatggaagtgagttcaccggaggtgggcgccaatgttggggacttgttctcaaatgctatgagttaagaacaaggcaacacagaaaatgttaaacgataaagtccttcgtcctttgaagcattatttcccttaggatataacgatctccggacgaaggtcatgaaggacgaaccttcatcatcacagtatacaaaagacgaagcatataaaacataaaaaataacatgaatatttatataatattattcatttaactttgttatattatcatagagaaataga

SEQ ID NO: 22484 - DNA, 706 bp, Arabidopsis thaliana landsberg
tgtgttagtattaattcggacatgtcaaaagtttgtttgttagattttgttgatttgagttattgaaatcttcaaaatattcaaagattggtaccataaaacatccatgtgagaacgactcctacggcattgattactacatgtgaagatatcttcataatactcccccctatatctctttttttcattggcggggttatacaatatataagtttttttttgtatgatttctttatcaaccactgacttttattaatgatgcatatcgaaaattaaggctaatgggattttggtataggctaatgtctagtaacaagaaagaagagtatatgtttttttttagtggtgcgggctttaaaggagtccaatgaggtgagtattgtttaagtgagcccatcgtgtagttggactcattcaagccacttcaaatgatattagaaatgttttattttcaaaatagttgcacttatattgcagcggttgcattgcgtgacatactaaaaaacttgaaacctataggattgatgtattttatcaccagctttagctttagatttcactgaagagaagctaaagagttaagactttatagatgagaatgagacattatctttgatgatttccattagttaaatagtatttgggggggattttctgctaattataatcacacattgtaaatgtttaagagggaaaaatttgtatg

SEQ ID NO: 22485 - DNA, 681 bp, Arabidopsis thaliana landsberg
tctatgggtgagggaagactgacggttgaactgatcttcaaattatatccctgaaacatccaaataaccaagtgacaagagaggtgagaaaatactcaaatcaacaatgtccggattgaaattgttttctccaatgtataatagttgaagattagatggtgaagagatattcccaatctcaaaaggaccgctgaagtcgtttcttcgcaggtgaagtacaatcaacgaagggatcatgaagagagaagagggaatggttccagaaaatgaatttccaccaatatcaaaatacttcagtttggagaggctactcatgttagatgggagcatacctttcaactggttagaaccaaggtcgatataggtgagcgagctcaagttgagaagcatatcggttagtcggttaaggttccccattgaatctggtccttcactggtgaaaccattataggaaagatcaagttgagcgaggtaggaaagatttccgagtaaagaaggaacctttccatagaaattgcacttaccaagcctcaaaaccctcaaatagttgagattgcccatcgaatctggtatcacaccggtgaaatcattataagaaagatcaaaatcaaaaagataagaaagatttccgagtgaagaaggcatcattccgctgaatttgcaactaataagactcgaaac

SEQ ID NO: 22486 - DNA, 4086 bp, Arabidopsis thaliana landsberg
gatagtttaaattaaaagatattttactaatcaatcttagggtttgggaactcattcatcttatataccaagttctgaaacaatgtcaaatcattgaccaacctgtcggctcttcctgccttcaacttttgcccttgtcacgtctttgaacgcaagatcaaattagatataacaaaattcgatttttgaacgcaatatcagaaatatgattaaagtcccaaattgtatcctatgagtataaaattctcaagcatacaatccaaagatattgaacgcttagtattaatttaaattctgattacatcatttacgtgtatgacgtaaacgaatcaaataattcaaacaaaaaaaaagagataaaataaacgaatccattatcaaaacgatgatcgtacaccaatatatatctcaagaatcaaaaaaattgttggacataactcgacatacaaatataaaataatatttagagtataaaacgtcaaaatgtgactcttcatatctctagtattaaattatatatatatatatatatataaataaatagaattaaaatccgaaggtgtctcttgaatcagctggtcagtgcattgagttttaggtcaaggccaatgtccattccgttgtaagcaataggcgcatacatccatagatcatcagagctcaataactgtataacataacattattcattataaccaatatttaattctctatctttaattgatacaatattttctatggtttaatttatattataatcattgagaacctaacgtaccttaatttggagctgtagaaatttgacgtattgtactgcttcttccaacatcgtgctaatatcaacctgatacatacatatttaacacatttaatttacttagtaatcatgaaacgaaatgagtaaaaagtgatgtggttacgtagtaatatataagtttgcatggaaaaaaaaaggtttgcatgaatgaaagacatatgtacctttgttccattagggacgagatgttgcaaaatccttagcctctcgtttatcctctctcttcttttctgcaccatcatacaatggactttgtttaattgtttcagctatcataataaattttgttatgtttgtacaatgcatatacataagactcatcatcacatttgtgtacatgtttgaataacatcgaagccttaatttttaaagtttatgtgtaaattacccttgcgtaaaggctttgaggatctgtggccgcgccgcggctggccctagtcttgccgttgaggttgagagccttagagtcctcgccatcttctttggacaagaaagtgtctccaccgtttgattcgtcatccgaacaacaagtcttttgcggcaaaagtggtttggtctttctcttccccgcagccttctccgtatattcttcttcgccgctattttcattttcgccactcatctctacgcatttctggctccttcgtgccttgttggctctcttgttcttctgatttggtttcaagaacattaaaatatttagaattatggtttcggctgaaaaaaaaaaaaaacgtttgtacaacttacatcagttgttgtggcacgcgtcctcttctttgaactctcacattggttgaacattttctcatcagtggtcgtggtcaaggagttctcaggctgtagcatactatggtcgtggttttctgcgacagtctccaaaggcaagaggcttttaccggagtattccgtcgcatcacattcacttgtctcttcaccaacaaggtacaagttcgtgttgattgtcgcgtcctccatcccattgttatcttcttcttgccgtggcatcgccgcgcagtaaccactataactactgctctcctgagagaagcaaaagccaccattccattgagaaccctggtggtggtaggccgtgagtgtggcggttgtctctgaagatgaaccgccacaaggttgctcataggaggcaaggagctgattcataaagtcagcttcctctgtatatattccgcctaggccggtgctccattctcccatggcttccatttttgatcactaagcgactttaacaatagactaattaatcttaattaaaatccgataagtaatgtgagagtattgaaggaatgattgagaggagtttgatgtgtgtattatatataggatcatgagaagtaatggatataattaaatgtcaaccaataaaacattataaccatctttagaataaagtatttttttgggtaaccaggtcttgatacccatagatatgaacagctaattatagagcttaaagaaagctttgtctttctctatatctgttaagcatgagttaaaatctgtatttagtcattggtaattcaatacaaaaagaagaggatcagacctatacaaatccttggaggggagataaatccaggttcaactgtatctattatgttaataatatagagttgtgaagaaaataatgaatgtaaggaaaaggtacaactaggaaaaaatataattgtgatgtatcaatcccaaaaccaaggacttatacatatgtttaatttataattgatgcatagaagacctttgcatttgaggatttgtttgagcaagtctaaaatatgaaaaacaatctctttctagttacagtcgctatgattggttcaagttcttaaaaaaacggttaacaatttgttttagtggttggaggaaacggttagagaataccaagttgaaaaataaaacataatatcaaaaacaaacatgacaaagaagactcaaataacaaaaataatcttataccaaaatatgtttacacttttagtggtacaaaaatttgttgggtttcaaagtaacaaaatatcatagatttgtcaagttgtgacgtgagtatatattgttatgaatgtaagaaaaaaaataactaggagaattatcattgtgatgtatcgatcccaaaagcatggacttatacggatgtttaattcataattggtgtatatatagaatacctttgcatttaaggatttgtttgagcaagtctacaagaagaaaacaattctcttactagttacggtatttgcttttaaagcagttagaaaattaagttgacgaaaaggtatccgataacataaaaaaaaaccaaaaacaataagacaatcttatattgttggctttacacttttgctagtcttaaattttgttcggacttaaaattacagaatatcgttgatctatcaagtgcgaagtgactatattggtatgcaagagccggatcatggccgaggaaaatatatatcccttcattataccaactttgaaagatggaatgttgatgcatgcaaatatcttgagaagctataatccaatagacatgttaaccaaggtcatcatgtatgataagataaggaaatgtgcaattttattcggatttttagctaatgtaaggtaatgtgcttgtctatagactaaggatcgaagtcattagtctatagacttgcaaattttgcaaacttcttgttggtgagcattggaaaatttatggagcctctatctttattttctttatgttatcttagttttaatttgtatgaacttctctcgtttaaagtttaatagtgaatgaaagttgtttgacaaagaaaaaggatcgaagtcattaatcctccaattagagaaaaatgattactattttgttcatgtaaatacttaatatatagtctaccactttgaataagttccatccataaatttgagtgagttcgaacaagagtttttaaataagtctaatgttttcaggggaacgaaaatgagaggtgtgaaggggagaaatgagaatgagagactcggttgttgaacgtgacagttattgttgatattagtaattattttatgcattaatcaaatgtaaattaaataactaatgactcattataagctgacaaaaaaaaccaatcaaatttgattaagtttaagtcaatgaacggacggctgatcgtgcgcgtggaaatgctataacccattcaaatcaaatatacactttatttcaaagtaattaaatatggataatgaaaatggttaccatattttgtaaaaat

SEQ ID NO: 22487 - DNA, 630 bp, Arabidopsis thaliana landsberg
ccgcaagttatcgcggtttcagatgagtaatgacgtggattatattgatgactttgattgttgacatgtataattagtatcttttgaatataatatttagttaaaaatgaattaaaaataatatttaattaaaactcatcaagagtgttaactgtaactacacaagtactaaaaatatgtgaataataaaaaaaaagatgtgttctattctaggaataaacatacaattgtgttctatcctagtaattattttacaaattattccatgcaacgtacgtatgctttgtgaaaaaacaaaaaacgtatgctttgtgctaattaatacgttcttaagtttatagatagactaaaaccttatcaatggtattccggacgtgttgtatctctctaagcacatgaatgaaactaaaaaatcatgtgaagtgcaaaattgaaggaatttaaacgaagagttaataaatcattgaaaaaatagaggatgaaggtacgataccatttggttattggttaatggcggcagagacggactgagattatgggagaagaaccatcatcgcgatgatgggaggtggccgtacgtgccacattatggacttatggatggagtggtagggtgaagagaccctactg

SEQ ID NO: 22488 - DNA, 655 bp, Arabidopsis thaliana landsberg
  unsure (1)..(655): unsure at all n locations
tcccctgacatgcatgcatggatatgcatgtacatgggtaccagacttccacccccactcgcgccactatatagtttagcgtgtatatatacatctacaattgtcgtggaagactagaagggactagctgaaattctatatatgtgggttgctctaacttggtgagctacatttatagggtcgatcgtggggaaccgcttttcgaagtggaggtcgcagtaccgtgcgcagtgcactacagtaaacgagaaaatttccgacggctaaaaccctcggacataagaactaaaccgtcggagataagctatgtccgacggcagtaacttatctccgacggttttaagccgtcggagttaacgcgtcggaaatagcgttatgtccgacggctgccgtcggacataaactatgtccgacggccctatgagttttaatatgattctgtttaaactctattttggttttagcatgtaatttgacaaacaccaagcaacaggtttgttgaagacttcctctgtgacatcctcaacattgaacacttgtttaagaaacttgattttgtagaagctaaaggtagagactgtcgttctcttcatcgtaagctattgaaatgttganaagtttataaattttgaacccttgttatgtttatgtagtt

SEQ ID NO: 22489 - DNA, 956 bp, Arabidopsis thaliana landsberg
gtgaatagacgtggggtgatgatagaattcatatactatgggcagactacaggggcccaataaagaaaaaatataaaaatggcctatacagggatcgaacctgtgaccttcgtgttattagcacgacgctctaaccaactgagctaataggccaatctgatggtaattgtcgtgttagatattaatagatataatatagacatagtatatgaacttgtgaggtttagaaatataagataatcaaacagattgacgataattgtcttataacagttcacattaagtaagaaatttttttttgatgtctatagagtataaacatatctattatataatacgttgagaaaataaatcatgtgctatgttacagattagaagaacacaaatatgaatgcacctggagagaagtccaccaagtgttgaagtacaaggaagtgaacatacaagtatgtggaccaataatgttgaatcttttttaaacatatgtataataataatatctgaaacattgcatgagaccgaagactacatctacatgcagaccaaaaacactttagctagttggaatttgtgattagttggagacagacaccataagaattatgaacataattccgaacaatgaacttggtttataaacacatgaccatgcgaaacaaatatactggtgtgaaaaatgaaatagcagaatcatttatggaacataacttaatttttttcttataaagatttgcattagcctcccgaaataaataacagaaatcgcgactccaataaattttatgactagtgtaaaagttatggaatcattgaatcttgaaagctattgagttcttgaaacaagactaaaaatggaaataagatatagttcacaaatgttacgtgaagaatgtttagttcaattgggtaatgtaaaataaaccattaaatcggaaactccatgatgtgaacatcaa

SEQ ID NO: 22490 - DNA, 523 bp, Arabidopsis thaliana landsberg
gcctgtaatcatggaccaaactgggttcggagggaagatctacatcaattggagcattgttttcgttctatagcgaaacacaaaaccatttcagacagcaaaacacttaaacataattacaataacttattgattgctaagaaattttaattaacactaacatcgaaattatcttcatggtcagaatgtagaggagagtcaacatcatctgaaacattgttagttccctacaaaacaatatatcagaatgtttgttacacagcacgcacacatagcaaacaaaagactatctatttcaagttctatttcacaattattatctaagaacactaactactaaactataagttagcttaatcaagtaaatcaatatacaccacgctcacttgctgattatggacaccgtcgccttcagatcgaatatcttcatccataggaataacttatttatgctacaccgccacaaaaagagggaatagggaaaaatttataaccagcatgaccttaacagttaaaaacgaga

SEQ ID NO: 22491 - DNA, 3646 bp, Arabidopsis thaliana landsberg
tcgatctttgtttttcttgcgtgacaagaaaacatggcatcgatagatgatggttcatctacaacaaggatgacgtctacctcgtctccggtggttacgatgggcgtttctccttataccttatcaagttctgaaaatccaggaactatgatctcatttgtggtgttgaacggtgacaattacaacgaatggtcttcggagatgataaacgctctccaagctaaacgcaaattagggttcatcaacggatcgattccaaaaccttcagctaatgatcctaattttgagaattggatggcagtgaattcaatgatagtgggttggattcgtacgtctatcgaacctaaggtgaaatctacagtttctttcatctccgattcacaccaactttgggaagatttgaagcaacgtttctccgtgggaaacaaagtgagaattcatcaaatcaaagcacagatcgcacgatgtcaacaagatggccgatcagttctggattattacggtcaactgtgcactctttgggaagaatatcaaacctacaaaccagtgactgtctgcaagtgtggattgtgcacatgtggtgctactcgtgaaccggcaaaagagagagaagaggagaagattcaccaatttgttttgggtctcgatgaatcacggtttggaggtctcagcaccactctcatcgccgtggatcctttgcccactcttggtgaaatttattctcgagtagtgagagaagagcaacgattggcttctgtccaggttcgtgaacaacgacaagatgcagttggttttgtggctcgcaacgatcagagttccttcccatcctcacgacccgatatgcaaaacggaggccgtttagactcctctatcattaaatctcggtctgtgacttgctcacattgtggccgtgtgggtcatgaaaagaaggactgctggcagattgttggatttccagagtggtggactgatcgcaatggaggtggtcgtggatctggttcccgtggaagaggtggtcgtggatctggtcgaggaagagaccaatctgtgacagctcatgcaacaagctctaacccgaccggccttccagaattcacaccagctcagctgcaagctctcgcacaaatgattaaaggtcaacctaacaacagcagctccgacaaattatctggtaagacaaatcttggcaatgtaattctcgatactagagcatctcatcatatgatcggaacactatctctgttgtctaacatggtctccataccaccttgtgcggtgggttttgcggacggaagcaacacaatggctatgagtgtgggagtgttatctttttccaatgatgttgcgttggttgacgttctttatgtcccaaatttgacatgcactttaatctctgtttctaaaattgtgaaacaaataaagtgcattgcaatgtttactgatacgtattgcgttttacaggaccgtttcacgaggactttgattggaagcggggaagagcgtggtggggtttattatcttacgattgtcgctacagcaaaaatccatacggcaaaaatctcctcaaatcaagctttgtggcatcaacgtttagggcatcccagtttctctgttctttcatctttaccggtgttttctagtacttcaattcctgttggttctcgttcttgtgacgtatgctttcgagctaaacaaacaagggaggtttttccccttagtattaataaatcaagcgagtgtttctctttgattcattgtgacgttaggggtccatatcgggttccttcatcttgtggtgcagtttattttttaacgatagttgatgacttttctcgagccgtttggacctatctactactagcaaaatctgaagtgcgctatgtactcacgaattttatggcttacactgaaaaacaatttggcaagtccgtcaacacagtgcggagtgacaatggcacagaatttatgtgtcttgttgcttactttcgtgaacatgggatcattcatcagacctcttgtgttgggactcctcaacaaaatggtcgagtagaacgcaagcatagacatatccttaatgtggctagggctctattgtttcaagcaagcatgccggtcaaattttggggtgaagcggtgctaagtgctgcatatttgattaaccggactccttcatctcttcacaaaggtatctcgccctatgaaattcttcacggttgtaaaccaaattatgatcagctccgtgtgtttggatcagcttgttacgttcaccgcgtcacccgtgataaagacaaatttggggaacgaagtcgtttgtgcgttttcgttggctacccttttgctcaaaaaggctggaaagtgtttgacattgacaagaatgagtttatcattactcgtgatgtcgtgtttcaggaagacgtcttcccgtatgatgctaaggatgatcattcttcacttgtacctccatctcctatagttgcgattcagattggatgatcacaccgtctctctcgaacagggggagttctgtcatctttgactccaacactgaatttgatgccggtgagaacgtgatctctatttcaaccccgacgcttccctcggtttttgaaccggaatctgaatctgcatcggtaccagtttcttaaccggattcggaatctgcatctgtaccagtttctgaaccagaatctgattctgcatctgtaccagtttctaaaccggattctgatcaaattgaaaaatcagtctctaaaccaattgtaccggttcatacgtctataccggtcgtaacagaaccttctcgtgttgttgactcaagcgctgcttctccgttgtctgtgacaaggactccagctaaaactaagctcaaatctgttcccgtttccacaccagctcgggcaaccaatccgattgttcaatcagagacaccatcgcctcctccaggtcaaggtaagcgaaaacttatacaatcagttcgtttgcaagactatgttctctacaatactacatgttctccgataaacccccacgctctccccgattctactcaacagtcctcgtcaacagtcccaggtaattcgttggattccctaacaaattttatttctgacgatcaattctcgtcaggtcatcgtgcctatttgacagcaataacgagtactgttgagcccaaacattttaaggaagctgttcatattaaagtttggaatgatgctatggttaaggaagttgactctcttgagattaacaaaacatgggatattgtcgatttaccagctggaaaagtggctattgggagtcaatgggtctacaaaacaaaatacaatgccgatggttctattgaacgttacaaggcttgtcttgtcgttcttgggaacaaacaggtagcaggcgaggactacaatgaaacttttgctcctgttgtcaaaatgacaacggtccgtactcttcttcgccttgttgctgcaaatcaatgggtggtgttccaaatggatgtcaacaatgcttttcttcacggcgatcttgaagaagaaggttacatgcagctgccttcgggattttgtcattctcacccttaacaaagtggctcgactttgcaaatcgttatatggtctgaagcaagctcctcgttgttggttcaaaaagc

SEQ ID NO: 22492 - DNA, 4721 bp, Arabidopsis thaliana landsberg
cacatcacattttttcaaacaaatcttgcagaagaaaaaggaactcacatctttagtatctgtcctttcaaaaagaactactcggcccccacggtcaccagttgcgagatggtctccacttttatcaaattcgatggctgaaatgatgtcaactgcggaagaaatgtgtgcaaacagaatcattacatcagaagtcaccactaaattgtaggagctaaacacataataaccttgaggtgcagctagtatattattctccataacatagagtatgtaaaccggtaaagaagattacatccaataacatgagagcagattaaatttatctaatacggaaagtgcctctgaaggcaacctagttacatcaatactccgggaagtcttatcagccagaagagagcagctatagaccaactcaatattacaaattcaattcatgaacccaaaatgcatgaccaatgataacccttcacacttgtccctcaacgacccaatccctcatcgcttcatatgcctttcttgctgttaaacagagtcgagacaccattgtaccagtggaaaaaagtatacatggcttatggcattgaacagacaaaaccttgaagctagattaccctcttaatctcaacttaaaactatcatcagcgtatcaaatgattcaaatttacagcagtacagctgaaacttgtacaaaaatgagagttacaacctcgcaacaatcagctaaatagagatgctctaatatcacataatacacaacaatccaaacttgtcatagaacttagaaactctactaacagtgcaataaaagccacagagattcatcaatgacccactaagtagtagaggaataactcactaatcagatccaaacaacaaatcaaacccttagtcctcaaatacactccggatctaaaagaaaaaagaagagccaaactccgaatatatctcacaatttataacacacgtaggcaataattaccttcctgaacttcttctccggcggttcgctcaccgaagacctgagagaatctccactctaaagacggaggaggaccactagtagcggcatcgtcaccaccgttcatttttttttttggcttttgggttagataatccaacaaaaattagaaatccgagcttgagatctgagcttccaaatcttttaatcaccgaatcgaatcgaagatcgcgtcatcaccataaccaaatcctttgattcacattccattccatagttttattcatggattttttcgcgattgaagcaacttgatcgatgattaatatttcgtccctctctctctctctctctctctctctgtagaaaatggaatttttgatatatctctctgtagaaaatggaggaacgagagaagaaaaaacgccttggcctttttctctctctaaaaggacaaaattggaattataacttttttcttttttttttccttcgagaccaaaacgaaggaacaaatccgtataagttaatatgtctaatactataatgtttttgtcctgattccaaagtatccttagcgttacagtcggtgacattatttatttgaccactacatatcagtggacagtgacatatagtttcgcatatcattggtcagttgtggaggtgctgcgctttccactgttgtgttgtgtgatgggggaaaatgtataattatcattagtaagtactaattcattatttttgccaaattatcctaaatagaattccattgcacatttgttttttctaatctgatattatcatatcttacttgagaaaaattacaagtttctttcaggggtcaaaattaactcatgagaatacccaagcggtagaaaaaaagaaaaacgattgaaaccagtacaaatcaaatgaatttaaaaagtattactatagtttataccaaatgtatttggatggtgaataatcaaaactgaaacgaataagtcaaaggagtgtgtaattttataactactaacccactcagactcagtgacggattaaaagattaaaacttaaaccggatataaccgaataatagaaccagtcagtgcaattcgatttaggacataatgttaggaagcctcctcgtttaaaagttaaaacctctctttctgcggaagaaacacgcttgagatatctttccccaaattcgaaacaaccctaattttttccgattccgattgatcaaacaagcgaatcccgattaactgatcgaggagatgggtaatacagataagctgatgaaccagatctttgaattgaaatttacgtcaaagtctctgcagaggcaagctaggaagtgcgaaaaagaggagagatcggagaagctcaaggtaaagaaagccattgagaaaggtaacatggatggtgctcggatctatgccgagaacgccattcgcaaacgcagcgagcagatgaactaccttcgtctctcttctcgattggacgctgttgttgctcgactcgatacccaggctaagatggctaccatcaccaaatcgatgaccaacattgtcaaatccctcgaatcgtctcttaccactggtatttcacattctcacttttcagcaatctaatcaatttggttttgttggtgctcatagcattatagtatagattgaaaaattctgctccttgttgttgtttttgctgattgaaggatatggaatcatgcattagggtttggtttgatgaaatattagaatagctctctctcaccgtcatggatgttctgtgatctgtgatgaatttttgttgcatttctctccttttggtaagtgtagtatagagggagaagaagatagggcttataatactcttatacgttgtgctgtagaaactcgtgttatcattttctggtttgttctttgcaacaggcaacttacagaagatgtctgagacgatggattcgtttgagaaacagtttgtgaacatggaagtccaagctgagttcatggataatgcaatggctggctctacttcattgtcgactccagaaggagaagtcaacagcttgatgcagcaagtagcagatgattacggtcttgaagtttctgttggactacctcagcctgctggtcatgccattcctaccaagactgaagagaaagttgaggaggatgatttaaccaggagacttgccgagcttaaagccagaggttaattagctaacctaacaaaaaaaaaaaactgtatttggattcttcttttattgagatgttgatgctattaatccctgaacatgatgggaatgtttgtgtaaattgctcaccctggtacatgcttttgtttatataaaacctagagtgtgtttttacaatgagaaatttcatcatctgcttaatggtttggattagttgtacaaatgttaattctccagatgtgtctctggtagtagttccaccaaattttccaggtccagaaaggaatacactggagtaaaaggtatattctttccaaggagaagaatgtttatagtactcttggtggattgttgcagttgtcaacttgggagagaggatgatatggtgaagtctcctccctctctcccatgtcttgttcattgcaaggtcttgttctttcatgtttcttttcatatacacttgttaatgaataaagtttgaaaaaattcgtgaggaaaagtccgaatctatcttctctgcaaaaataaaattaagtaaaagaaacataaagttatggtttaaagatgctttcggaaactccatcattttagtgggagaatcacataaaagattggtcgtcaattatttttcttttattaataaggatgcacatgatgatgaatattaaccgtaatatactaatatagatgacaatgtatttcagtgctaaattatagtaacaattaattgaatgcttaaatgaatcttttattatatactactttatatgtgtttttttgttttaattgagacaatgatgatgcacctagacaagaacgtcctactctctgtgcatgtgcttctcattttatttactcttttaccaaacaaactgttcaacttaatacataatgttggtagcccacaatgtgaaagattaaattaaaactcatccattacctcctgtaagctctatattaacccactttagttcttctgcacacactcacaacaaccaatcatagttattataaaaaaaaagagtcatggcattttcatcttcgtgttcgtccgtcaaagccgtcaactcacggtggacgtctccgtctccgtcaccgtcttctagattcgccgtcctccctgctttccttcaccgccgttacgcaacaagcgtcaaactaacggccataagcgccgccttaaaaaccgtcgagcaaacgacgttaacagaggataacagattctcaaccgtcggatctgactctgatgaatacaatccaactcttccaaagccgaggatcctcgtcaccgagaaactgggagaagccggcgtgaatctcctcagggaattcggcgacgttgactgctcttacgatctttcgccggaagatctgaagaagaaagtggcggagagtgacgctctgatcgtgagaagcggaactaaagtgacgagggaagtgtttgaggcggcgaaggggaggttgaaagtggtcggaagagccggagttgggattgacaatgttgatctgcaggcggcgacggagcacgggtgtttggtggttaatgctccaacggctaatacggtggcggct

SEQ ID NO: 22493 - DNA, 581 bp, Arabidopsis thaliana landsberg
cgagccgttcgaggaacaagcgtttcactttgagttttgaatcccgcggtgggttcgggcgacgcgttgaacgggtctcgcctgggtctttatatattcgggagagggaccggtgacggttctttgctctgctacttgcctccgtcttaggttttcgcaacccgagggaatagccagagaaaaggaaactgcccacccagttctctccgccgccacctcctctgcttggtgatggccgaccaggtgaccattgttcctccgcgtgaacctggcctttctccaccgtcacggcggatgacctggaggccctcgtcgctgagggtttacttcgccctctctctaatgagaggcagccggagtggatgccccccccccgagcggagggccccgatcccgccgtcggggtatgtcgtgagcttcgtctcctttcacgagcgggggttcggagtgccggcaagccgttttatgtgggcgattctgcatgtctacggggtggagctgcaaacctcagcccaactccattcgcaaccatcatcttcgcacggtttcgaaggatattgggaatgacccactaggactat

SEQ ID NO: 22494 - DNA, 687 bp, Arabidopsis thaliana landsberg
  unsure (1)..(687): unsure at all n locations
tgcttgcaggtcgactctagaggatcccaacgacaaagatgctaacgccatgatgacaaagataagactctttcttgatacgcacgataaggatcttgccgtctccaagaacaactttagccataaacgcacgattcgtaacactagccgcaacactaaacacccatggtgcggtactcgtgacagtgctgatttttggtccattgttaccggctgcgttaacagttagtactcctacagccatagcgtgaaaccgtccaatcgcaatcggatcttcctcgaacggtggaatgttatcaagaacgatggagatagatatgacatccacaccgtcagcgattgcgtcgtcaaacgcagacatcattgcttctccgtcgcatccttcattgtcgcagactttgtaaacggcgattcgagcggctggaacgccacctctcgcggttccatttccaagtccatagaagtttgagtttgcgactgcgtttccggcagcgattgacgctgtgtgtgtgccgtgtcactgtagtctctcgctgtttgatttgctttagatatggctgtgtagtctcttgccccaatgaccttgctgcaaaattagagaaattgttgttaccaagattactagtctcttaaactgttggacanaattccaagttagggtaagaagtgtagtacttgttgcaggtg

SEQ ID NO: 22495 - DNA, 975 bp, Arabidopsis thaliana landsberg
cttccttaaagctaaataatccttcatcttgaggacttttgttataaattccatttcaactgaagaagggtctgggaaccaaagaaaccttgttaataacacgcagcttaaacatagaacgaataacttaaattcagaaaatcataaaaccaaaaatgacaaacttacaaaatactccctgttgacatttggttgcttcctcagctcatattatcttaacggtaatatacattgttggaagctgctggaaatttcaagtcagctttatcttctctagttcaccttatctagttcttattcaaagataaaaaataaacccgacaaaagttttttaagatatagaatggtacggaagtaaacttttttgggatagtgcaagcctctatatccttcgtatctaattgcggtagaggagagagaggaagatacttgaccttaacatttttatgtccttgctagcgaatagtctcccttttgttctttgcaacttaaggatctcttcacttgtgaggaatgatctttattactaagtcagcaacaaaatagagtaacatagagcaaataaaatgcaaaaggctgaactaaaccagtaaaaaattacggaattgtaaagtttaactacatcttacgtgacccttttcacaagggttgttagctctgagatggagaaataggagtgtgggatccagataaagcgacaatgtccttgtcagacaagcccatccgcttagcaaatacatctctcaacagatcaaaaccttttgtagcatcagggagacgaccctcaggaggtgtatggggcttgtcctgaaagcaagatatgcatgttagaaacagacaatcaagtcccacagcgtttcagtattacaagtattgagagaatgtctaaattatcaatcaaccatgtcaacaaagaaaagcagaacacacactctcaggaatgattaacctctcttcaagggtggaaatgatttt

SEQ ID NO: 22496 - DNA, 510 bp, Arabidopsis thaliana landsberg
aagataaaaccaaaatccttgacaagcgttgtgatcttttaagcacgatagatagccatcaactcaggctacagctgcttgtcctcatgcctcttgacatacctgtttaagaacacctgatcggtacatacgaagacacgcgatatcgaagggagttcacttccgatcaatcccttggagatgagagcttgaactacgttaccccttgggacagtcctcttgtgtaggctgtatccaagcaccgcagggtttgaaaccagagcctttagtggccaattcatcttctttaccaaaaactcagtcttctttttaaccatctccgcggataatccaatgccctgaggaaagcgcttaattaacacgctaaactcatctgtgctgaaccctaggcctagaaatgtttcaatggtgttcaatatcttcttctcgagtgtgtcagagagtttggccacctcttgacactgtacatacatattccacatcaaagcctaaccttttatacgcattgac

SEQ ID NO: 22497 - DNA, 581 bp, Arabidopsis thaliana landsberg
  unsure (1)..(581): unsure at all n locations
tgcatctaagggatctcatgcagagctttccgactatggaaatctaatggtcaaagacnnnnnnnnnnnnnnnnnnnnnnnggaaagctttgagcaccttggtaatactctactccctctctcaactatgatgtataatctcgtcaccggtgagaagcgagggttgagttcttggaaaagttatactgatccatcgcctggtgacttttgggttcagatcacaccgcaagtgccatcacaggggtttgttatgcgaggctcgaccccttattatagaaccggtccatgggctaaaacaaggtataccgggataccacagatggatgaatcatatactagtccattcagcctacatcaggatgtaaatgggtcaggatacttttcgtattttgaaagagactacaaactttcacgtataatgttaacatcagagggatcaatgaaggtgttacggtataatggattggactggaaatcaagctacgagggtccagccaattcatgtgatatttacggcgtatgtgggccttttggtttttgtgttactcagatctccaaagtgtaaatgctcaaaggttttg

SEQ ID NO: 22498 - DNA, 516 bp, Arabidopsis thaliana landsberg
gcttgaaggtaaagacaacgaatatgttcccacggccaatgcagagacttttgctccattagccacacgtaggtccacttgtccttcctccaaagttctactgttgtttaggccatgcacatttacacaaatgtgaacaccacatccggtatccaatacccaaggagtagaaccagatgtagtaacatttacttctataacatagatacccgaagaagaaatcttgaatgttttcttcttctccagatcttccaagtattcaggagggtttgattcattcaatttgtccttctcaaggacatttcgaactgaatagaaactttgaggggttgacataactgttgaaaaagaaaagcagatattaatatgatgttcataaattttagaattctcaacaattaagagaactagcactatactcaaaacaaatttcctctaagagtataatgatccaagatccatatattactagaatccaagtgagttttggctcacccctgaatatctagttattta

SEQ ID NO: 22499 - DNA, 1031 bp, Arabidopsis thaliana landsberg
gggcattgttattccactctgtaaggtgtgtttgtttttgcttttcctatcagtttttctttcttcttctcttggtcttatggtacgttttctaaagaaccttgcatgtttttcagtctggaacatgtacctctcgcgaagctataattataggaagtataatgcagaagttttctactcctgaaaacttctcaaggtaacatagatattaacctctttctcaattttattaaagagtcaaattgttggagtaagcttgaagataatgacttgagttataagttatttaaatataggattagattaaatcttaaggagatatcttaagagataagttaggagttatctaaatctaatcctattgtgatttgtttttgaatctctatatatatgagtcccaaagttgtggtgaaccatatgagtttagagagattaagactttgagattgtttaggttttgagtaagcttcctaagcttaatacgagagtaattcttatataattttgagttcttaatcttctctaaaactagatttggtatcagagcatccaggttttcgatcaaagcaaaggattgaaaacatgagtgagattattgcagtaaacaacaaatcaaaagatggaggaggatcatcgtctattcaatgtccgatgttgaataacacaaactatacggtatggtgtatgaggatggaggctgcactacgagtgcataaagtctggggaacaatcgatcctggattagaggacgaagagaaaaacgacctagcccgagcccttctcttccaatctattccggagtcacttattctccaagtcggaaaactgaagacttcaaaggcagtatgggataagattcaatctaggaatcttggagcagaacgagtcaaagaagcaaagctacaaactcttatggcagagtttgacaaactcaagatgaaggacaatgaaactattgatgaatgtgcagggagacaatcagaaatttcaacaaaatcaacatctttgggagaagatattgagaacaaaag

SEQ ID NO: 22500 - DNA, 529 bp, Arabidopsis thaliana landsberg
ttaaaatatttgaattcatatttcaagttgggaattgggataatgcatggttagttatagagtaaaatcatgtgagaatctttcttactttaactttagcccctccctttctctatcgcgaagagcttgaggaattgcaccactaagtttattcccgctcaagtttctgtcgaagtagaggaaaattcatgtgtacacaaaaatgattgtgtgaacgtaattagtagataaatcgagaaaatttattacatgaccaacaatgatttcatagtggctagaaactcgggcactattccactcaaactgttatttgacaaatccctgggatgtgaaaaacaatgaaccaatatatgctttgtaattatatatcaaatatctgtagaaaagaaaaaaataaacatgctgctttaattaatcactaacaatacttacaaactttctagatgcgtcagattctgaaagtcagacactatagtcccactcaagccactcgatgataaatgtctggttataataaacatattataag

SEQ ID NO: 22501 - DNA, 539 bp, Arabidopsis thaliana landsberg
ggagttgttacctagctcctgaatatgacttacccaaagctcggagtcgtcatcttcaatgttggggatttctacaacttcgtcattgcgtgcaaatctaccacgtattcgaggtctactgtccgccaatgttttccggcatgcatacttcatttccatccaaaaaaaaaagtttacaataaagccttcaaaaactgaaaatgcactaaaaaaaaaaaatttgattatgtagtacaaaatagttaccttaatagttttggtaaagtttctctggtttcgtttagctctgtactttgatattttctctttacgttcttctgcactgtaacgtcccaccttgaagttctgttcctctgaaaacggcatcgttgagttttcagacgatctctgcatttccatattattctgaaaaccaaattaaaactcaaaacttttagtaaaaaattacataaaagaaaaaacagagcaaagcataaaacagagacctgcaaatctccggtgctgtagacacgtcgcatctgactggaaaagaaagcatt

SEQ ID NO: 22502 - DNA, 3129 bp, Arabidopsis thaliana landsberg
gtccgtccatatctaattctcagttctcgatcgcctaatatactttttttttttttttgttagattgattttacgatcttaaaagtatatgtacctactcattccttaatctaggaggacaacatatatgactaagatctagttcttggaactacatgtttaacaacattagtactataattgggtgacacatgcatataaatatacaaatggttatatctaaggataataattggatctctaattttcaaactaatagcattatggaacgtatgttagtgaaaaaagtactctttaatttattattaacatcaatattagtcgccattttgtaaagtcatacgacacataattttttaaattaccatcgaacctaaaagacattctcgtagttcaacgaacgcaaacacacgtattcacttgttttcttctggccagctatatagtctacgcatcgcatacgcaaaccatatatagatccatcactctatatttacatatatcaatgtatacacagagagctatatatagagaatacacaatacattctattcttgtatactcttattacaaaaaaaaaaggagagagagagagagagataaccaatttctctccctgaaaatgtccaacaaggttcacgtagggaacattgagatggaggaaggtttgagcaagacgaagtggatggttctagaaccttctgagaagatcaagaagattccgaaaaggctttggagtgttggaaaagaagatccgaggagagtgatacatgcatttaaagtaggtcattccttgacactcgtttctttgctatatttcatggagaatctcttcaaaggcattggaagcaatgctatttgggcagtcatgactgtcgtcgtcgtcctcctcgagttctctgccggtaagttatatactatttattatttttactaagattgtataaatattcatttcacaatcaaaagtaaggttacacaaatgaatagcataacctatacatggtcccatgccaaaaaaaagtaaaagtttactaaacatggaagcatacacattcttgaatccaaaattagttcactccttaagcaaagatgctcttggaagaagaattgaatcaagatctaaagaatccctaaagtgaactgggaagagaaacaagagcgaaagagggtacatacagtggagggcttgacgataagcgagaaagtaatcctttcgatggcagcccgaggcagagaatcagctgcggaaccacacgagcggaatgaggcaggcaatgtttgccactctatcaagttcctcccgaagtcaatagcacgggcaaagcaacatcatgtccttaaccagccatactagcatcaccagccgctaagaccaaacccacatgaaccttaacctatttcgacgcttaacatggagcaaacacttatctgaagcagagatctaacatgagactgagccttagtgcaacaaggaaacaatgaacttggacgccaaagcagaaaacgagcacgacatgcccaagagatgcaaggagatactaaaggcattagcgatctaaggcagccctcaatcctttgatcaagtatagccttaaaatctccatcctagacgaaactcacaagaacagcctgctgaagcaaacctagtctcggacaagaagcaatatagtaagttatatactatatatctccttatatacatacatttattacaatcaacaataaacctactaattgatgtttaatttcattctaatggttataggagcggctgctacttatataagatttgtaccatacataaagaagaattacgattaatgtgttgtgatatttctcttgacgttcaatctataacggtgtcaagctgtcgagtagatagtgtgataaacatagcacacgtcacacgtacaatagattctacactatagctattggttgcggaatctgtcttttcatgagccttcttgtttttcctatttggtctggtgaagatctacacaagaccaccgtcggtaaactccaaggcctctctcgctctatagaaggtaattctcggaaatatcatttctatgatttgttaacattaacaccaaacttataattccaaaaatattacttaatttaatcttttttaatatatatatatataattgtgtttgtacgtatatagaatgtgtgaatgagttgaagagaaagagaaagaaaaaccagattcaaaaacggaatctactaaaggtatcaagctgttttggattctaaatcaactgatgaaacacttgtaagtctcatttttttatatatgatcactatttcaagattttgtttttggtaaaagatagaattatatgaaattaaaatggaactatttaggcattatatgcaaattgcaagttatatgaaagtttaagccatatttggagagacgtgttatgttgaggaaaaaaaaaacagagttaacatgttatgtcgtttctttctccgaaacagaaacatcgtagcgtttttgcactctactacaaacacaatatcaaagaaactaacagtattgatcatgggctcgtatttaaaagcccaccacaccatgggcttgttagcaacagaattgatttatttgaccgtactataaatatggaatttgaagtctctgtatttaaaaattcttttctctgaagcattttcaagcaaaagcaacaatggaggcgaacggtacgatttggagcaatgattctctcagaaactcatatgaatattctccagccatgcagaatcatcttaagcgggtaacgtcttcagaatcttccacgaaaagttgttgttgtttcttggaatgagatttgtgatacgattgattagtgaatcatttcgtttcaatgcaatagtttgttttgtgatcttgttttcagttttgtattgttcttggttctcatcgttgtgttattgatcgttgtgtttattagtgaaaagaaacacttctttgagaatgtttattggtgtttcttgattctatatatgttcgttaagtgtaggtctatctcacgttattctttgctcttcttgcgtctgcgattggagcttacattcacatggtctggaatatcggtggaaaagtcagtactcttggat

SEQ ID NO: 22503 - DNA, 987 bp, Arabidopsis thaliana landsberg
tgggacaattgtccagctttttgtacttctttctgaataggcagcagtcattcacacaagcatggatcttttcatatcccatgtcgaagctcttcaaaaatttcttgacatcatacaatgatgtgtgcagcacattatctttaggcaacatatttggcaatgtctcaagcagctcattgaagctcttgtcagaccatccattacgtgttttaatcctaaacagagacacaatcgccgagagcttgctgtggtttaaacaagtcgggtataaaggggtttcagcatctgctagtttggctaggaattcatcttctctcctgtcctcgtcttctgctatctcagctaagtcacccaatggagtctctactaagtcccgcttgctagccagctcttcatcaaaatattcagcagccttgtatagctcaagaatttcatcattcctctgatttgttgtacttacgccttcagctgaagccacagagtctccatgatgataccattcactttgcaacttgtatgcctcatccatccctttggttaccagatggacaaccacatcactgcttgactgccggtatacgttacgacactctttgcagggacatataatcatatcaatatctcctagagccgcaaccacatcacgtacaaaactccgagcacctctctcgtaattgggatcaactcttcaatgaataaagaaagccaaatagaagcctcttaaagtatccaaaacccatttgtaaacctaacttatataagataattccctgcacccatgtcttgtccaacattatataagcctaaacctttttaacaccaattcaagccataaccaacattaaaaagaaagaaagcacattcactcacagctacatcttatgtgcagacatttctaatataaacacaattctaaagacaaccaaagcaatgcaaataacggatgaatcacaatcacaattctaaagacaacccaagcaatgcaca

SEQ ID NO: 22504 - DNA, 555 bp, Arabidopsis thaliana landsberg
  unsure (1)..(555): unsure at all n locations
nnnnnnnnnnnnnnnnnnnnnnnnnnnnnnnnnnnnnnnnnnnnnnnnnnnnnnnnnnnnnnnnnnngtgaagggaggtcaagagcgcgaggttgcgttccaggtacgctttggttaatcattttaatgtatgtcttttcatcgatgatgtgatgatttttacctggttacgtttccaagcggagattgagaggttaaagacggagctgtccacctcgaaagatctcgagaaaggttatgcttccaagatcgggatcatggaacagaagatcgtggggttggaggcagataagcagacagcgaggaaccagattcatcgcttgaacgaaaagaaggacgagctctctaaaagagtgctgcatctcacttcgattgtgcagggagctaacaaggcggttcacaatgctaaggttgatctggctgcttcgtattcaaagttgctagatgagatcaagaagaagtgggtcgcaagtagnnnnnnnnnnnnnnnnnnnnnnnnnnnnnnnnnnnnnnnnnnnnnnnnnttgattgatcaaatacgaaggctgctgtcga

SEQ ID NO: 22505 - DNA, 613 bp, Arabidopsis thaliana landsberg
  unsure (1)..(613): unsure at all n locations
ctatcttctctaaaatcatcctcgcagtggcctcttgactcaacaccccacatttcttctccaccagcaccgcttcgacgatatttttgaactcttggccatcgccattagccacgaagtcaaccagtgcggcttgtactggccccaaactagtgttatgcgccacactttccatgtaccctccactgtacactttacctcggtgatcaatcagcgccactcccgacggacacttgctatccggcgcgtacgatatggtcgccgcctttagagccctgcaattgagatggttacaatgctcggaataactgcagatatccatgtagagactgtgatttatgagttcgatgtagttaaagttccgctcgagaaggcgagggacgtttgccagagagataaatccttgcggaaggaaggtcgaaagattcatgtatgttcctttctgaccggttgggttcgtgagcaagatnnnnnnnnnnnnnnnnnnnnnnnnnnnnnnnnnnnnnnnnnnnnnnnnnnnnnnnnnnnnnnnnnnnnnnnnnnnnnnnnnnnnnnnnnnnnnnnnnnnnngtttttgctcgaaaagtgaggcgaggttggcgataaggaactg

SEQ ID NO: 22506 - DNA, 1497 bp, Arabidopsis thaliana landsberg
agcttctttcaaacaaaatttgggctacaatgggggccacatatcataaaggaaatccaagctttctttctcctctggggatcttgccaagtaagatcaatcatgcccacgtcagacttataccaaagattacaagcccaaagaaagttgttgattatagaccaatagccctatgttctgtttactacaagatcattgctaaggtgatatccaaaaggctgcaactagtgctacaaaggatcatttcagaaaatcagtcagcttttgttacaaagagggctatattagataatgtactaatcacacatgaaactctccactatcttaagacctctgatgcacaagtaaggtgctatatggcagtcgaaaccgatatgaacaaagcctacgatagacttgaatgggattttattcggctggttctagagagaatggggtttcatggccaatggattaactggataatgcaatgcattattatagtatcctactcttacctcttgaatagaactgcgaaaggattggtcgtacctgaaagaggaatcaaacaagaggacccgctttccccctatatttttattctatgtggtgaagtcctctctggcctatgcaacaaagctcaacaaaaaggcaaattagaaggcatcagagtttctctaaacaagggctaaccacatactctttgcggatgacaccatgtttttctgcagatccgatccccaaagctgtaaagaattggtctccatccttcaaaaatatgaatcagcatcaggacaaaagatcaattcccaaaatttggctattaccttctaaaaaaaaacatatgcggctaccaaagagagagttaaaagagatcttcaaattcatcttgaaggaggcaaaggaaaataccttgatttaccagaactctttggcatgaagaaaaaaggtttatttactagcattatcgacatgattaaacaaagagccctggactggtcttccagatttttatcatttgatgggaaaatggtcttgctaaaatcagctctttctacaacgccaacttacaccatgacgtgctttaagcttcccacctccttgtgtaagcgcatccaatcggctcagaccagattctgttaggatgccaatactaagagaaaaaaaatggcgtggaactcttggaaaagaatgacaaaatctgtgaaaaatgggggtttgggtttccaggacttacaaagtttcaatgatgctttgttggcgaaggtcagctggcgagttctcactaccctagactgtcttttgagccgagtgcttcttggtaaatactgtcaatcatcacactttctagatagtcaaacaccaaactctgcttcccatggttggcgtagcatttgtattgatagagacttattaaaaccccaccttggtaagctgttgggtaatggtggttccactccaatatggagagagcccttggttgtccacaaaaacaccacttttcaccaaccgggaccc

SEQ ID NO: 22507 - DNA, 2590 bp, Arabidopsis thaliana landsberg
gtcataaaggcccggataaccgttacttaagaagtttctcctcgaccagatcagaaacgcgcagcttgagcttttagcttccgagcatccaacttctccaagggcacttttcgttcgcatatgtagcttctgatgggttctattcattctgaatcacaacccaggtctggactgtcatccgaagcatcttcgcaatctgcgataacctggacggggaaggcatgttcctctttgtcgaactcgatgcttggcttttcgataaactccctagggataactctcctcaggttcgggtcggatgttgaggccagagcagctagggcgtcggtcgacgtattttccccttggggaatccttgttaactcgaactcgtcaaactgctcttgtacatgagccaaataggctttcatttgttcgtcccgagtagtgtattttctgttccactgattcgcgacgagctgagaatcgcaaaaagcttttatttttgcgatcttcagctcccaagctatatttagcccggccacgagtgcttcgtattcggccacgttgttggttgcctcgccagatacttcttgagttcctgaaaagcatcctcgcatcaggttgtccactcgaactttttatttccccgaagcacatcgtaaaaagccaaacacatgtcggtagatcgggagatgaatcgattaagggctgcaactcttccagttagatgctgtacttcgcgtttgttttgagcgatgccattcccaataacgcctcgatttgcttttgggtttacctcgatgccgcaatgcgtaactagatatccgaggaatcttactccgaagcgacatttggttggattaaacttaacgttgtagaggttaagctgctggaaacattcgcgtaaatgggctatgtgttcttcctcttccatggattttaccagcatatcgtcgatgtacacttccattgtttttccgatctgtagtgtgaagattttgttgacgaaacgctggtaagttgccctggcgttcttaagtccgaatggcatcactcggtaacaaaaaattctttgctctgtgtagaaattggtctttggtctttggggttcatcacgatctggttgtatccagcgaaagcgtccatgaatgatagcaatttgttcccagaggtttattccacgaggcgatcgatatgcggtagtgggaaactgtcctttgggcaggctttgttcaggtcggtgaagtcgaagcacactctccacttaccgtttttttttttactacgaccagattttcgagtcagtcgggatattttgcctcggtgatggagctgatccttagtaatttttcaacctcgtctttcacagcttctgctcgctcccgacccaattttctcctcttctgcttaactggtttgaacgtcgggtcgatgttgagctcgtgtgatacgatgtcaacacttactccgggcagatcttctggggaccaggcgaatgtattgacgttctctttgaggaaagcggtaagttcagctgttaattcttctcctaggtcgcagctatcgatttgcacacatcgctcgggatttttgtcatcaaggcagatagagattaccggatcggggattggtctcgtggattcccgagactcctcaatctttagcagctataactgctcgaaaattgcgtttctcttcagctcggccaagcttagctagtattatgattcgcgtctgtcgtcgactctgtgacggggttcttgagcttgtgtgctgccatgaagcagattcgagcatttttctgatttccccagatgttttcacgccattgctcgtggaaatttcaggcagagataatatgtcgaagcaacagctcggaattgatttaaccatggtgtaccgataattgcattgtaaacggtcggttggtcggtaacagagaaatcgacgatttttgttacccctttggctcggactggtaacttgatggtcctgagagtcatagtggtttctccagaaaatctgagcacaggtcgcggagatggtataatttgcgtcatgtcgaccttcatttcttgcagggttgtaagaaaaatgatatccagtgtgcttcccgggtcgaccagaactcattcgacgttgaaatcaccaatggtaagtgtaatgactaaaggatcgttgtgcggacggtccaagccgttggtatcgctttcatgaaaagttacttcgtcgtctgatccgttaaatggccgcgtccagttacgatttgagtcaggccttcctctgataagctttgattgatgccgtcgtgtcttgacagaaagcaaaatctcctaaaattgtgaagatccttccccgagcagcttctggctcatcgtcatctgtttcgcgattgcctcggcctcttttggatccttcaaggtttgccacgggggccgcctgctcgggattggccacagcattggcctactcggttttggccttttctgcttctaattcctcgatggttaagcctccaccgatttttctggctagaaatttcgctgccaacttcgcctgaggctacgacatctggaagtatgatggccgtaactcttatgcaactcac

SEQ ID NO: 22508 - DNA, 2065 bp, Arabidopsis thaliana landsberg
gagatgactttgctatacaccctgcctattatgatcttgtatctagaggaaagtttagaggagctcccgatgaatcaccattagatcatttggaaatcttcgaagacatcgtttcctctattaaagcagaaggtgtacaagctgattactttctttgcaaactcttcccccactctctcgcgagcagaggaacatcatggctgcgtcaactggaaccaggttcattaaccaattggactgatacaaagaatgcattcatgaatcacttcgtcgataaatccgtgacagaggcaattcatttgcaaatctcttcgttcactcaggctccagccgagtcccttatagcatcttggctccgtttcaggtcttatcagcgtgaatgtccccaacatggcttccaagagaggccaactcatcaatatcttctacaaaggaatagacaagccataccggaatcaacttgatgcagcgagctactgtaacttcatgacaagaactactagtgaagcattactcctcattaccaatgctttaactagtctttcgacacatgaatttgacaaagaacgaagaatttcagctaagatagccaccgcgagcaaagagactcctgtttcaacaattttcgctcctatccaagcccccccccctctaccctcttcagagaccagaatggagtctatgtttgcgcagatatgaatctctctctacaaagctaacaaagcttgatagcaaatatgaatctctctccacaaagcttgatagcaaatatgaatctctctccacaaagcttgatagcaattatgattctctctccacatatatcaataacaagattgacaatctacgctctcagttctccaatctctcacctacatcagcttttatcaatgcagtcacactacgcagcggaaagcagctcaacccaatacttcagcgcgaacgatcagctcagccttcatcttttccaattgcagaaaacgaaccagtgtcgttcgatacaccagggtgtcgatcgacaccaataactcttgactactttgtcttccctttgtcgagtggaatcgacaatttcgcggaggagcactacaaaaaaaaactgaatattcttacggaaaaattgcgaccattattttcgtcagaaaattatgaccattttcatacaaaattgtgacgtatttatttggtcataaaatcgttactatttcgttataatattatgacttaattgaatgtaactaatgtttatcactaattatgtcgaatttgttacaaattatatagtcataaatataagtacggatttgcgaccaaatatggtaactaaattatacgataattgtgactgaatttatgtgatgtatagttacgagaattttgtaactacgatgacacaatttgtcactgttttagtgacttttgcgataggacatagattgtgacatacgtgttaccaattttaatacaaaaataaagacctgtgaacaaaatgttaaataaaaaaacttcatcaattttggaaacaatttttttgataatacataaaaagttgtaaaaagtccaaatgaaaaaaaaaaattcggattcgtcactagttaattcgatatcagaatttccatcttcagcatctgatccatcttcggcttctactactggatcatcaagatcttctggttgggcatctagatatgatagtgtctcgatttgtaatgaatcaacttcaacaatagaatcatcgttatcatgttgcattgcagtgaaatccagatttttgtttatcaatactttgcctcttggttgtatcataattgctgcttcccattgttgatcttttctcggctgagtcatccgtggatatggaacataacatacctgatctgtttgtgaagccaaaacaaaaagatcgtactcttcataatgccttttagccttaatatcaataatccctgacttgtttcttcgtatacctctcccaacttttgaatcataccaatcacacttgaaaaccacgaccttaagatcaacatgtccaggataatgaagctcataaatttctctcaatatt

SEQ ID NO: 22509 - DNA, 1372 bp, Arabidopsis thaliana landsberg
ctgcgtgtgagatggaccatgtaccaaaacattataagctatccttttttcccttttttcggtttctttcataatagataagttatctaatattatatgatttaaagtaattttatagttttgaaaaaaaaaaagaagtaattttctatttgactatataatcaaaagaaatttcctaccaaagaaaatataatcaaaagaaactttcacccttataatcccacttatctgaaaatcgtttatactctataaaaatctggttatttaccaaactgtcactgtattcacttattctgattttccaatgtcattttgttttctcatttggtctgtgagaagtcaatacagatttttccaaaagataacgaaaaagagagcatataaatccaagaatttttttttttcattcgctgatgccgtcagagttaatcttcgacaaataccccgtaatcgtagtaacactaagatggattcttctaaaggtacgtaattcctctcaatcggacttaatcttcgctttttgtttcgatttatttttagaaattgtagttgcttatcgtctgctttataatttgaaattaaaatccggcggtgtctagcaccaaagcatctagagacgctgataattgagatttaatccctagtttaccgaaacgccctcttccctgttaacggtttatccgagagtgttcgacttaacatctactcaacacctgagtatttgggtactctagtcaaactcctgcacggttctgaagcctgggatctgctaatttcttctcaatttagaaaattattcttacttcatgtagcaagatgctctcactccgcgaaattgatccatggcatgttttcccgtcagccgattacccgaagaatcaatgagctgtgggtggattatgggggttttcctcttcgtttttctctgcgcgaattccatatttctacgagtcttttgtgtcatcctattccaacttaagatgagattgaagatcaccaagaccctgcatacctatctgtttggaatcgcctttttggcgagaagaaaattgtatttgtctccgatgttcttcagatgctcgaagatgatttggaagcgcagccaaacaagaagctatcgacttggaaaaatttatgtctagctctaattgtaattgtcgatggtgtggttgtatatagcaacagaaatgccggtagagtaactcctcgctttgttgaaatgttacatgaacctgattttttatgtcttacccatggggccgtgaggctttctcttcaacattggagcggtttggccctgatcttggggatcccaaccccattgcggaactgaagaaacaattctgtcaaagaactagcgtctggtgagatt

SEQ ID NO: 22510 - DNA, 617 bp, Arabidopsis thaliana landsberg
cttaacctttactccgaatcgaatccagctcccacatcaagaatactatctaagattgtcgaggatgcacgacgttgcctccttttgcgcagaactcatatttggccttaagggtctttggcgcaatagctgcttcaccttggagggaatttcagctctgccatcctccttatcgagaattgcttcaagtctttccgttttctccaagtggttcacgccggaaaccattgaaactaaagaacatttttcaaagtcacgaattcttttgatagtgactattgttaagctccccgaattttttgccaaagtgtctttgacacaccatgatttcgcttgtgatatgttgcgcagctcctgtctccgagttcttatggatttatctcctatgtttaatgctctctcaaccttcctagctacccttgatgtaatcttatgcttaatctgctttatgtacccaaccattcagttgatgatctgtactctatatccttctttggtttaatgaatggataagtggttcgacaagcaaaatacaattagagaaaaaaaagaatataaagatattgtggttttaactattatcatctatactattaattgagaatcattggaaataa

SEQ ID NO: 22511 - DNA, 1057 bp, Arabidopsis thaliana landsberg
tcctgcaattcgcgagcgattcctactccatgctcaccactcatctcgggttagttccctttacccacaatagatattttaatctttgctccttcacttagacgttaaacccttctcgttattacctggttcaagcgaacagcgaactcaacgacatgattgagtactatgaaaggttgctgctagacagggaaaaggaggttatgacgtggaaagataagtcttcgtcccttggggcaatcgtttttatccaaaccaaaaatgttagaactgagctggaatcaaatacaaaggggtggccaactatcgggatgctgagttagcgaggtcgacatcaaaagccaggaaggaggtaaaaggtcgcgggatggaattgatccaaggggcaatcgtctttatccaaaccgaaaaggttagaactgaactggaatcaaacatcgaggagtacgagagcaatctcctccttttagatcaacccatgaagatgatttttccgaggaacgagagagggacgagttgaaagtcgtcctggaagaaattcgaattcgtttagctgcccttccttcctcttcgttcaacccccagcaattcgaggagttcttcaccgaatcgcctcctttgagtgaatccggtttagactgggctggtaaatcccaactcttctccctttttcttttaaaaatcgatccacagtgaactactcttatattaatccgagataattgcctcaggtgtcagcggtcccgtggaacccgaagtgcctattgtctcggcatcagttccagaggcgataatcgccccgcctgaaattcctccatccacgaactcgggagacggtggttattgaggatgatgatggttcagactccatgattcttggtgagcagcccgctactgacgagccgagtgagatttagacagctgctgcagatcctgagtcagttcgaaccgaacccaagatacctgagtacccgcagtggctgtgtccatttaatggggattttcccttaaactcgaaattctttatcgttgtttttctttttgaattactttatct

SEQ ID NO: 22512 - DNA, 756 bp, Arabidopsis thaliana landsberg
acccgattttttaagtcacttctagctattttatatttgagcaacttttattttaagaacagaacaaagacagaaggggtgggattgagtggtgcagtgacgaacgtatggttaaattattgaatatcgtatcaaatagttaaaacaactaaataaaaatatatatatgcaccatgctttatgagttatgagatgaattgaatttatgttataaaaaggttattgtccgttagaacttttaggagtagtgtagaacccaaactgtacaaaatcagtaacattacacagctgtgttccattgaagtctctgcttatatacaagaacttgctcattcctcaaagcatccacacataatcacgatgaagctctttgttcatctctctatcttcttctccatcctcttcatcactctcccatcttcttacagctgcaccgaaaatgacaagaatgccctccttcaaatcaagaaagcacttggcaatcctccccttctatcctcctggaacccccgaaccgactgttgtaccggctggaccggcgtcgaatgcactaaccgtcgcgttaccggtctcagcgttacctccggcgaagtctccggtcagatctcgtaccagatcggcgacctcgttgacctccgtacactagatttcagctacctgccacacctcaccggaaacatcccacgcaccatcaccaaactcaagaacctcaacactctctacttgaagcacactagtctctccggtcggatcctg

SEQ ID NO: 22513 - DNA, 1798 bp, Arabidopsis thaliana landsberg
aaagacattggaaggattagaggctggaaaaggttcagttaggaaataaaaaagacagatactgagatttttgctagataccttaggtaagaacatctttgcctccttatttcattcaccgcatcattgaatttctttgataactgattatcatactgctgcagcacaaactataaagaaaacacaggttacatttcttagcaggcttcaaaagttccagaaaagtgatttcttctcttatggtatcaataatatgatgaaacaatcacaacagtcatatatggatcgtgtattaaaataatataaaagttagattctgtcgctatttaatcatgttacaattccatctactaatgaagagaaatattgattacctggttaggaatttcagcagctgaagaaacagcaaaaagtttctgcagaataacagagtctactgattcgccaacaaatagtagaccgtcttcaccattctcaagaaaataaactccctcattgctaatgtgttcacttgacaatgggattggaggcggaaggaccgatccctcagtgtcctgatagattaaaaagtaagaataatcaaaactttcacaaactgtatatttaagtcttcagagatatattaaaaaaaagtagcccatcacaccttcacatcaaggtcgtgaacagaaatcattctcggataaaccaatgggattgccaaaggagtagaaagggaagacacatagttgatccagaatgatcgatcatcaattcttccatccgtccttaaacccacacttttggtcaatgctgaggaggacccatgtaaaaggaaataacaacaaatcaaattctattttctgtaaatccattcctgagaagctatatgatcctgacaagacccatgcggtatgtttcatttcatactcagtatatataagagaaacaaaaacagatagcgactagcgagtagcacaattagtacttgtaattcacactgaacaggtttccaaacatctggagaaattaaggtatctaacatgctgctagtatggtaggtaccaaatatgctacagtgtcttcacggaggccacatgtaattaccacaaagatagcagaaaacgaaaacaactgtcatttaatatctcttagaagtaagcatgcatagcaggtgaaaacacaatatattcacttctaatatcaagataagggatgggaaacaatttgcaaagagaaacctacggtgtgtaacattaacttaaaatttgacaaaagtcacaaagaaataccgagagtgtataatggaaatagcttgagcgcctttggaagaattagttgtccagatgatgtcactgtagcacaaaatttacggtaggcatagagtgcatttatgcaactattagttgcttgctcctttaccagtggaagtgccttcgaaggaatttcattagccgctacataaaaaacatcccaataattgttacataatcataacacggatagcagtagaatcaaaactgaaaacagtgacctaccttgtttcagcatacaagcaaattgagaatctaagtcagctgcgcgaaacaaattactgagcatgtttgtacaggagagtgataatgtggtaaccctaattcttctttctccatatattgtagtatacagaagggcgcactaaaaacgacacagaacaaacatagaataacatcattttaaatgggacaaagtaccaacattttttcgcatggtacataaatgcaaaatatacctggaaagcacattccgcttcatcttgtagttggtcatcatgctttaa

SEQ ID NO: 22514 - DNA, 4244 bp, Arabidopsis thaliana landsberg
ctctcagaatttagtgaattcagcatggaaaaagtggtgctacgggttcatgaccatcctttgttaccctttgaacgcttttattttggccgttgttccgggtgctcacgtgaaggctacttttatggaggctaccgttgcaatgagttggcgtgttttgcggtgttccataaggagtgcgctgagtccaaacccgagatcagccaccatgcccatcccaagcatctgcttaagcttggcaatagacgtcaacgttgtcatttgtgtgaacggccggtgggaattggttatttttgttcgatatgtgactttggtatgcatttggtttgtgcgaagtccccaccactatcacttcagccacaactctctagtattgagaattacaaggtgcatgaacatcctcttaaacctttcaaaacagcatggcttgcagaaactggcaattgcaaagggtgtaactacattatcggcaatggagataacgctcctttttatgaatgtcgtcggtgtaaactttacattcacgtgacttgccttgagctctttttcaccacagatgcacaccacaactctcatctcaaacaccctctcaaatatctcaaaaatggacacccgagttacgctgaccataaatgccttctttgcggaagagagtttgaagatcaacaaggccaaaaatatgagctttatcactgtgatgtttgtaacttcagcatatgcatttcttgtcaaggaaacccaccaccactagtcgttgttactccgaagacccacgagcatcaacttcacctcattccaagacttcttgattttacttgcaatgcttgtgggacacaaggtgaccgaagcccttatttttgtcttcaatgcaatttcatgattcatcgaggttgtatcgacttaccccgcatcataaacatcaaccgccatgatcatcgcatctcttacatttgtcatctcggacacgggaattggagatgcggagtttgtcgcaaaacagtggatgggttctacggggcttattcctgctcgaaatgttctagttacgttgttcattcattatgtgcaactagaaaagatgtatgggacatggtagaactagaaggaacaccggaagaagaagaaattgcgccattcgaggtggttgatgagaatacaataaagcacatgagtcatgatcatgatttaatattcaacaatgatggtataaatctccatgaaagcaagctttgtgaagcatgcgtctcccagatcaatactgatccgttctatagttgtgagctatgcggttttattttacatcaaacatgtgctaatatgcctaggaagaaaaggcatgttttgtgcaacatacccttctctctacaaacagacgatagcaaggattcttcacgcctaagaagaaaatgtagtctttgtctccaacatttcactggatttgcgtataatctgcatattgcgtataactcgcgtaccgaagttatggatatacgatgtggttcgatatttgaaccatttgttcatgaaagtcatccacatcctttatactacaagttcttcaccttttcggcggttgcgaagtgcgacatctgtcacataacaagaaggcatttgttatgttgtgaagagtgtgactttaggttggatttcaggtgcgcaactttaccaaaaaaagtaatgaagcaaaggtacgatgaccatccacttttcttgtcttatggtgaaaataatgtggatggtgaatactggtgtgacgtatgtgaaaaaagggtagatgcaaagacatggttctatacatgtgatgcttgtggggtcactttacatgtttcttgcgttgtgggtgacttctcctatcatatgccaggaccattatcaaccgtagttagcgaatacaaaatggtaccgccggcggtagtaagcttatacaaagtggtgccaaacacttcgatttgtagaccactttgctccaggtgtcacactagatgcaaactcccttgcattcttgaaacctccgaggatggtgttaatgtttacttttgttctaatgattgtcataaaaatccttgggagtcgtcgtattattagtatcgcacttgggttatttatttctttctattttcttatttacttttcaaagagtattttactttacgtttattattaataatgataaggttttgtttgtgaaacctatccaaacaattgagagtgttgaaggattttatcgggttaggccaaggggatagttctcttgggagagtttttctcttgttatattatcgttttgtttatctactatcataataaaggttttggttttgaattgcattctatcttgtacagttatcatctttcttttacccaaaatttgctttgctttcttttcattctctacattttcacatgtcgatatatgaatcccctagtgttatatgtacaatttatacatatatgtatccgacatgcactaaagggtacttccattcatggattcttatctaagaacactaacacttaaaacatagtgttctttactagtagatgttgattgtatatggagaaagcaccgaatatatgctctggtttctccgctgtttcacctctggtagcccaatatttaaaattataaaaatggcatctatgttttgatttcccgagtgaagaaattttttaggtgttcttcaggatgcaagcttccttatattcttcaaatacaggaaacttttgttgtaataagtgttgtgggaacactcacaactattgtggtcataatttgttctcaatagttgtagtgtatgatgatagtaatgttgtgggaacacttaatgtacagtttctatcgttgtttttctcttttgccaacctccgtgaataaaagaatgttttacataaattatagtttttttaaatacttgcatttaatttgatcaaatcagtatagtgctttttatataattaactagtgatcaaactaatttattcaacaattttagttatactgtcttccaaaagcagtgataaatttactcttatggtactttctttttcgttgctatcggaggtttcttgcttaacaagcaagtagcgttcttctcttaaactatttcccctacgtaagccgccaaacatgtaccgccaaagcagcttcatcataacaatagattcatggtttttccgttttcaaggagtttgctctaggctctagcaaattgtattaatattctacaatttaataaaaggcaaaataacacattcgtcacaaacataggatccgcacaagtggaagttaatataattaagattagagttgtaattgggcagactataagtctataacgtactattaggatccagtgatttaataacagtattattgtgtatttttaatgaattaaaatcggcagaattagctgtctctagtgggatctgcaaccacggtaacagcagagaaactagtggcatcgacaagtaaaaccccgttgctcttgtgttgcttgtatctcaagaaagcacagttcttcttcgctatttcgcctccgtaatttattactcacaccaaaacctatatatgtgcaagatgacgatcgttttgttctcccggattaaattggtagccaactagctagctcgtacgttgaaaataaaagtcatgaaagggccaaaaaaaatcttatcactaatcttggatctacgcaagtggatgattgattatacataataacataaactataaagtagttgtatggaatttctataattatatgagtacgatcaaaatatttaataacaaggataactatcatagagacgacttttatttggtgtattaaaaatgaataattcccggaaagtatggatgtatgtctataaattattttcttcgatcgagttgagagattgaatcgttacagcaattaagaatctcattccatttaagaaaaaaaagaaaaaaaaaaaaaagtcaccttttccttcaaatcacaagagattaggttgatttggatatcattccgcgatggaaaaagtagagttaccagttcacgagcatcctttgttcatctttgatcggatttgtatggacacttgtaaaggatgcggtgtttttggttatttttacggtggctatgtttgcaatgaggtaggttgtgataccctcttccataaggagtgcgtcgagtcggtagtagagatcaaacaccctttccatcctaaacatgctattaagctcaacctgaaatgtggac

SEQ ID NO: 22515 - DNA, 595 bp, Arabidopsis thaliana landsberg
  unsure (1)..(595): unsure at all n locations
catataactttaagaatttagatagtgttttactgcaactttaactaaaaatcatgcacttataccaacttatatgtgtatatatcaaacgtcaccaatttttttatatattactatgagtaaagaaccaagtaagcactttaacaaaccacaaacaaatttaaaatacaacatattaataatcaaaaggaaattaaaggtacaaaatacaaatcatcaaacgggggtatgcgtaattaaacaaacaaaaacacaccacaatgaaacaactaattacaacaatcttataataaaatatacatcatcaatcacatgaagtgatgatagttcaaggactcgaagtagttgcagaaggcgggggagagaagaacggaatggatgggagactagtcggcagagagggaatggatgggagattagttggaagagaaggaatggatggaatattagtcggaagagaaggaattgttgttggaaatgaannnnnnnnnnnnnnnnnnnnnnnnnncgtgggaatggtggcaagatttcgttgtggcaaagctgatggcatatagaaatggagacattgcagtgggcattgtggggagagttg

SEQ ID NO: 22516 - DNA, 551 bp, Arabidopsis thaliana landsberg
  unsure (1)..(551): unsure at all n locations
ttttttttttagtaagccacagggagaagaatgtctccctgcattttattaagaaactaaagaaaagaaatcaagttcggacatgcctcggaaacgcagtttctcggtcattatcctctacaatcatcgccacaaagggcggaacaacatctaacatatgaaaacctaaaggtaaagaaaaagcatagttcgctaacccgtccacaagacggttagtttccttatacacgtgagtaacccggactaaccagtcccttgataagaagtcatggcacaaacgcaccaggaacgacaatgaatgagtatcactaatccccgttgttacgaacccaaccaccaactctgaatcaacctccaactctgaatcaacctccaactctacccgtgtaaacctcctctcccaagccatatagagtccgtagtacacccccncataattccggctaatggagctgaacaaacacctatattcaaggcaaacccgccacaccaatgccctatcccgtctcgcaacacaccacctgccgtggctaaccccagattgcccgaga

SEQ ID NO: 22517 - DNA, 550 bp, Arabidopsis thaliana landsberg
ctctcaagctgccacgacggcatgtacttagggcgctacgtcctctctgctagacacgttagcacattgctacactctccattgtacacctggaccctctccttacgcctataaaaggaaggtccagggctctcttatgagaaggttggccgcgcggaagaagacgggacggcacgtgcacgcctctcgctccctcccacgcggacgcttgtaaccccctactgcaagcgcacccgacctgggcgcgggacaacacgaaggccgtgggtttcccctttacgcctgtctccctctggcatccccccttcgtgctccgtctcgcgccgacccatctgggctggggcacgcggcgacagtttactcgttggtccagggacccccggggtcgaaacgccgacagttggcgcgccaggtaggggcctgctgcgtgttgacgaacagcttcccgtcaagctccagatgggtagtctcagcaacctttccagcccgggacggtgctccgtttcgggagtcttgagttcatgtccctcgacggcagctacgacatgat

SEQ ID NO: 22518 - DNA, 642 bp, Arabidopsis thaliana landsberg
gattataatactctcatgctagccaaaaccaatcacttggactttggaaaatctaccgtttctgaggctgatatgcctattatgataaagctaggctactttggagaagctgattcgttttggcagagaagaaaccactccgacaccggaaaaagatgaggtggtagttttcaggagcttcttcagagcgggattgaggtttcctttgaacgaaattattggagaagttttggaaaactatgagatctatcttcattagctgactcctaacgctatcgttaggctcaacgtcttcatctgggctctccgaagccaaggaacagacccaaatgctgaagccttctgccgagtgcacgagcttcattatcagacgaaggccagagaagatggtcttcataagaactttggttgttacaatttcacctattgcaaagatatgaagactccggtagttagctatcgcaccaagtggccaactggttggaagaatgagtgattttatgtgaaggctgatgagaagaagagggagaagctcaagacgctagtactgagccctctgagcttaacttcaagctgactaggccgctgtgccgtatggagccggggtcccatgcaacaagctgtggcagaattctgggtggt

SEQ ID NO: 22519 - DNA, 1656 bp, Arabidopsis thaliana landsberg
ttaaataaacaaaagttttttttttaaaattttagaaaaggaaataaaagaaataaccaaatgaactgcaaaatgaaaaatgttattttacaaaaataaaagccatattagtatgaacccggcccccccccagacttaaacgacattgtccccagtggcattcaaatccagagaaagaggggaaaatgaaacaaaaataaaagaaaataaaagaaagtgaaaagaaaaatcaaaccagtgggttgcctcccactaagcgctcgttttgagtcaatagcttgacttggtggagttcaagatgtgggtggagtggtggaggattgatgctgcctcctcgccttctaaggcggtgtgtaaagggatctggctggggcagctgcaggtttcgatcgacaatcagggatgtgtcgatcgacactcatctcgtcacctgcaagaacaacaggagaaacaagctttcgaggaactctaggcttgttatcttgtgaagcaatcttcgaattatctaaagaattaatcaaaggtaaagcaggagaagagagagaagagaatttatcacataggtccttaagtggtgttggttgaagagagtgtgcagaatcctctgtctgtaaaacccgagggtatcgatcgacagggggtagtagtatcgatcgacaccgttgctctgcaactctcattggcgagctaagcgggttggagcgttttgtgtggctctgtggtgggattctgatcagtctgaggaggtgtatctatgcttgaagcaatgcaactgataggcttagtaagctctgaaccatccatgccaaactccatctccaaatcacaaaccttgagagagattctctctttcttcacatcaaacctagcaccagctgtagctaggaatgctcttccaaggataagaggatccttgggttccttctcatagtccaggacacgaaatcagtagggattatggagttaccaaccttaacatgaacatcttcaaggattccttcagggattcgcttggaacgatccgcgaagagaagagtgatgctagttagcctgtagtgagtcatgcctagtctctcagcaagatacttgggcacgaggttgatgcttgatcccagatcacacaaagagcggctgaatctgcctgtggagataaagcaatcaagaataaagctatctggatctggaagtttctcagtggtctgaccaggagtaatggtgcggatgtactcagctatgtctactctctatgactacttcgtcattgccttaggcagcatgattgcactgatgtctctagtaagctacttagcttcatctgagctaattccattgtctacaagtcgcttgacatacctgttgagtgaggcagaagatgtctgagaatcatccttaggaagagtatgaaggatcttctccattatagatgtgcacttggcagcatgaatctcctgcttacaacgacgcctcttcggataggggacaggaggagtgtagacagactcgggctacataggtacttgcacctcacaaggggcagtccggatccagtgtcgatcgacactagaggggtatcgatcaacaccgtcgtattgagtcgtctcagagaaagagtctcgtatggtgccgatcgacacaggagagtgtcggtcgacacca

SEQ ID NO: 22520 - DNA, 785 bp, Arabidopsis thaliana landsberg
  unsure (1)..(785): unsure at all n locations
ggaatgcaggttagtatggtctctttagaatctatttttagtgttcccaacttgttttaaatgtacaatgattaatcctatcctggcatttcttttgctgattattatgcttttgcaggctgtaatggcaagtgatttttctatcgcccagttccggtttcttgaaagattgctcgtcgttcatggacactggtgctacaaaagaatagctcaaatggtatatgtgtttacaagatgccttctaattctaatgcatcctattttacacttttcacgtttctggtttctaagatatattgttttgcatccagatctgctatttcttttacaagaacatagcatttggtctcactctcttctattttgaggctttcaccgggttttctgggcaatcagtatataatgactactacctattactcttcaacgtcgtccttacttcattgccagtgattgcccttggagtctttgaacaagatgtttcctctgagatctgtttacaggtaaggtttactaagctgctgtgagtttgtcactcgcaacaaactaactcgttctttgttctgcagtttccagcgttgtaccaacaagggaagaaaaatctcttctttgactggtatagaatatttgggtggatgggaaatggtgtgtactcctcccttgtaatattcttcctcaacattggaatcatttatgagcaagctttcagagtcagtggcccaactgctgacatggnatgctgtggtactaccatgtttacctgcattaatttggctgtgaatgtg

SEQ ID NO: 22521 - DNA, 1088 bp, Arabidopsis thaliana landsberg
acgtcaatctccatggagctagtccatctctagattttaattatgaggtcagcttactcgatcctgactggaggaattcagcacctcagttcaatatagatcgagtctttcactgtgatggcttgttgttatgcacctcccaaaaagattcaagattcgtcgtttggaaccctttaactggtgtaaccaagtggattgaactcggcgatcgttacaacgaaggtatgacttttattcttggatatgataacaagtcctgtgataagagctacaaagccatgagctttaattatttagacaaggattctgaaatctacgagtttagctctgactcatggagggttattgatgatattatcaagccaccccactacatggagtactttagaaaatgtttgtctttgaagggaaacacttactggttgggtatagatagaagacgaaggccaccggaccttcgcataaccttgatcaaatttgattttggaacagagaaatttggttatgttcctctgcctcccccctgtcaagtgcatggttttgaggcttctaggctttccgctgtgggagacgagaagctttcactgttactagtgggagattctacatcaaatactgagttatgggtgacaagtaagattggtgaggccaatgtggtgtcgtggagcaaggtgttatcattgtatccgaagcctgacgttggtttttggcatggcctaagtttcttgctagacgaggagaagaaagtcgtcttgtgttgtaagagtaagggatggatggaggaagaagacgaggagaatgtttacagtgttggggaggatactaaattcatactactgaattttggagttcagacaattggaggatattcgccaattattgttaattatgttccaagtttgggtcagatcgagctagctggaagcaaaaggaaaagagattactaaaacaagctctacatttaatctctcccttttctgttttcatcctgtgaactagtatttttatgaagatgtggtattatgagatatttatgtttcaactgccttagtgtgttataattcttgcttgtaaacagagtttaaatt

SEQ ID NO: 22522 - DNA, 638 bp, Arabidopsis thaliana landsberg
gttgttaacgccgctgctgggaattttctggctgctgctgaggatttgtctcctaatggcttcagaacaggttcctttttcgttttctcattaatttgatcatgatctgagaagaattatgcctgaaagtttgtcaatttagctcaaggaaacgtttttttgttgtgcatgtgcagtcttagacattgatgcggtaggaacattcaacatgtgtcacgcagctctcaagtatcttaagaaaggagcgcctggaagagactcatcaagcggtggaggttcgattattaacattagcgcgactttgcactacacggcttcttggtaccaaatacatgtctctgcagccaaggtaatttgattagtctgatagagtcattcaatgtcttgagttttggttagagaatcaagaactaagtaataggaacaatagatgtagcaaaaatgtgatcttaggagtttgaaacttgaaacaggctgcagttgatgctccacaagaaacttggcattggagtggggaactgactatgatattagagtgaacgggattgcccaggtcctattggaggtaccctggaatgagtaacttgtactgaggagatgaaacaaaccagagagtcatgctctttataagttgagag

SEQ ID NO: 22523 - DNA, 492 bp, Arabidopsis thaliana landsberg
ctttaacattaccggcgtcagtataacagcttttggtgattgtcctaacaccaacggtatcaagaggggtggatgtagcaacatgcacatctccaacacaaacatcggtaccggagacgattgtatcgccattctctctggaaccactaacctcgatatctctaatgttaaatgtggtcccggacatgggatcagtgtcggaagcttagggaagaacaaagatgagaaagacgtgaaaaacttaacagtaagagacgtcattttcaacggtacaagtgatggtattcggatcaagacttgggaatcttcagctgtaaaaattctcgtttcgaactttgtgtacgagaatattcagatgattgacgttggaaaaccaatcaacatcgatcagaagtattgtcctcatcctccttgtgaacataagcaaaaggttaacattctattcaaaaaacaaacttcatcattctcttatttcatcaaaagaacaagaac

SEQ ID NO: 22524 - DNA, 619 bp, Arabidopsis thaliana landsberg
atgctaaagatattttggaatatatttcccgccggaattggaataaagatattgtaaatgattactgatatgtatggggttgcaggtatatcgaatatatacgttggtcggtttattagcattgtatcctctttcctgcaacaacccacatctatcacactaaatagcttagcctccgacaactttaatgcaagaggaagatgaacacaaagagaaatctaagctgaaaagtaaaagtaaaaattatgagtattacgtatattattgttaatgataacaagagtgatatttttactttagggtttcatagatatgaataacaagaacgctaacaaatttgttattgctgaaactccagcaggtgacaatggtgttcgtggtgagattggtccctaggaatggaaaaactatgaaaacggctcgcaaatggatgggtttgcactaggagtccgactgcgtgacgaaaatgggtttgccaaagtggtaattatggcggtaaaagaaaagttagcgctgcgttatgaagacaatatcgagttaacatatcagtggccagtatggatgatgggccctgattggaaacgagcaaaccgaatcgatatattgacgatgatgcatg

SEQ ID NO: 22525 - DNA, 551 bp, Arabidopsis thaliana landsberg
agcacctttcaaacttcttgatctgctctcttctctcagcattatatatcttatcaccctatatgacagaaatatgtaaataataattaataagggaaaatgatcgcttgaacctactataaggctggacaaatataaagttgaaactataatacacgtacaacttcatcaaccaaaatcatttcgatggattcaccagtctttacagaatattgcctccaaacatgaagcaattttactagaatatgccaagcgttcttgtaaggtgtgagcgatttcaagggagtaaatggaagaggattggcgagcatcattttcaaaaatgaaattagagaatgaagctgtatgagtgtaagatgagagagtagattgaaatgaggcgtccgatatttataagaatgagtggttaggtcaaaaaaatatgcgcaaaagatattgtccgtggatttcaagtttattccatatcaaaaatccgattattatagaaaaatattcaccatttgccgtaaggtggatatgtatatagggaatacttgtgaaaaaagtaagat

SEQ ID NO: 22526 - DNA, 642 bp, Arabidopsis thaliana landsberg
  unsure (1)..(642): unsure at all n locations
gactcacgcagggggatgggagccggagacccctcagactcagaggagaactcctctgagtactccgagtcaccaaaatcctccgatggaggagttggctcacgcttgcgcttgttgttcttgcccatggtggaagcaaaacggagagaagaaaaacaagcaactagagatcagccaaagatgtgaaaaagccggagagacaacgacattatttatagcaggagaaggcaaccgctcacctccaaccgtggccactgaacagtcgcaaagcattcaataagcacttcaacccgtctgaagacacgtcaggcggctgacaccgtttcacgcagcacaacacccattgtgactccagtcaacagcgcggaggatatgattacacccgccgtcacatcacattactactcagaagcagatggctaaaacactcagcgtaccaagccgtccctcgcccacacccattgggggggacaccaggaattatcagtatatttttcaaaactgtcacatccgtgcagggcatgcagtgaatactcaagacaanaatgagatatcagtaaggatcagaggaaagctaaatatagcgggtgaagtacaaaatatggctgacaanagcgacgtgaagactagacgggtacgagc

SEQ ID NO: 22527 - DNA, 494 bp, Arabidopsis thaliana landsberg
gtttctattcgtttcaaattcgagaacttccaaatttgctgcctttggtttggttagaattcattggcatatacagataatacgaatttgaaaaaaaaagatggttttgcagttttgtctattaaaaggtcttggactctatgatgatgtcttgttaaagattctatgagtaaggatgaatctagttctcattcaaagaaatctgtatagacgagtcatttaagagtccattaattcatgatggaaatctatcattatctgttaaaaaaaaaaaccattttggggctcaaaatctcacaaagagaaaagccttttctgatgacaaaaaaaagaaaagccttctctgagacaaaagagaggcttattaaggcgaccatgaccttggaaatcgaatatgaacccaacactttggttttcaccggttatagcttaataaattaccgtaggatgagctttctttcatgatccgaccgttcattgcgttttgtaaacca

SEQ ID NO: 22528 - DNA, 477 bp, Arabidopsis thaliana landsberg
ataaccttggtgagtagagaagagcgtaccattttatctcatcacacttattttttttatgtaggtcacaggggaagcggaatatacggatgatactccagtacctcctaataccttacatgctgcctttgtgctaagcaaagtgccacatgcccgcatcctttcaatcgatgattcggcagccaaatcttcatctggttttgttggtctgcttcttgccaaagatattcctggggataatatgattggaccaattgttcccgacgaagaattatttgctacacatgtcgtcacgtgtgtgggacaagtaaggaaatttgaaacctaaattctcacgttttttcttagcttttcaacggagcctaaaacttgcttgagtctcagaagaaattttacatgctttttataagcacatctgtatttgtggcatgcttctgatcaccagaaagtaaacgaggcaagtctcctaataggact

SEQ ID NO: 22529 - DNA, 613 bp, Arabidopsis thaliana landsberg
  unsure (1)..(613): unsure at all n locations
aatgacacatatatgaaaatcctggaaggattaaaagttcccaaggcattttactcatcaaagtataaagatatctatgcggggaaatgcagagatcannnnnnnnnnnnnnnnnnnnnnnnnnnnnnnnnnnnnnnnnnnnnnnnnnnnatttataaaagaaaggatatgtggataatgaaatatgtccttacgtctttattaagaaatcttttttgggatttctgatcattgttgtttatgtacatgacctaaatataattggaactctaagagagattgatgatgcatgaactcatataaaagaagagtttgaaatgaaagatgttggaaaaacaaaattttgtctcgggctccaaattaagcatctcgaagaaggtatatttttgcatcaatccaaatatacaaaaggattttaaagcgctttaaatattgaaaatgatccgtttagacctagtgaagataacaaagatatacttggtcatgaagtaccttacatgagtgctatcggtagactgatctatcttgcacattgtaaaagagcagatattggttttgctactaatttgcttgcacgtagtattcatcccctacttcgagacattggaatgag

SEQ ID NO: 22530 - DNA, 576 bp, Arabidopsis thaliana landsberg
atcgcagaacgtgaaggaatgaataatgctaaatcgttatttggcttattgtaatcattccaagctgcctcgtgtgagaggttgttctggttaacagcacaaggaacatcttgaagcatcccaaactgtgaagccactcgattgggaaagtaatgctccacattgtcaattccaacaagctgagacaccttaatgcatcgagcaaaggagacaaattcaacatcaagattgggactagcaggaatccacaccgctttctcggggtaaaacttaggaaactcccactctttctcagtttttgtgtagggatgccactcaaaactgtcgattttcaagctatccagaatctgtctcgcatcgctggttctctgtaagaggccatgccaaagagccaatcttggctcacctttcagcaatggattgggttttactgtagttccttgaacctctcccatgtccaaacttgaagcaacttaaacagggcagtgagatcaattctagccgtactcgtcgattcactgaaagctgtgatgtgtttttttaagagacttagctcagcatataagtgtgcaagaa

SEQ ID NO: 22531 - DNA, 416 bp, Arabidopsis thaliana landsberg
  unsure (1)..(416): unsure at all n locations
annnnnnnnnnnnnnnnnnnnnnnnnnnnnnnnnnnnncacagattcagccttctctggagatgccatccgggagagaatttgggtccgtccagtttacggttacaagcagactccggaaaatcttgggaagcgatacattggcctttccatttaatgggaacaggaccaagaccacggtcatcaaagctaggtctttcgggccaaacaccagtatcgataactccgataactagatccgacccgaaattagactcttcgagtagacccgctttgtcggtggacctaagaccaaaaaactcaggggaacgagtggtgtgcaagtgacggacttnnnnnnnnnnnnnnnnnnnnncatgaggatggtctaagagttgactagcgtcttgtgaagtgagtctagcggagaagccatgg

SEQ ID NO: 22532 - DNA, 365 bp, Arabidopsis thaliana landsberg
tgaagtgatgatgatttgatcgtacaagtgtttagaaaagtaaaaataaatgttttgccttcaaagtcagagcgttttgatagccttaagttgagagcgtttttttgtgcgtattcttttgttagttcttagaggcgctttatatagggctttgggaaaccgcctctcacaatattcacggaagatttccatttatcacagagtcattgatcggaattatccttattcttcgagaattaggagaaaacttatggattcgataatatcctcggagattctctaatactaattccgagatttctgaaaacggtatatcgacctgttaaaggatccaaggcttctccatggacgactatgcatcagag

SEQ ID NO: 22533 - DNA, 1595 bp, Arabidopsis thaliana landsberg
agccggattaaatgggtcctagccgaatttaatgggccttttgggaccttggttttgggttgggcctttttatttggggacccaccaaaggagatgggccctttcaggaaccttttagtattatttattaaggtttggatttcgcctgggtccatcttaaactctgtttgctccgttgacttgattggttttacgccccaaaacaacgccgtacctttggataactaatctgaacaccaataaggcaagaactagcgaatctatcagatccaaccagagttcctgtcctaaaacacattgttcatcattacaaatacgagccaaaagaacagagagtttaatactcaaaaagactgaaaccaaccagggactctattacagacacatgaacctcttcatatttcatccattactatccaaattttttagtacatgaaaacatagagatgattacaccaacaaactctagagaacctgtccgagatttctacaattccaatctaataatgattcccgacaaaaggaatcgaacacaaatcagttctgtctataggcaatgtaattagccaaagccaacaaaggagcaaccttatcagaatcaaaccctaaaagctgatcacgagcctctctattcaatttctcagcaaactctctcgatttctccaaacccataatcttaggatacgtcaacttatcagcaatcaaatctttcccagcagttttccctaactctttcgacgatttcgtcacatccaagatatcatcaaccacctgaaacaacaaaccaatacatctcgcaaactttcttaacctctcaatctcatcatcacttcctccaccaacaatagctcccaaaacagcagaagcttcaagcaacgccgccgttttatgcaaatggataaactccaaatgctctaaaccgacgtcgtttaaatctaacccttcactactaatatccacgacttgacccgccactaacccttctgttcctatcgctttagccaattctccaacggctcgaaccactctcaccggagaaacaacatcagaactcgtcgccgaagctaaatgctcgaaagcgaaagagagaagcgcgtctccggctaaaactagcgacgtcttcaccaaacactttgtggttggtcggttttccgcggcggagatcgtcgttatccatacaagggagatcgtcgtggatcaacgacattgtgtggatcatttccactgcgcacgccgccggtaacgccacggattcttcgccgcccactaactcacacgctgcgatacagagcacgggtctcactcgtttgcctccggcgagaagcgagtaacgtatcgcttcatggatcttgattggttctcggagcgagacgacggagtcgagagcttcattgacggcattagcttttccgatcatgtataacgtgaaattgaaagggttgtggatgaataccttcgtctctggcggtgaccgatataacggtagagagcttccgacggagaaggaaaggttggattttgatgaatccgggtatggatgcggagctggatattttaactgatggaaaaattgatagattgagtgtagtcatggt

SEQ ID NO: 22534 - DNA, 535 bp, Arabidopsis thaliana landsberg
gagagaactcagattctaaatgctttacatgaatgatattctcttcagcaaagaatagagatctctcattgaatcttaacgctttaaaacctgaattatatcttcttcagctagaagattaactttctgtggaaccattttgctgctcttgtcattgtcaccaagcccgagtcttccatgttctcctcttccccaaccatacacctaagaattagaagaccaaacacataatataataacggaaaaaggatctagcacacagtgagaatgagaaggaaagaaaacatttttgagcgtaagatgattctaacctctcctttatcagttagagccgttgaatgccatccacccgcagcaatatcgacctgcagatgcgtgtaacgaaggacaaattgtcaaagcttataatcagaaccactcttcaaaggtttaataagtcgaaagggaatcaagaaaagggaaatgaagcagaaccaaagtgagatcatcgaggccttggactggaacaggatgagatgttggctgggtgtcaccg

SEQ ID NO: 22535 - DNA, 515 bp, Arabidopsis thaliana landsberg
  unsure (1)..(515): unsure at all n locations
tcggtagtgaagattgggtctgtacaacccaggctggaaagggatcacgactcgtgggtaaagtgtgcaacctttgcagagtgttagaaactggtatatcagccgagctcacggttaagagcggccttgggatcctctttgattagaagaactttggttactattatgatgatggttataattttgatctcaggtatttcctcttggaggaagtacatttgggtaataactaggtttattactaaaacttggctctactaatagtaataaatacttgaccaactaaaagcaactgcttaaccttaactccacatacagctagtccaccttagccaaacgagacatttgctgagtacgttgatgtgtactcacccttgctttacaaaaccatcccaccccaggttgtccccactgtattcagtgcttaggaggagatgctggcaacatggaggactttnnnnnnnnnnnnnnnnnnnacgagttctagttttgcttagtggcaacccccagccagc

SEQ ID NO: 22536 - DNA, 515 bp, Arabidopsis thaliana landsberg
ggaaggaagctggtgggagacgagtcatggacggtgaataatgaaattttgatgtcccattgactagcgacacgcagatgatattccaacgcggcaacttttaaaacggtgcgttttaatgttttgctcttcttgcctgcgggcccttcgctaaaaagcatcagctacttagcccatgggtcgcgcgagagtgttaagtttattgtttcatgtaggtgaggaaataaaataggagaaactcgtgtaggaaaattaatgtggtggattcgtttagcttcagcacatttctccatttagttttctttacaaaagcccatggacgtttttacaaaggcctttattcgactattataatgtatagtaatgtaaatggtttcgttaaatcttaatcgaccgtagtcataagtgaaattaaaataatttgcatcaaatccccataaatatagatcgtgcatgttgcataaaattcaaccattaatgatcgcatttccttcggatctgccgatcattacgcc

SEQ ID NO: 22537 - DNA, 2504 bp, Arabidopsis thaliana landsberg
taaagtacttttacacaatttcaaattttcagctattacttttcttcatatgttttgggtttgacttttaagtaactttctgcttgttaatttattacttttatgtttttatttttctatatataatttgtgtttacatcacaaagcttactaaaacgacgacaccgcgttttgagtgcaaagcgcctaacccacttctgaatggtaaccaatgctctgaatggtaactagagctttatcaagtcgacgtacttgtctaaacagcatctaaagttatactagacaaattccttttgagaaaaaagagagaaattttctcaacgtccaaattagtatagtaatatgtctaacataaaatagtaaaatataaagtgactcaattggtaaaacgtttagttttcttcatttaaaagttcaatggcttgagatgttctggactcattatccccttattatttataacgaacagccgaattgtaagaaaatggtgcatctttttcctggttttactcgaattctatcatatgattttcttcatttcatatcttttgatgtaattataatataaatataatcatatacgtcatgagacaagaacaaaaattaaataaaaccaattgtaatatatcttcacgcctaatcgctaactaagaggtcattttctttatttaattggaataaaacagtccttacttttgtgagagcaatgtatactagatgagaaaggaaaatccacaaaaacacactttcgtcgaaagaagtaacctacacaaaacacaaaacaaacaaaaaatgaataccgtacctacctaattttaaacaaaatgaaagtagaaagtaagagaaattattgcaagtcaaatatatgaacaaagctttacccttcttataaaaaaagaagagaaaatatacaagcgtttttggatcctcaaatcaaatcttagtcctctgttttttttgctttcccttgttttggtcctcttgtatctctcattccatcaccttctttctcaaataatctctagaaaatatatagacaagaaaagggtttttggatcctcaaatcaaatcttggtccctttaaatttactacatttcgtgttacattacattttctagttgcgttccactaatcttggaattatcttgtttctctttatcctcttcagccaagcagaacttctccattgaagagcttatagcccgagtaaaatgtagtaaacaagtgtaatcggtagtgcgataagcattccaaatattaccctgcaataatacacataagaatcaacaatattagtaatcttctcttatgcataagaaaagttttactattggttcaatatgaaatacttaccctgtactcaagattgcgggatgaacattatactcttttgcaaacacaaacggcacgatcccttgaggcaatgcagcctacaacgttaccacaagatttggttaaactacttcttacaaagagattgttaacaacaaacgaaaatagtttaatttacttgaacaatggccacacgcaataggtctccacgtaatccaatagccattgctgccacggccattatttttggtccagtaaagaatctcaccgccatcgcagaagtcgccgtcgaatttccgcaagcaattaatttcggttgcaatgccatgaacaacccttcaccattttcacattttcagttaattcatttccactcaaaacaacaagtgctgaatgatgcaatacatgtaaacgtaatctaaatccaataaatgatgatgatgatgcattcatgtacattgtaagtccaatcaacttccacttaatatggggaccacgacaacaatcaagaacacgagctatgtcatcccaccacgaccgtttatataattcgacgtcgcatcaatgaccctacctgtcggatggtccatgccgtaacgggccatcccaaaaaatctttaaaaataccaaccattttcaattattggaatcctcaccaaaaaaaagttacaattttttccgtacgaatgtggatgttgtgacatttgattggcgtaaaaatagaaagaaagtaaatgagttaacggaaaaaagaaacagagtaaaaagatgactcacccaaactgaacattgccataccaagaccagcatcagaaagaattgagattgattgttgaataattttaggcattgccacatcccaccttcatatccaaattaccataatcatcactctaatcaaatctcacaataataataaacttccactagtagttgatttttgattaagttacctgaaagcaacaagagcccaaatgagaccaatgagactagagtaagtgtttgggttccttatgagtttcctccacaccattatcaatatcagccgagtcatcacactcgctggtggcatatgttttacaggtacagtttcacccgtttctatagcttctttagggtttagctctgctgtggagttacaccgaagcttgtgtagtccgttaggcacttc

SEQ ID NO: 22538 - DNA, 823 bp, Arabidopsis thaliana landsberg
  unsure (1)..(823): unsure at all n locations
ctcgtttgaattattttgaatattaactgttggcgtgttcgtgtgattatggacccagtcattattgtcggttccccttaaaaatagtttttgtaatctcgataatgatataataaagaatattaatatgtctataacccagccgcaaagctcttataactcagccacttctaaatttattcaccaatacacgacgtcgtcgtttgattagtgctttttagcatacacgactatatagatttagtgctttagtgccctactaattgaagacaagatgatggcacaaagatctattttccacggcgactctagtgttgatgagaaaacggtttcagaaggaaatgaggtatttatctcgaccatctgaaaagtaaaaatcgttagtcatttaacgtggtgtatattgtgtttgtgttaatgtaggagctcgatcgtatggaaataaggatgagaatgaggtacggcgaaaacaggaggcgcgataaaggcgttctgatcgagttagattgcaatgctaaggttgtcgttgccacttctcatgatcctgttacaagcggaaaactttatttcagttgtccgtataaaatatcagatgtaagcatcttttgagttatgattcattattttatttcttttatttttgtatccctattaatcaacctcttatttttaagggttccggtcgaggcagcggtttcaagagatggtggactgttgcattgtgtgacgagtttgatatgataaaagaggagacgattgagatgaagaaggatctggaagccgncaatatttgtgaacttagctaaggcggaaaagattgatc

SEQ ID NO: 22539 - DNA, 719 bp, Arabidopsis thaliana landsberg
tcaagatcccaaagaacggagacatgagcaaggtcataccgcctcagatgctaaaacagatgggcggcatgagcggtctgcagagtctcatgaagcagatgggttcggctaaggacatgatgggaatgtttggtggcggaggcaagtagtttctatctttcttgcacacagtgcacggagggcagtggtaaaacttttgttacatactgtattagtaccttataattttaacacatcctaacgactaaaatgcttaattactatcagattttaaaattgttttaaaaaataattttaatttttagttatttttgattcaaaaaacatataatcaattaattattttgtcaataaaatcacgaaacccaattataatggtccaaaattttcaaaattcgatagagtagagtattgaaacaaattaaaaaaaaaaatgaattatggaatcaatgttcgtatttagaataataaacataaataataatacatatatatatatataaacttaataataaatgttaatgggataagatttaatagttagatattgtttatgtcttttacttgggaataataaaaataataatctgtttgtttggtaattggttaacaaaatttgtctttcccattttcttttgtatttccattttttttgaatttggtagggttccttttttcttttatattgtttgttgtacgtgagcgagtgtattacttgt

SEQ ID NO: 22540 - DNA, 1586 bp, Arabidopsis thaliana landsberg
gagcaacgacaaagcaacaaatcaaaacgtcgaacaatttggagccaaagatggatcaacaactcatgaaattcgaagatgaaatcgaagagagaatataggtaaacgaactatagaatctgaagaatagaatcgtaaaatcagagcatgaaattgcatcttatgtcaaccgataagaaaagcatatttgtactttaaagaaaacttatactaaatggctaattacggccacgtttcttgacgggtacggcatgtaacgggttggtcttgtgcaatgtgagaccgaaagtctcgtccatgtccaaatcctctgaaccgacaccgtttggaagcttccagtcaaatgaataaagaagagaagcaagcataagaggcactgttttcacagccaaaggcaatcccgggcatattctacgtccggctccgaatggtgtaagctcataatctctacctctcaggtcgatatctttccctaaaaacctctctggcttaaaccgggacgaattctcccacacgttcgggtctcttcctatggcccacacgttcacaaaaacctgagtgtctttaggcaccatgaacccaagaacctccacatctgattcagcttttcgggggactagtagcggagcagccggatgtaaccggaaagtttccttcaccactgcttgtagatagggaagtgtcgagatatcagactcttcaacaacacctttctgaccaatcacacagtcgatctcagcctgagctttcaccattgttttagggtttccaagtaactctgccattgcccattccacggtactagagtttgtgtctgtgcccgctccaaacatatcctgaatcaatacaagcatattttatatatcagtgtactaatataagatcatgttatgcattatgctaagacttacgagaagtaggtgttcgatctcgtcaatgttgatttcagattcatatccttgttggagatcgaatagggcatccaagcagagtgtctgctattaacatctttctcatctatacgcgataagttttccaaaatcctagcatcgtagaaccctctaaatacctgaagcaatttacccgagtactctttcatcttcttactattaccttgtaagtcaagtaacctcataaatgggaagaagttagaaacgtctggatttccgatagattccatgtaaccaatcaccatctcctgaaaacgcacttgaatttttcgaatcgtagctaccgagattgactgaaaacaaaatattcgatatgatattgagagctgtgacgaaagatgcacgagaaatgtcaacagcttctcctctctcactgctttcactcaaaaagttgacaagttcttgcaccttcttcattctcagagctttagtagcctcgatacgctgcggtgagaacagctgagtaaacgtcatttcctcaactttctgaaaaacattacatatgtggaaacgatgatatatcaatagaaaaaactaaagcgctaaaaagagaaattgtagaaaaagaatatcaaaagcattacctgaaacaggtgacgacgatgtaccagccaacggaaactatgatgattgtga

SEQ ID NO: 22541 - DNA, 475 bp, Arabidopsis thaliana landsberg
ctagactcgaacccagcacggattgaaagagtgtggggacacaaccactaacgctagcttcaaatatatcagttgtattccaagataaactttataaaccttgtgtagggcacgtgccctacctacccacaacgtagatccgcccctggttgtcaaaaagacttcataagatcattttgaccacaaaagttcacaactcttggctctgtacatttgtacctcaaccaccatctctcactttagattccagtaactatacagagagtgtctcctactaatataccgtgtttctattcactatcaattgcaaaaagtattgaatatgagagacttacttcaacttctagtcctcttctactacttactaagtattgtgtcaatgttcttggaagttactgtccttcctctcgaatcaaattcgtgggctcactaaaaacgtacctaggaagctcatatctagcacctgcattgaata

SEQ ID NO: 22542 - DNA, 555 bp, Arabidopsis thaliana landsberg
ggaccatccccgagcagaattctttatttttcagaaaacccagttattctttattacctgtaccccagctcgtttctaaaggcgggacaaacaatgtgaatcggatcggatctcaaccgagaagtttcactcaaaagcccagctctctcacgcttgcccgagtaaccaggacacttcgagtttaatgaataacccaacctctctgaaataagtgggtgctcgtaataggaaatcagaacactaaaaactctgaacggaaacatgtagataaagccgtctaggcataaaggattttacaaaaattggataaggccatccaggcatagagtacgaaaagcaataataacagtcctacaacaaaaatctattcttgctgctcggacggaagatcaccaacagcagacaagtacgacccagactgatgggtgattcccaccacatgcgcgagagcctcgaccgacctatgaccttcaagacttagaggtgccactttgggagtcggggccttgagccgtttctttactttaaagatgagacgagtaaggttcacctatg

SEQ ID NO: 22543 - DNA, 513 bp, Arabidopsis thaliana landsberg
ctacacactatatattcctttgatgccgtgattgtcattataacaagcacaaggaaaaacactaaatcgtagaagaagaaaagaaaaaaaaaacaagcaatggattcaacagcaaccgttgcaagtgatcgtcttagtcaactaaactctttcgaggagactatgacaggcgtgaaaggccttgttgattccggaatcaaagaggttccaactatgttccgtgagcctccagctattttagcaagccgaaaaccaccactagctttgcagttcacgatcccaaccatcgatctgaacggaggagtgtactacaagaatcaagattcaattacacggagaagcatggttgagaagataggagatgcagcggagaaatggggtttcttccaggtggttaaccacgggatcccgctcgacgtgctggagaaggtgaaagaagggattcgcgcgtttcacgagcaggatgctgaattgaagaaacggttctactctcgtgatcacactcgaaaatgg

SEQ ID NO: 22544 - DNA, 811 bp, Arabidopsis thaliana landsberg
  unsure (1)..(811): unsure at all n locations
accgaaacattatggtgagcaatatttgtttaatattgttttattatacgttattatgaggaggtgagggtattatatacggttactaaacacccaccattatttaagtttcttccattccccattccatctgtttaacttgaaacaaataagtatgctcagttnaaaaagtcacaagaatgaataaccatctggtgtcaaaaaggttgttcagcataaactaaactacttagttttctacgttttacattcatcgtaaacaaaacataatcgtctgcatatgtttttttttttatctcaggttgctgctatcccaaaaatttacatcccggcaccaatacttgcttaaattattagctacgttgccgaagatgtcgtggatgctttgaaacccttggttatggttggtccaacatttaaggatgcaatgtattccaaggaaacactgagttgtgtccgcatagacaaatctcgttatttcatgtggtggtccatgccgcattccatttattattatttcttcacaaaatgtcttgaagccaacaatccacatgctttgaaagctctaatgtacaaatcaatagcatatgagaattttgctgccgaatgctatagatctaccttatgggcggagctgtatggagagcatgaaggataggaatcaaagaaaggaacaaatagtcccaaattttgaaagacaatgtggttcctttttcatttctgatgttctgcctttgttttattataaaatacatcatttatacactgtttaatcttatgaaaagtcaaagcccatcaaaatatgttcgtt

SEQ ID NO: 22545 - DNA, 1458 bp, Arabidopsis thaliana landsberg
tccccttccctcttctactagacaatattaacttgcaagtaggtaataatagtagataagatgcaccgtcgatggctggtttttcaaccacatatcgggctgcctctctatcaaatgtaacataagcaaccggttaatttgacttggtcaagactctcaatataattaaatagttcaatgtttagaatcagagtttgaaagaaacatgtgggacatgaacaaagaagaagaagaataaagattcagtggtcctgttgtagacaaaatatggaagtagtcttacgtcgtacataaattatttttatattattgtaacaacaacgggaaaataaacattaaaacagaaatatgcatgtcataaagttactcatagagtgacagagacttattttatgtaaaatacacacgatttagcaccaaagattattggtagatttaacatgggacgtaacagatacacttgtgtgctgggaagacatagttgcatgatccatgtttggctccttcaaggttaatgcactgattcttgcatgcattactgtttccgcaaacccctgaccatgtcccacttggcttctcgcacaacttctgtgcttccaccattgccggtgcctctgcatatatatgcatacatcagtcaagaataattatcaaataaactaaaattacatttaaacacatttccaataagaacattattactcaccgaaagcagcaaagagaacaagagcagcgaagataagggtgatgatggaagcaaacttagccatgatgattattactatttttgttttcaatgtatagatgtatgtgttgtgtgaagaaataagccaaagatcaacatctatttataatgaaatggtagtgggttaatcttctattcttgtgcatcgtacaataacgtggtaaccccacacattaaacagacatcatcttcccgtagccaatatcaaaagataagatcttgctttttgtttgttgatggctggtttctccaccacatatatttctctgtcgatatctaaagtaacctaagcggctgcttcggcttttagctaatgctacatcgttcacatgggcggctggttaatctgaatggattaagactcaagaaaataatatcttaaccaagccatagttacacaagtatattgatgtcagagattctcgcggttaggacaagtgcagactgtgcagttcatagtctgaccttcgtcatcgtcgaacaaatacaacatttttcgattagaggatcacccctagacatatagatcgttgtggactaaacatatggtttggttgatctcaagagcagcattgttccgccaagtttgcagaacaaggaaccgttctcgcgtagtttcgccatttatatatccctgggacacacctattactgaaaattggatgattcatcaatattttgctctcaccgacggtaagttttctaactatcga

SEQ ID NO: 22546 - DNA, 613 bp, Arabidopsis thaliana landsberg
atccaaaacttagtaacattccctagatctaagtaggtttttagagaatttttcgattttgattaattcagaaaaacgaaaacataagataggaaatgcctaataaagataggcatagttgatattgagaatgattcgtcttgggaatgaattttctggtccagataacagcagggagctcaggtctaacataaagttatcaagtaaactccatacactaagaaacaaacctctaacctaagtacctaacctctctattagctaaaagcataattccttatgtttgaagctccctatatgaacaagtagaagaaaaaaggctgttgttacttctctccatgctgctgattgatgcagtttcatcgtcttccacctcaagcatcgcaaggtttaagtgtaattctgtgctggaattcgggtaaacctcgtcatcgaagcaatcttcatttccttcttcttccataatccatttcccggcttcgttttcatctcttagtagcctcagtatctgaagaaacgttaaagattagttcttgcatgagggacttagctttcttaaggaatgaaacaaaatcttacttgtcttatattgggacgatgtgtggctgatctt

SEQ ID NO: 22547 - DNA, 682 bp, Arabidopsis thaliana landsberg
tccatcgctttgtgttccgtgttctatcatcaccgacaacgccacccagttcaccgacagaaagttcctagacttttgcgaggatcaccacatccgggtggactgggctgccgtggcccaccccatgacaaatgggcaggtagaacgtgccaacggcatgattctgcaaggactcaagcctcggatctacagcgacctcaacaagttcggcaagcggtggatgaaggaactcccctcgggggtctggagtatgaggacaacgccaagccgagccacgggcttcacaccgttctttctagtctatggggctgaggccatcttgcccacagacttagaatacggttccccgaggacgagggcctacgacgaccaaagcaatcgagctaaccgagaagactcactggaccagctggaagaggctcgggacatggccttactacactcggcgcggtaccagcagtccctgcgacgctaccacgcctgaggggttcggtcccgagacctccaggtgggcgacctggtgcttcggctgcgacaatacgcccgaggccggcacaagctcacacctccctaggaagggtcgttcgtcatcgccaaggttctgaagcccgggacgtacaagctggccaacagtcaaggcccggtctacaacaacgcttggaacatctgacagctacatcgc

SEQ ID NO: 22548 - DNA, 313 bp, Arabidopsis thaliana landsberg
ccaaaggagtatgccactgctcatgctatcactattagacatgatctatatctgccaactcgacatgtccttacgtcaatcattgggacagtgtaaatcaagatggggaggatttcgctcataatgaagttacagctgcaaatagcaatagaagagcccataccagatgatataaccactattttaactgcctgaacctatccatctcgactctggagcaaaagcctgccatttgtctcacgtcatcctcatctatcctcgtacatccaatactttatctaccatgcaaaccttcgccctattctcctggggt

SEQ ID NO: 22549 - DNA, 473 bp, Arabidopsis thaliana landsberg
cacttcgattattttacaaagcaaacacaactcaactttgttcttcttcttcatcacactccacactacacgcaacttccaagtttagggaaaatgaaataatcggatgaattcaaagatcatttaatttaccttgcttgaggaaacattcccgaatcaaaattcgtcatagctggatccgtgacactactggcgccagaaccaccaccggctcttgctctgcttacactctcctttagctcagccactacatgactcatcgtcggtctattcttagaactagaagatgcacaagccattgctacttcagtgatcttccatgccgaaccagcatcgaacctctctcctagcattggatcgcacaatgccgtctgatatctcctgtcgacagcgttaagtcgacccaggtcagtcatgtgtatgtgctctgcagacgtctcttgagcgtgcaatcatcggttggcctgagacta

SEQ ID NO: 22550 - DNA, 144 bp, Arabidopsis thaliana landsberg
  unsure (1)..(144): unsure at all n locations
agaagaagaagaagaagaacacgaagaagaagaagaagaagaagaagaagaagaagaagaagaagaagaagaagaagaagaagaagaaccaacagaaccagaaaaggagaagaacaccgacacggncancacaggacggaaaaa

SEQ ID NO: 22551 - DNA, 562 bp, Arabidopsis thaliana landsberg
tcgttggttttcttgcagtcggcgtcacatggtggccagccttgctccatcttctcggcctatgctatggcccacaaggcaagacaatgttcggcatcacctagaacccggatgatgggcccgaggcgtatagcaaccccgccgtctacagccgccttcgtgactacaccgccatggcacaggggtccatgggtcagattacaatccgaggactaaggagatcgaccctgatgtcctcatgagggtcagaggaggcaagaaacatggacagtactggattcccgacaggctaatcgactcgtcgtccactcccactcaatcccaggtgcgagcaaggagcacaagctctagcctagccatacgacctcggcaggacaactcacatcatcgcatacaacaactcgaggttagtgcttctgtaactcatcattacatgagttatatacattatatttaaattactataacattgacttggaatattacagacccaactagaaacagagcggagggacgtcaggagatggaggcgaggatggcggaaatgttccagtcatgcaaa

SEQ ID NO: 22552 - DNA, 547 bp, Arabidopsis thaliana landsberg
  unsure (1)..(547): unsure at all n locations
aatacttagtgatgctttaaaaactattgtaaatcatggtttacccttttaaaagcttttaaaatcacttttgaaaaccaattttacaaggatttttagacatatcgttgttgttattgctttccctggcgtctctagtgttgtaaaccactttgtatctataatatttcccgcgattgatagtggcctataacaacaaaatagtcaccaatgaatgttttatttttaaaaaaactcactatcttactaacaaaactcacttgtttttccttgacttcttccattcagccaatttctcannnnnnnnnnnnnnnnnnnnnnnnnnnngatgcaaaattggatgcttcttcttctcagctgtgaaaagtacttgtgtatgaatggaaggaaccgtaaccccgcttactctttctttgtgcagcggnnnnnnnnnnnnnnnnnnnnnnnnnnnnnnnnnnnnnnnnnnnnnnnnnnnnaatgattttcctcttcttactctgtgcctatcaaaaaaaaaaaactggtgttaaaatacccttgaaacaaa

SEQ ID NO: 22553 - DNA, 612 bp, Arabidopsis thaliana landsberg
  unsure (1)..(612): unsure at all n locations
attttgaatagtcgtggagacatatgtgccttttcgggtgccagggggattgctaccattttggagaggaaaggctgtaaccacgtgaaattcttagcacaatccgaagccgccttatcctctaaagatataaaagacccctcggccgaagcgagcctggtcggtggaaaatttttcaccgacatctgggacaacggtggccgggagatggcccaagaaattatacgaaaaagcgaaaaaggcattcatgacgctagaaaagtagcaaaggccgctgagaaaagtgcagagcccgaacgagactagcgtattgactagtggttcttggctctttgttgtaattttttgatttcgaacttgttcacggtttgtaatagtaatatagtcgtatcttctcctccctcagaacctgccgagccaactgcggacccccacgcgaagggggatgatgaaattaggaaaatggctgaagcatcatggataaggttgttgatcagctactaaacgaagctgcagaagtagttctaagggaagattanatgctattgtagaaacatttagaatataatgcttgctgagaacatgtgtaatatttgtagcttgagtatatat

SEQ ID NO: 22554 - DNA, 557 bp, Arabidopsis thaliana landsberg
caatgcaccttgaggatattcttgtttttgggatttaattcattcttgaccgtaatcgtagatttttttccttatacatcactaatcatgcaaagcccaacaacaaatagaatgattgagaggtttttcatttcttggtatttgtctttgaattttttgctatatttatttgtaggtaattaaactagttagttttatgtttgaagtgttatatacacacatacttgtatttctattattgtaaatattctattaataattgaggtaacaaactcaatacaaaaataatgattgatagttgacaaatgatctgtgtattgaatttttttgtactaattagttacagatttaagtctttttgctaaaaataaacatgttattgtttatacttacttacgcatacgttatagtattttctagttaatgctttgaaaaaacaagctattttttttatttagccaaagtgatattttcacattttcaatataagaaatatatgtctatatgtttcgtttagttaatcttacataaaatggttatttctttgttggattgat

SEQ ID NO: 22555 - DNA, 455 bp, Arabidopsis thaliana landsberg
  unsure (1)..(455): unsure at all n locations
catgagatgaagaccttcgagcggattatggagtccaatctgctcacggcgaggtagttcaattgaacgggtcagagagcttcacgggttgctagagaagatgtgggtgcaaggaattggatgaagactcactggttagctnnnnnnnnnnnnnnnnnnnnnnnnnnnnnnnnnnnnnnnnnnnnnnnnnnnnnnnnnnngaagtcctgccgggtccgagggcttggaaagcttcatgggccactggcggacgtagccgaagcactggctcgacttgggggtggctggagtgggttggccacggtggccgaagctctggcggcaatggcaggtggaaatgagctcgccggagctgaggggtggctggccggtgctggtgagcgcggggtgaagtgaggcgcgcccggggaggctttataggcgcgggcgagcacggccgagggcagggctctgac

SEQ ID NO: 22556 - DNA, 563 bp, Arabidopsis thaliana landsberg
  unsure (1)..(563): unsure at all n locations
ccatcccacacgtcattcctcgttgcacagtgcgaatggacagcataatgacatcccttaatacaagaatattgcccatagttaacgtcgacggttttgcgacaaactccgcaagagaagtcaccaggttcaagggacaaagtgaaagagagtcgatgtgtgtgtcgggtgatctgaatgacacgaggtagatagatacattttatgtgaactgtggctgcaagggagacacgtgtaaaggagagtgctgcgtgtgcttagagacaagccacaagcatcacatgacatagggagacgtgtacagaagagggtgagcgtgtgctcatgacttttcatgtgtgagatagtgagaagtggtagcatcatcgagcacggcaagttgagattgaacttgcagatagaacaatgataatatgtcttgtccaaaggtttgttacaacatcggcagctcctgtnnnnnnnnnnnnnnnnnnnnnnnnnncattaacatcagcatcatcatcccatcaatatcaacgctgccatcaccatcaccatcaccatcaccatcaccatcaccatca

SEQ ID NO: 22557 - DNA, 600 bp, Arabidopsis thaliana landsberg
aattgttaattatggaccttgatgtgtgtgactctgaataaaaaataaaatagacagaaattttaaaacatattttcttatagaacttcattaaattttcaatggtttacaaagagagaatacaacttgcatcaaatagtgaaactttttatcttacttgggaagcaaccatagaacctatgtatcatcatcatcatcatctaaaagacacagagcattgaatttgttggggctctcaagcttacaaagatcttgttgcgggtaattaaaaacggtcttcctgagagaattttgattttgcagcatatgttgtcttcataatattaaactcaagatcctctacatggtctacaaaggcgtaaattctgtgtacggcatacaatccccggtgtagtcctttgacttcaacagttaagagagtatttttgtcggggttaaagtataaaacataaaatggcttaagtgtttgagtcttcttcaccaaaacaatttcacctgaagcagtcaccccaacaacggagagattatatttaacctgatcgactttattatcatccctcaaagtgtagacatatgtcgaccattcttcttttccgacat

SEQ ID NO: 22558 - DNA, 524 bp, Arabidopsis thaliana landsberg
  unsure (1)..(524): unsure at all n locations
tccctcgaggcatgctcctagggttcatcgtctccgaacgaggcatcaaggccaacccggagaaaatcgcagccatcaccaacatgggaactatcaaagatttaaaaagagtacaaagggtcatgggatgccttgcggctctgagcccgttcatcttgcgccttgcgagaaaggattgcccttgtaccgcctcttaaggaaggccgagcacttcacttggattcctgaggccaaagaagccctcggaaacttaaaggcactccttactaatgcgcccatcttggtgccccccgctgcgggagaagccctcttgatttacgtagccgcaaccactcaggtggtcagcgccgcagtcatagtcgagagacgagaagaagggcnnnnnnnnnnnnnnnnnnnnnnnnnnnnnnnnnnnnnnnnnnnnnnnnnnnnnnnnnngatccgctacccacaaatccagaagctactgtacgcagtaattctaacacggcgaaagttgcgacactacttcgagtctcataagg

SEQ ID NO: 22559 - DNA, 540 bp, Arabidopsis thaliana landsberg
aagtcaagaggtaaccttaagaagcttcatctcctcctttgttgggcaaaaccttataagattctttattttatcaacatctagtacagactcatccattgctaaaactgcagcctaaatgatgcacagaataatgtgaataaattatcattatactataaaacattaaccatgtaatgacttgttcgctagtaaagtaggttttggagcttaccatcatatcaggcagcggcatctctactttctgaagcataatcccagtgttaaaggctctcctctggtcgatctacaaaccagtagaaaaaccttccatcaaacagattgaaatatatatattattatctttacgtcaatcacttgttgtaactacataagagtatctccaatggaagtatcttgttaagataccataagaagtactaaccaatgtggatgctctaatatttaagttgttgagccagctattatgaaccacatgcttcatttccgtttcgttagcggctttctttttatccaagtcagctttcttgacattctctt

SEQ ID NO: 22560 - DNA, 274 bp, Arabidopsis thaliana landsberg
tacatgctcattcatctgcacttggttacatatgaatttatctcactcaaaaaagtagatatgatttacttaaaaatgatactttcaataatgtcaagggttgacaaacataccgtagtataagcggctaccatcgcatccctgttgattactgtacatatacaccccaccacgagcatgagtagcccccataaaagcattcagacgaatatctagtttcctaagttggtgatgactcccacttgcattcataaatacttcaacaccattcaat

SEQ ID NO: 22561 - DNA, 655 bp, Arabidopsis thaliana landsberg
gctacaatgatcttttgtcgacttgggttcttaaacttagatcacgaagagcctcctgagcatgatgacgagtgagcatctttgcacctcacagacaaaagaacctgtccaatagcaactctagcacaagtaccaagagctttgccaaaagcacctctcataccagtctgaagtctatcagctccagcacaagaaagcatcttattgatcctaagaacatggaaaggatgaactctaatacggagatgaaacgcatctttcccggcagacttcaccatgtacttgttacaagcaatacgagcagcttcaagagcttcacttgaaacattctctttctcccatgaaaccaaatgaacacagtaagggaactcatcaactcctttcctcttcataccaacatcgtaaatcctgatttaggatcgggaacacacgacagtatcttgatttagggtatggctttcccttaattgacggtaacatcttgcaggtcctacacatttgaatacatttatacattttcaataacaagttgaatcctttctgatacgcaattcaaacaaaagactaatccaaatgtaaaattccgagcttaagcaatctataatgcgacttgagtgattagaaaaatccatttttgacactgaccctacaaaac

SEQ ID NO: 22562 - DNA, 1544 bp, Arabidopsis thaliana landsberg
ctttcgagttctagattcaatatttattacagaaatatttatttttaatatacgatatagttccagattttaatttttgggtacataagaaagaatactagattctaacgaaattaaccacttgcactgaaagatccgagcataatgtgtgttactatataagaggtattttcttttttaatcttaagctaaatatatcaatttttcatcagattcgaaatacctaagaactcgatccctaaggaagcagcataccaaatcatcaacgacgagctcaagtttgacggtaacccgaggctaaacctggcctcctttgtgaccacttggatggagccagaatgtgacaagctcatgatggaatccatcaacaagaacaacgttgagatggaccaataccctgttaccaccgaccttcagaatcgatgcgttaacatgattgcgcgtctcttcaacgcgcctttaggtgacggtgaagccgccattggtgttggcacggtggggtcatcggaggcagtgatgttggccggactggcctttaagagacaatggcagaacaagcgtaaggcccaagggcttccttatgataagcccaatatcgtaaccggtgctaatgtccaggtaaaccaaaacaaaaattgatgaaatattaaccaagacaaaattgaatttatcaatccggttaagttatatgtgtgactcaatttccggttcaatacaggtttgctgggagaaattcgcaaggtatttcgaagtggagcttaaggaagtgaacctaagagaagactattacgtgatggaccctgtaaaggcggtcgaaatggtagacgaaaacacaatttgtgtcgctgccatcctcggttcaacgttaaccggtgaattcgaagacgttaagctcctcaacgacctccttgtcgagaaaaacaagcaaaccgggtaattaaaccaaaccgagaaacaagctaatatcgattgtaaccggtttggagtccggttttaacgttctaaaacacaatttgtagatgggacacgccaatacacgtggacgcagcgagtggtgggtttattgctccgttcttgtatccggacctggagtgggatttccggctaccgttggttaagagcataaatgtgagcggtcacaaatacggtttggtttacgccggtatcggttgggttgtatggagaaccaaaaccgatttgcctgatgaacttatcttccatatcaattatcttggcgctgatcaaccaacctttacactcaacttctccaaaggtacattaccataagtccataacataaataactttcaatagtatttctggtacatggaattgttttatagactaaacatttgataatgcttgtataaaccaggttcaagtcaagtgattgctcagtactaccagctgattcgtcttggattcgaggtaaataataactcaaaatagcaatatatttaccaaatggtcaataaagaaactaaaatgtattatatttaagttgttacttgttactatactttgaattaaacgttcctaacctg

SEQ ID NO: 22563 - DNA, 520 bp, Arabidopsis thaliana landsberg
ttaatcggaccgctcccattgagtcggaccgccatcgccgagtcgcgtatttttcgcatgccctgtaggcactatccgtctgcagtggtcatcgagtcacaattgcgcctgttgccacgttgcatggacttatcgtgtaccccgattactgagccataattgtgcatgttgcgcttattacgaaggcttgctatactgtcgtagccttgatgtccgcacacgagttgacgccagatacgctagagcttatactcgcgtggattgtggtgggtcgtttaagcccttgaagtcacattatgcataactgaaagggaaatgtgcctttgggccatttctaagtattttggtgattgagtgcaaacacaagtgcttaaatgtgaatctatgcccatggatgaacaaagtgcaaatcacaagtaaaggtatgtttctaaagccttagtacattgattttgtgtactaatatacttgtctaagtgttagaaacaggagaaaacgaataagaggagagttggctgtg

SEQ ID NO: 22564 - DNA, 3015 bp, Arabidopsis thaliana landsberg
ttgcagttgcgaggtgtttaatatccaaaagtatccatttattcacgcgttagccgctttcattgcattcgaaagcgatacaacaaggactcgaggtatggaattacatgaattggtttcaaagtattattgggcggaattgtgggtattggcgtattataggactatttatttagtcccggatagatcacagtgggatatcccggatgacatcaaagcgttgaaggtattacctatgcctcgaaaaatgaataagggtagaacaaaagtgcttaggtttccatccaccggagaaagacgtcccaaacgtcaaaggactgaaaacaaaaggaggccgaggaagccgctgcaatggttgttatttggcacccgtagtatttgattttaatcatgtaaaccttattcgcgttgtgtgcaactatgtaacactacactttcgttctgtaaaactatattttatttcactcggaattcaagtttaacgataatactaagaaaacaggtgaaaactatgatttgacgataatactgggaatacaagaaaaactatgaatgatatgaaaattcgaatttatgtttgtttgaaacatcaaatattaaatagactgtaaagagataaagaactcttaaaaattaatttaaacgaattaaataaagaggaaaaatatttgttgaaaatacatgttaatagactctatcctacatattccttgtacttttaagctcacttttgatataaactccaacttaggattgaaattttgcaattttatatattgttaacatgtgagtgcactaaacatttagaatttaatagtgatagacttctctcaactgaacaactagataaatcattttgaatgatatgtaaaactgtttaaactataaaacaagaaaatacaactacgtggacattttgtacaaccaataattagggtacaactgcatataaaaaaacggcgcacgtgtataaattacggcgcacacgtggaaatcaccttatttttcaaaaaaattaatttctctccaatttcaatttccccccaaatccattaaaatttcccaccaaaaccaaattccccccaaaaccaaacaaatatctcttctctctctcactcaaaattcattctctctcttcaaatcattgtctctctccgtctcaaaatcattctctctctcgatctcaaaatcatttctccattctctctctctctcaaaattccttctctctcaataagctatggatcgattgtgtgagagtgacccatgctatggtgagatgaagagcgcaaagaggataatgcaacaactagaagaagtggcaatgatggagggaattccgccaatttgtccttgtggtggacgcatccttgacataatctctgagaaagatggtgacaaaggaaaaagattctatgaatgcaccaattataaggtaaattgaagatatcatcaatcttgttttagaataattcattaagcttgttagaattcatattttgtagaatgatgggttacacattcgaaaactttgggataaagctatggtagaagaggtgaataggttaagagagcaagttgataaccatcaccaaaagattcaaagcttggagtactataaccaacaaatgcgttcggagttggatgaaatccagaaaaagatggggactttgtggaggatttgttgtggagagtgaggaattgattggtttgtgtgaacttaatttctgcctttgttttgtaagacttttattgagtattctctagtactcccagtattatggttatctagttttcccttgtattctctgtattatcgtcaattcttagttttcccttgtattctcagtattccattgtattcacagttttctcttgtattctcggtattatcctcaaatcatagttttcccttgtattctctgtattatcgttaagtcttaagtttcccttgtattctttgtattttcgataaatcctaacatataaaattccaattcatatccaaattgaaatccaaaaaatggcataccaaattcaaatctccacaaggcaaattgaaatcctaaaaccaaacattccaaattcaaatcctaaaaccaattcatatccaaattgaaatcctaaaacaagaatactaaattctaatcctaaaaccaaacattccaaattcaaatcctaaaaccaaacattccaaattcaaatcctaacaagtacaaccaagttcaaatcctaacaagaacaaccaaattcaattcttggttctccgagtgatccttcttgtgacgtttgcttccacgggttttagaaggacctccatccttctctttcaggtccttctctttctctttctcttttgggtccttctctttctcttgatccttctctttcgggacatcatctttcgggtccttctgcttctctttcgggacaccatcctcctcttgatcaccatctttctcttgaacaacatcctcctcttgatccttctctctcgaatcaccagcctcctcttggttcatctcatcttgattctacgattgaacgaagttatatcagtattacgcaattatactctagttatcatagtgttacttagtattacgcaattatcaatatgtaccttttcctcctttgctttctgctcatccttgaatgcttccaacgattcaactcttctatccaaatcagaaatcattattataattttattcatctggtctaccatcttcttatccaagttttcaatcatctgaaccacagaaaccaaactcgggagttcttgtccacgcactgcgggaatatcctccgcacccggaatctttggacctgcgatgatctgcagggcttgaatatcctgctggtagagctcatcaaacctaattagacggccctctttacgacgcttctcccaactttcaaccaccatatcagacacgtaaacgtcgtcttcttcttcagtgattgctttcatgagtttttgctcctcaattccaagtgaacgataaaaggaat

SEQ ID NO: 22565 - DNA, 540 bp, Arabidopsis thaliana landsberg
taatttatttgttattgggatccatggggatccccaccaaatccatatggattgagagcaaaaacaaactggtcctaaaggcgtcttcctagaacatgtaacaccccgtccactcccggaccgacggtacttactcccgacggctctctatgatcatagaccatctcataaaccaacatgagtcttttgtgatcactttatcctcactcatgcgcacccgaaaaaacttgtcaatcggtcacccattctaaaattgctctagaccaagcacgtttaacctataggttttttcgagacagactttcgaaaaagaagatacaccttatttgtatgagtactctattaattattttattaagcgtgggctaggatataaccatccaccaggaagggccaggatatcacatgtatacgatagattgttggttctacaatatatgcaaaggatactaatgttattagacaaagttaccccccataactctatatgttatgattgggctgcccgtttatttgggcatttggaatatcttacaatca

SEQ ID NO: 22566 - DNA, 574 bp, Arabidopsis thaliana landsberg
gtctgacacgagaatttttgtttctagcattcttgttcatggacatgaacatcctatgctatcacttgatgtattcttataaccgttaattcatgagttacaaatattgtggtccgagggtgtagttgcatatgatgtttctctaaggaacaatttcgtgatgtgtgctgctctgatgtggacgattagtgattttccagcatataaaatgttatctaggtggacaacgcatggaaggctatcatgtccctactgttaggatactacagatgaatttcagcttaagcatgaaaacaaatcttgttggtttgattgtcatcgattggtcttaccaaagaatcatccatataggcgaagtaggaatgtgttcagaaaaagcaaaatggtgagtgatgactcgcctccgatgttatcaatagtgtcctgactcgccttcctgatatatgcgagcgtcctgagctatatgttatggacaatggaaaaagtccaattccaatcttcaaattagatgcaaagggaaaaagcactatttgattggataatcatagtgttaatttcttgaatgttatgcatt

SEQ ID NO: 22567 - DNA, 2609 bp, Arabidopsis thaliana landsberg
tttgcatagctgcgttttgtttgatttcagtccaccgtacgtttaccacgatcgagtcacccactacggtcataactaatactataatttgataagtgtaataagaagacaaatgataaaaaaaaaagaagaagacaaatttgctaagatgacagtttgtaatccatatcttatcacatctacaagagagatatatacaactctttttcttaagagatgattaatgcgttaaacaagtttaaccagttatcaaaaatatgtaaatcttttctccagaggtttaaagacaacgtcacggtaattgtttcgtcgaaagactattttaaactgtacggttcatggtcactttttgtgtatttacataaagataaaaaaatattaaattttatattcagaattaggcctgggtacgaaacagatatccggaaaaattgtgatatttgttattcgattcgttttaaacgaatacttaattttgtgattcgctttgcttcgaaaatttccggatatccggaatttcgaatatccggaattttttgtgatatttgcggatatccgctttaatacatttaaatattaaaaaatatgtatactatataactatatcatatattcaaaaaatttatttaacatgcttttaaaataagttctaaataccaaacataaccgttgttggtatcaccggtcaacaaaatgttatcaaactaattccaaaaactaaaacccgatagttttttgatgccattgatcaaaacataacataaaaaaaatgatcaaacaaacatcttaacataaaaacataggcaacaatacacaaactatttatgatatctatatatagatataactatattttctaatatatataaaaagatacggatcgaagcggatattcgattttttaaaaaacaatatttgttatttgattcgatttttacgattactacattttcctatttgatttggtccaaaatcttacggatattcagattttttgaatcaaatcaaatcgaagcggatcgaacgaatattttgtccatctctattagatagatattgtattccacttctacgataatgggtttctcatgggctgcgttcataatgtgttagatcgaacactatggttactacttactggttagaccatccttaatggttgggaatagttgttgaaataacaacaagacaaatggttagaccatgtacataggagaatttttgtgggtatcataagcctaaaaatattaaattaatagataaaacaacagatttggatttgagaagtatcactggagtgatatttctgataccagtctctaatgatgtggcggcttgtaattagtcggaaaaacacgtttttgtggaaaatgagagaaaaaaaaaattatttgctctcgactatcgctctaatagccgatgctagcatgtaatttcgattttacaaataaattttgttttttaataatactaatactggtcttaccactggaaacagattattataagtatcataaaaaatctcaaacaataaacaaacattaaaattaataataaaaaattgttgatgatactctatgaataccaactatgtgcatgctcttaagcccaatagagacaattacaaacgagttctttgaaatctgggcacaactggttttggacctttggtttgtaagtacataactttttctcaaggacaaaatccaaatcataattaacttgccgataaaaacaataatgacaaaatcttcaaagtttgaacatatacattgaaagaaagaatctacaagaagatagacataaatcttctaaaaatggtaaatggtaataggaaatttgacaaattaaaattcggatatatctataaaatttttcttgtattatataatgaataaactaaacactcaacaacgttatctatttgtcaacaatcaacatcacacaaaagtttttggagtgttgtcctataagaaaagcttttggagcaaagtaaaggtacacaccatcaccatcaattgttggaactgaagaaaccagtcactttggaactagattttacggtcagaatttcacatctccatgtaatttatatgttcttttcgctatttctgcaccacggatgtatttttctgttgagatctactaattgaggttttgaacttttggatcggtcaggtatttggtgcagattgagctttttgtttgatatatttacgatctttcaatcgtcgtcgtctcctgcaatttccgttggtgagtcctatttctcttaagtgtttttttccttctttctagtatgtagttcttcagcatctatacattattttggaaaacattttagaaaacaaaacaacacttattagtgctttaatgcttgcttttgcgttcatcaatgatcccattgtttcttatcgcaccaatcgtcttattcaatatatggagctgctagttgaattgaggtctaatatttaatatatttgtgtgtctataggtttaatagattttagtttaggctggtagttgcaacttcaaattatcgttatacgcgcgaatcaaatattgttattatatgtcatcaccgttatgttaaagtatatcgacttgag

SEQ ID NO: 22568 - DNA, 611 bp, Arabidopsis thaliana landsberg
caaaccaaaccgggagcataccaaaccagcacaaggcatagggttaattaataaagcgattgataaggagcattttggaggactcttgcccaattggagtctcaatcaagcacaaggcgtagggttaattattcaccagcaaattaattctaagaagattaatgatgattcaagaagggtcaaagaccagcgagccgagtcaccatattgtggggatatgaccgttgcactctttttcccttatctagggtttgtcccaatgggtttacctagaaaggtttttaacgaggcaacatcaagtcatcaaggaatcatttaccaagcaaatgattcgaagatatcaaaagtacatatatttgatgaacttgctaacagaccggctgaactacttactgaactaccttctgaagtaccgcacgaaatgaagccaaaaaaggaaatcttccttattctacacttggacgcacctcaaagctacatatggaaaccaggagaacatctagaccacacaagacttataccacacgaactttggtacatcttaccacacaagaacccgctgagctactacttgccatatatggagccgaaggagatcgattaccaacaac

SEQ ID NO: 22569 - DNA, 334 bp, Arabidopsis thaliana landsberg
  unsure (1)..(334): unsure at all n locations
cgcctttcttgctcttnnnnnnnnnnnnnnnnnnggaaagtgaagaaagtaagcaacaagcagcagtaagtgttgtgaagatgccggagaagcaaacacactatttatagaagaagaaggcaaccgctcacctcctaccacggctactgaacagtcgcaaaaattcaatatgcaattcaaaccgtctggaaacacgtcaggcggctggagcgttccacgtaacacgacacccattgggactccagtcaactgcttgggcgatatgattacacctgcgatcacatcaagttactactcagaagtagtttgttaaacgctcagcgcaccaagccgt

SEQ ID NO: 22570 - DNA, 592 bp, Arabidopsis thaliana landsberg
caaagttactttccatttccgatgcggcatagacaattctcaatcgccattgttttcatgattactattaattaataaaagtcaaggccataacttacccaaagttgggttgtaccctcctaggccaatttttttttcatggacatagttatatgtgactctttcaagggtgacgtttagagatggtttgaaaatcctattaacaaataaagatggaaaacatcagacaactactgtaaatgttgtttatatagagaaattttcccaaaatttctgttaatttacgtattttcttttattgtgtattagagaagggtttttatttattcttgatgtattgctgtggattttatacattcatcgtgttgaggtactagatatgttaccaattcaatttaatatgttcttgaatcaaaaattattatttatttatttttttgaaaaaatgtaaaattatattcaacaaaaaaagacgttttttacaatgaatgcatcatgagtttagagaattcaaaattgtcgaagagattgaaaaagagaacttcctagcatcgggtatgaaaccaatactgcaacccaccatggagtcttg

SEQ ID NO: 22571 - DNA, 385 bp, Arabidopsis thaliana landsberg
  unsure (1)..(385): unsure at all n locations
caaaacactccgcggcgcaaaagacttcgtttggggactagagcaggcgacgaccttcgcctcactaaaacagtacctgatggaattggccgttctaacgagcctcgactcttcgctaccactgttgctttacgtgcggcttcgcgcngagntcatgtgcggcactggttcaggagcagaaggcagagggcgtgatcaggcagtgcccagtatattatgtctccgaggtgctcacaccgtcaaagtgtaacatgatggagctcgaaaagattgcatatgcagttgtcatgtcttcgcgcaaattgcaccactattttgaagcattcaaggtccgcgtcacctcagataggggactcggcgaattattcagaaacccggaggcatc

SEQ ID NO: 22572 - DNA, 630 bp, Arabidopsis thaliana landsberg
gggtggatcccctacctggcgcgccactgtgcggtgtctagcgtccgatcgcacacccagggataccctcgatggtgattttgggtaggatggtgttgctaatcgtagctcgatggtccatgccaggagcacgagagagagatatatgtagtaagagagagacaggtgagtttctgcaggttctggccgcgttgagaggcgtaataccctacttcctggggtggctctggatgcgtggagtgttacaagtggcatctcctgaatacagaggtgttaatgggatgagaatgatggggtcccctaggccttatatacacgaccgtgggacactccctacgcacacgatgatcacattcttccagcatatggcttaattaatagcgaactaacctagcctatcttaaggaaatacttgatcatttcatcccgacctatctccagccttcgagagcaccagacgcgggaaagacggacggttcacttaagattaggcataatctatggacgatctaggcgcgacgcattgctttcttaggtcggccatttcattgtagtcgtgctgggcctacgacgatcgacatcgttgggtgactggttatgggccatgcaagggttttcacttctagtgga

SEQ ID NO: 22573 - DNA, 605 bp, Arabidopsis thaliana landsberg
tagttaaatacatatttcagcaaaactatcaaatatactatgttttgatttttaacatgattaggaaatcatctctggatttcagattcagttttttgaaaatgtataaattacgatttaaattggttcaaaaattcttcactaaatgaaaatatattactccctttctttcaattttatttgtacttaaaggttttccacacatatataaaaaccacaaactcatttaatttttagctcttttatataaacataattaactaaaactaattcaaccaataaaaatatgatgtaaaatataattggttaaaaactattattataaatacatttaatttttgtatagaaaattaaaaacaacactagttttgtaaaatatttttcttaaactacaaataaattgaaacagaggaagtattaatctttgcacaaggactagagctagatatacaaattatctttatttactttatgtttaaatggtttttactagaccaagacttttagcatattcaaatatttttaggaaaagggatactagattgtttcaactacgttcgtgtctcaccacccaattgaaagatgtagtattatgtctgatagag

SEQ ID NO: 22574 - DNA, 1006 bp, Arabidopsis thaliana landsberg
  unsure (1)..(1006): unsure at all n locations
tgttttagactaaattcaagaaacatttcaaagtgccttaccaagagtggttacacacgattgaagtaatgtgcaacgaaattctcggcaattactctaagaaagaagatcaactaatgactgcagccttcggctctcgcccgaagtgaaggttaaaccgagtaatggatgctctggactttgagtaccccgactacgagcgactagacaaggatgccgaaggcagaagagaaagagagtgtccagtgttctgaataaagaagctactaaatcgatgaaagacgatgaagaaaaattgaaaaagaaaaaactgaagcttgagccgaagacagatgcttcgatgaagagaaaagctatagctccgaagcagaaggcaattgatgtaggagaagaaactgctgcaacaccttctgccaccgacgtggaggaaattttaaaggtaatgactgaatccctgcctgcgaacgaagtccattagggcctcaactgacaaagttttttcagaaggaaaaggagcccgaaaaaatgaagaaaacaactaaagtaaagagacagaggatcatcggtgtgacagaggtaattgacaagacaccgccaagagcttcagcttagaaaacaacagcggctgcggaagggacagatattgaaattacaccttcggaggtcgcggctgccgaagctgcctcagctgaagatttgaacctggagagcacaatcgaacacattgacaaaatactgctagacatggctgcagaagaagctaccaccgcccgccgaagaaagcggcgacggaaccttcgggaaaagggagggtaatgcctgatgacgcttcagaaaacgaagccttcatgttccagaatttagttggagaaaaactgtcaaaagctgaaatagaagagcttagagagtatgccaaatcgtgcggatacaaacctggagcactcctcttcggaggcattgatgatganaaattagattgtattcgagatcaaactggagccaaagt

SEQ ID NO: 22575 - DNA, 1022 bp, Arabidopsis thaliana landsberg
tctttcccaagtgtttctttaaggtatcaaacgacagaaacgcaagatagtcactcccgatgaactcgttaatctcctcaacactcaatctgttggatatcaactcctctgagctaggcgtatcaacaccatagtaacaagaagctactataggaggactagcaatcctcatatgaacctctttcgcaccagcttctctcaataaacgcacaatcttagacgaagttgtgcctctaacaatcgaatcatccaccacaacaactctcttcccttctaaaacaccacgaacaggagacaacttaagcttcacaccaaagtctctaatcttctgtgacggctcaatgaacgtcctccctacataatgagacctaatcaacccctgttgaaacggcacaccggatttcgcagcgtacccgagagcagccacaacaccagagtcaggcacagcgatgacaacatcgcactcaacaggcgactcagttgccaaaatctcaccaaacacatgcctagattcatacacggaccgaccaaacacaatcgagttaggcaacgagaagtagatatgttcgaaaatacattgcttaggctcaaacttgggcatccgacaccgagacttgacaccatccttatccacaaccaaaacctcaccaggataaacctctctctcataagtagcttcaatcaaatcaagagcacaagtctccgaagcgaaaacaacagctccattacttctcctacccataactaagggtctaaacccataaggatcacgaacagcaacaagcttatcctcagtaacaaacaccattgaataagcaccttgaagtttctcacaagcatcaataatcctcataaaaaaaggtctagctttagaaatagcaatcaaatgaagcacaacctcagtatcagagctagtattgaagatagaaccgttctcttcaagcatagctctcaaagttttgtaatttactaaattaccattgggggcaacaccgatggaacccgaatcgattaacccggcg

SEQ ID NO: 22576 - DNA, 770 bp, Arabidopsis thaliana landsberg
atttgacttgttctaatggagtaataataattcacaaaaacaaacaaaagctaaataataatgatcgcaaaactatgcgggatgtaacgagcccattaatttaaattgggctaacataaggcccacttttaataaatagaaactagaaataagtaaagttatgttaactaaaaaaaaggaaattcggcgttatagaaaaaggaaatcagccagctggcaccgttttagatagtgtctataaaaacgggaaagcttatcagaaagcgtcataattttcttagaattttgttctgccttcttgattctttgtttggcatatttctctcgatcgctttatcatgacggaagacgatttggagcgacaaatccattgtaagtaatcttccaattctcttgatttctagtgtttctaaatttaaatatcatcaactctttctctgtttcccatgtttctgtcgatcgaaacatttatggccgaagaagatttgtagcgataaccactgtaagaattcttctaatccacttgatttctagggtttctaaattttgctattatcatgtttttgtttggttctcttttcgttttgcaaaaccaaacgaatcgcgactctgcgtttcaaagtttctgtgaattaaagattgttgctttcttcctttttgtgttaggttttggttttcgttttgttttttttgtaccgctttattgttgcgatcggttgtggttttgttgctcttgttttgctgttttgtttgatttgatttcttcgtta

SEQ ID NO: 22577 - DNA, 1597 bp, Arabidopsis thaliana landsberg
taactgtaaatgacagtaaagaaaaaactattcatttttgaaaaatgatacatttttgggcttctaaatgaaaagaattactggaagtacaaacaattgaataaactttcaattgaataattaaattccaaacgactatcttgatttcacaaacataatttgatttttggggtttaccgagttattttcactctgttggtctaaaccttggcataccttatgttctttggataccagaaaccatctatgcaatttaaagagcaaatgtatcaatctgaggatccaagcaccttcaagatgatagggtacatgcaatgtgactcacacgctctgcaaaatggacgagacatactattattgcgcaccacctcatatgatatgtgggaatacgttaatgtacttcctggcatgagccttgcaaagtctcccatcacgcactttgtatgcaaactagctcggtgatctttacacgtgtagaaccatgtactcggattcgtttctttctcacaaatgtcacaccagtatttgccacttgccttttctccatagcatagtgagagaggatgagcgtctactctatgctttaccacttgtggtagcctagcacaatcgaagcataagaaatatccacaaccactttcaatgcacgtaagcacaagagatgaccaattgtcgcaaccattgcattgtttttcttcctctggtggaatgtaatataagggatgatgggggtggcttggatggacaaacggttcagaaattgaaccgcacagtacatctaacttcatatccccacactggtacatgaaaccgttggagagtctatcacacgcagtgcagtgaaagtaatcatccttgcttgtaactaaagtaagacgttcattatgtagaaaatgccatttctttctaggagattcagcgcagttttggtgaagaatgaaatcacaaacaacacagccatagaaagattggagaccaatgggctgggtgcaagcattgcaacgcttgttttcctcccaaagaagaccattaacatcgaatcttaggtaatgctctttgtggctgaaatgttgtattgtgttttcatctatcaccacatatggctctatatcttctatctcttcaagcactccttcgagctcttttccgttccacacatcctctctagtagcacatctcgaatgaactacatagtgaggacaccgctgacaagaatacccgccccaagtccaatccaccttccggcgacaaactccacataccgaattcacaacaccaagaacggaagtgcgagaaacacggtgatcatgccgattgatgtttatgaggcgtggaaggtcaagacactcttgatgtatgatgaaatcacattgcacacatatgtaagggtttctgtctccactcaacccgcaagcattacatgtaaaagaatcaagtcttgggcgaaaggtgagttcgtgagcatgaactttcaaatccataacatattgtgatggtgggtttaaaagacaacacatatccaagctgaagttacaggcagaacaatgataaaacaatctatcacaaatcttttgtgcgcaaagacgacatttaccat

SEQ ID NO: 22578 - DNA, 1240 bp, Arabidopsis thaliana landsberg
  unsure (1)..(1240): unsure at all n locations
aaaatactattgtatttttcaaccagtaataaaggaatgaagcacggaattaaggaattctgtttagaaagatgagaagatagatatatgatgagtgtgatatgagatttatgttagaaaaataaattgatatgttagtcattggacaattataccttctcatctagcaggaggagtgttttcaaggaatacatgacggtcgttggcagaacgtatttcagtatgaacttcccacattctaacaatacggccaattctgttatcacaacattcgaatttttctaatacatgttgagaaaaaatattatgaaaacattatggtaaannggggtaaaaatttatcccaaaaatgtactcatcatattctctacccaaatgcctaaaaaaataaaagaggatatattaaattaaaaaatattgaaagagtgatggttgaagttctgacttatgataggttcatatgttgaattaattactaattatgtattacttattttaagaagtgtaggtggcaacctctcctttcatgagctgatgtgtaatgtcgcgggagagagttgagctcctgtcatatatatgatttctcacacttttgagaaataatgtcttaatataaatttaaatagatcgaatacttaattatatagtctaagtataaataacaagttactaaaatatgaatgtattgttcaaaatcttaatttaaaacttgtcttgaaatttactacttcacgacaatttatggtggccaatggcataataccaacctcgtgtttttacatgtgtcattttcctattagtccaacatcaattttcaacttggtatccaaataaataatacactaaagcactttatactaaaactaattgacaaaagaaaagcactttatacttaaaactaaattttcagcgacctctgtttgtcgtatgaaaattaaaagtttgattagacacaaatttggaagtgattgcccgcgaatcattttctctgtggctaacttacacacgtatagagacgtacagttcagacgagtggctcaaatgattaaaacaataaatcagaaagagaacattttattataattataattttaactaatacttaattttttaagtttaaataaaccatatttgcatcgctatttcttatctatttttttttgtgaaaccaaaatagcaacaaaatgtgtgttatatgtaaaaacccaaacccatcggtttcaatccaacttacttgatt

SEQ ID NO: 22579 - DNA, 561 bp, Arabidopsis thaliana landsberg
aggtattgaaatttgaaggtacctgtgggagtttatcaatgaatttagccgcattagcgagctcaatcgcagttcgaatctcttgatcagtcgcgtcttctttcccataagcaatgttctcctttatcgtggtcgcaaacaagacaggttcttggctaaccaaaccgattttgcttcttatccatttgagctgaagtttcttcaaatcaatgttgtctatcaatacttgtcctgactccggatcatagaacctttcgattagactgataaccgtcgattttccgcttccgctctgtcccaccaaagccaccgtcttgccatttggtacaaagagtgagaatccagcaaagatttgaacatcaggcctagccggatacctaaagtaaacatctttaagctcaatgtctcctctaatatcctcaagaacagaaccgctcatatcgtaagcatcaatctttggactctcttgaatcgtttcgaacattttgaaagcggcagctcttccagcagcgaaagcattcaaacttggcgatgtttgccctaacgacctgacagacaatg

SEQ ID NO: 22580 - DNA, 485 bp, Arabidopsis thaliana landsberg
aagttctgtttaatcgatcctctacttgctacgacaagcaaggaaatgaaactaagaaggagtactgttcttttacactggattatttatctctttccgccaacaacaagttaactgcagtaggctgtaacgctttatcacttctggacacttttggaatgcaaaactactcaactgcatgcttgtcattatgcgattctcccccagaggctgatggagaatgtaatggtagaggttgctgcagagtcgacgtttctgccccgttggatagctatacattcgaaactacatcagatcgcatcaagcacatgacttcttttcacgactttagtccttgcacctacgcttttctcgttgaagatgataagttcaacttcagttcttcagaagatcttctgaatctgcgaaatgtcatgaggttccctgtgttactagattggtctgttggaaatcagacatgcgagcaagttggaagcacaagcata

SEQ ID NO: 22581 - DNA, 834 bp, Arabidopsis thaliana landsberg
agcatgacgtccactgcatattttcatagttgttgaaataaatttatcagacgatggtacatagttttagacttatagttatctaaaaccaagaaacataacttaatagaataattacctaagctttccaagaacaatgccagaattttcagattttacgatcccaacatcttctggtgataagatctcatatgtacttcgatttttcaatattccatcctgcaaaatgtttggacaattatacacatacaacgcaacaatctcatatacaattttcataagtaatatatatatggaacctggtgaatgccgctctcatgaacaaaacagttgtctccaactattggcttatgtggttgaacatacatgccggtatgctcttgaacctgcgcaagaatttacgttttagtcaattattatatataaaggccaaatattagcatcattgttttcatataaatatcgaaatttcaatatctagttagttacgtaccatcttgcttgtagccataatttggcgtgagtctatttttgtgtaaacaccatccatcagagattctcctcgacatttcaaagccatcacgacctacatacaatcacagaaccagtcttttcataaagcacatgaagcatgtacgtctagtcaacaatttaaatacgcaatttaggggtcacattacataacttttcggtggctatcgtttgaaatacttaatgtaagggttacgtgaagcattcgatgccaattcctctctttcctgatgtcaattccattggagcctacttctagattgtaatggtgttgtttttttttttaacacataaacgcttcta

SEQ ID NO: 22582 - DNA, 539 bp, Arabidopsis thaliana landsberg
gctgtgagtaatatcattctacaaaaaaaatactcttctaaatcaggttactttgtaactttgtatctcaaaacatttttagtgttgtcaattgtctcagttccataaactaggtagaaattacaaaaggtaagttaattggagaaccattagtactgatcgatacactccagctctttttagttctaagtatatctagataactctttcgtgtatcttactacaagcttttgcagcacagacatctaaagactgttactatacaaaatagagcattagccttacctttacaagcaactgagacggaaaatggttcgtcctttgagcatatagctaaggttgcctcataatctggccggatatcatctaagccatcagtctcaactagcatattctgcattagtttcagaaaattggaaagttatagactttgccagaatatcaacagccatcagagtttttcttcagctgccaccaggagcctaatttggtatctaccctctctcgatacaaaattatagtcataacattagtgctag

SEQ ID NO: 22583 - DNA, 460 bp, Arabidopsis thaliana landsberg
ttgtgtaatgggcggggctaatgatccaagaaataatgtaacaatgaataagtaaaataaagaaccgctaggctttgctagtcttactactattattaaataaggatacttcaatctcgttaagatcgatctcgtagaagttcaatccctttctctcttttagccatctgaaaacaaatcaagtactgcagatttgatttgacggatagaagtatataacgttgtattgataaatgataaacccaaaacaactaggtataatgcgataatttaaataaacgtataaacgacatatgagtttgtgataagtgttggatgagcaaccaaaaataaatcaagatccattaagagatttcatcgtaaagataagtgttttttttttttttgatgcaattttatctcttactatacattacctaattatggcgtcggcttcaactttgtgttgaaactgtaaacc

SEQ ID NO: 22584 - DNA, 664 bp, Arabidopsis thaliana landsberg
gaatcaatccagagacgaagaatgtggtccaacaccccatgaaccttgcccaatcagacctcatttggggttggcataccgaacgcatgggatggtagacgcctggccggaaaatggccgggaccataaggttccaacggcgaccccaaaagtcttgaagagacgtggctaagtatggttcgttgaaatgtggctccaggtcgcatccaagaatgattgtaagcaaagcgttgacgatggttaaaagaacgtcaagcacaaggtatagatgcaatggatagagacatattagaagaattggaggcaacgaacttttatagttatggacgtttaacaacaccccaaaaattgcagctttacaaaagaaaacccatttaggtaaatgattttgagagttaggttttttttgaagcttgatgggcaagcaagtaaagcatatgaatcggaagagattagtgggaagtggtagaagaggacctttgtcgaaggcaaatagaatgagcttaaaattagcaagtatagagaggcaaaacgcagtggtggaagagaaaatcgtaaagacgaaaaacaaaggaagaacaagaaacagaacacagacaggaagaaccgagagtaatcgatgaacacctcttttgatcttcgatggtatatagtaacagtaaga

SEQ ID NO: 22585 - DNA, 674 bp, Arabidopsis thaliana landsberg
atgactctctaatccatagtctcctaatacgccacctcagctatccgagtgatctcttattattgttgatttttttgttttattttaatcatattttctagactaatgaaaaacaattaattgtagtgtaaatttcgaaagtaatatgtttagaaatctcttatttatgtactttagcattattgaataactttttcaagtttaattagctagtatattacaagtacactaagtttcaaaattgaattctctatacccttaaccctatatcctaaagggtttagagctagtttagggtttagggtatagaaatttcaattataaaaccatttagtaatatatttattagttttaaatttatttgtacttagtattattaaataactttatcaagtttgattagataatttattaataaactaagtttcaacattgaactctctataccctaaactctaaaccctaaaccctttagagtttagagtttagggtatagaaagtacaatagtcaaacatattaagaattatcaatttaaactaattatatatatatatatatataatgatctttagatatgattatgtaattatttgattttatttgcttttagtaattaatcaaataaattatttgcaattatttgatttttgtaatatataaatttaattaaatg

SEQ ID NO: 22586 - DNA, 3223 bp, Arabidopsis thaliana landsberg
ggaaacacagtccagatggttgtaccgtagcttcagcagcaggagatgtgtttctgaggttctggaatgtttttggagtgccggagaccgccaaaaaagctgctccaaaagcagtttccgagccattttctcacgtgaatcgtattcgttgaagctgtgaagactgacggacaaggaaacccatgatacagatgcaaaatattcaattttttttttcggattcattcttcatgaattgtagtgacaagaaaagtgcatattgtacaattatatatatgtaaatgatatatattgttgagtcaaacttatttgcttgcatttgaatagaaagaaagatcttgattatatatgtcagatgatacaagaagcaggagcattaagtactgtaaactgtaagatgataattgtaactacatcaaaatagacattgaaaccacactaacctaatcacattagtgtgtagaaacatgtgttcgattagggattttggaagattttattttttccgctagcttatgtaatttcagggattttagaagattttggttttatgtttttaaaccacttgttatgttttcaggttaatgaattgattaacaaatgctttttttggatataaattttttatatgattaaaataatactaaaacaatattataggtgaaaaataccgatcacacaataaccattatttaaccataaagcaaatattcaatcacacaataacctaaccaaatattatcgaggttaatacaaaaattattatttacaaggaccatacatcgaaatacgtcggatggttctcgtatacaatttgaaactaattttggatggtattaggtagatgataaattgttattatggtctatttaccgtatgaaactttttcactattgtatttgttttttttccgtaataactctagattaaaggtaattgtggtatttatgtgagtgttaacctcttttttgtaccaatagttatttcagtatcttttttgagtgagtggtaagcagtgttttatttgttttgtataatatctataagtattttaatgttcttttatttttgttacatgtctctgttttgtctaatagacaaatgttaaaatgagacataaaaaagctaattgtttcagggaaagagggcattttccgtaattgatcaacggctctctcagaaatatagccgttaccgactttccgattatagaaattagagtcctccaaaaccctaaattggctctacccctttataagtaacccaaaatttcgtaccttttcactcacttcatcaatctgctctctcatctctcatcaatcatcagccaccaacaattcttcgctctctctgctctgatctctctgctcgaatttactaacgatcccttctctgcaggctcatctttatctaatttcgtttactcattatatcttctaatccgtttcgtatactatcgctattcttgttttctgtttgtttgtattttgggattttctttgtgtttagtgataatggcaggtttgaatcggtgcccacttcaagaacactttcttcccagaaaaaattccaaggaaaatgtaagtatccttcttcaatcattcagatttgacctgtttccgtactctgttgagaatcaggattcgaattgtgtgggtgctctttaatttttcagattcaataccatgtttatgatacagaattagtgttttgattaacaacttgttcatctgaatccaaaattgtttgacccatatcattgatgaatctttattcagatactgtatgaactaattgttggttttgttataagaaaaatcatgtctttccaattgattgattgtttcttgcatagatttgatttgtgatatcgaatgaattgtactgatttgcttttatcttctaccagctggacaggttcataccgaatagatcagcgatgaattttgactatgctcacttagccctcactgaaggaagaaaaggtaaggatcaatctgcaacggtaagttcaccatccaaagaggcctacaggaagcaattggctgagaccatgaacttgaaccacacaaggattctcgccttcagaaacaaacctcaggctcctgtcgaactgcttccgagcaatcactctgcttctcttcaccaacaacccaaatctgtaaagcctcgtcgatacattcctcaggtatgtactgtatttattgcgtttgatccttaaagctcacttactggttgctgcttttgagttgtattgatctgttgctaaactttctgttgtgattaacagacttctgagaggaccttggatgcacctgacattgttgacgatttctacctcaacttgctggactggggaagtgcaaatgtcttagccatagcgttggaccacactgtctacttgtgggatgcttccactggttctacatctgagcttgtgaccattgatgaggagaagggacctgtcacaagtatcaactgggctcctgatggtcgtcatgttgcagttggactcaacaactctgaagtccagctgtgggattctgcatccaaccgtcaagtaattactactctctctcttttatgttgagatataatatccggtgttcttagtctgatgtgtttctcatatttctgcagctgagaacattaaagggtggtcaccagtcaagagtaggatcactggcatggaacaatcatatccttactactggaggaatggatggactgatcatcaacaatgatgtgaggatcagatcacccattgtggaaacttacagaggtcacactcaagaagtttgtgggctcaagtggtcaggatctggacaacaactagcaagtggtggcaacgacaatgtggtacacatctgggatcgttctgtcgcttcctcaaactcaaccacacaatggctgcacaggcttgaggaacatacatctgctgtgaaggctcttgcgtggtgccctttccaagcgaatttgcttgcaactggtggtggtggaggagacaggacgatcaagttctggaatactcacactggggcttgcttgaattcagtagacactggttcccaagtttgttcgttgttatggagcaagaatgaaagagagttgcttagctcacatgggtttacacagaatcagcttacactttggaagtacccatccatggtgaaaatggctgagctcactggtcatacatcaagagttctatatatggcccagg

SEQ ID NO: 22587 - DNA, 3573 bp, Arabidopsis thaliana landsberg
atcctgtcctagattataaccaattgctaacacattgagcttcctaatcttaaaccggcgtcatcacaagtctgttatatccccaatcttttgattgtgaacatccagcttccaacgtatccaacctctatgtttggtgactatgatggtgaaggacttagcttagtcttgtacttcaaacgcaatgagaactatcacaaagaaatctcatctcactttaaagaaaccatcaaggtatgatgatgatagatcctatagctcttttttaaaacacttgttatgtttctttacagagagatatggtttttgcagagattcatggaagatgaaatggagaaagtaaaaggattcacaagagaatcaacagttccattcagagggaggttaaagatcatggcaggtttggtaaatcctgaggatctccagctaagttctactgagagaaaacttatcacagcttacaacgatagaccggttctttctcgtccgcaacacgatttctttcaggttagaaatacagatctttctttagttttcaatgatacaccagataattcagttccatagccttgtggttaatgttattgatcatttggatagggaccaaactactttgagatagatttggatatacacagattcagttacatttcgaggaaaggactcgaatctttcagggatcgtatcaagaacgggattcttgatttgggattaacaattcaggtacttgaaaaatctcccaaacttttggttggtagtagtaggtcattctttgttagagtgtagctcaagtaaaacattttctttctttctgacacaggctcaatcaccagaggaacttccagagcaagtactgtgttgtgtcaggctgaacaagattgatttcgtgaatcacggacaaattccaacgcttttaactatacaaacaatgaagtgatcactacataataacacagagagagagacaaagatcaatcaatcaatcaatggggagagcaaaaaaaagacaaaaagcaaaaacagagaacgttttcacatatttgtattgttgagagacaaaagaagaagataaaattcaattgtcttttttggaaacaagatttgctcgggaatttattaatctcatgaaaaagattcatttgtacaaatgtcataatttcttcactccattattcaaaacccataacaaaacaacaattgctctgtatatttcattaaccaatgactgactatgaaagatgaacaaatagcaagaaaatttgggtcataggccattatgtattataatagtgtgataataaacaaaagaaaaagtttgatattacaacaaatactttcattttcatacacaaaatgtaagacctatcttttactgaaacaataacacaaaagatacaacacaaaatatccccctgtaattttcttcctcatgtacaaaagaattcacatacagtattagtaaacagaaatctgaaaaccctaaaaagcttttaagttttacaccagaacatagaagaattacaacctcttgaagctgtttctttcctgcaaactgctagatttttcagacaagtgtgtgagtggaatttgaaagcttttgtaatgaaaaacggtcaagagttttcttctctcaagttgtttgctcttctttaagccttaaccgcgcaacgggctgttgctgctgctgttgatttaagttagccaaaccgccaggtcgattatctggccttaactgtgccgctgcagcggcatggctgcttgatttaacagcgggaaggtcatggttatgttttccttcatatgttgttactacagcttttggatctgttgctgctctctctacatgtttcctcacaccacatcctggtgttgtgcacttgtagtagctcctaaggatcaagagagaacattaaacaagaatgtttcaatacataaaaatatatcgatcactagaatccgccattcaaagagtgtaatagctagaccaaccaatgttgtaacgtgttttacctcggataaggattccctttgacaactttctgtccatatttacgccacctatatccatcatctagaagatcaacttcactcgtcgtttggacaataattctaggctctgtcacagttctatgtgaagcagcaggagctggttctgaaatccgaacttctgtacttctgcacattcaaacatctctctgatcaaaaaaaacgaaaaatatggattatcatcaaccatcaacagagcttataactttaccttctcttgggatcaggctcattctcatctttctctctcacatcagtttctccattaccaacttcttcaccgtcacttgcctcagacaagtgctctgttgtcgtagcttgacttactgcttcatgttgctctctcttagtcttgttggagctattagtttgaaactgtgatgcccccaattcagaactcccgcgattgttatttatcgaactcccatttatattcgcggtgttatctttgttacctcgcttagtgttttgaggaggttcatgattgtgctgacctttgtagataatctccgttacttgtccatcaagagatctctcaaccttcttcttgacaggacatcctggattagtacacttgtaatagcttcgtggaaactcgctacctttaacttgcttttgcccatattttcgccagttatagccatcatcagctggtttgtcaacatttagaggctgttgtgacctgtgctctatgatggttacatctgaggtttctctttgagctggtagtggagccgaggtcgggatctgcgcttgacccgatgaaaatgattgaacttgagagggaggagggtactctgtttgtggttgcatattggcattggcttgaactgcttgagcagtgacttgagctagagcttgctgatgtgtcattccatatgatccctgcacaatgttacatatcaggtcaagaaccgctaaaacaaatcaaagcacacatcaaaataggtaaagacagattcaacagattcagagtcaagataaagcagagccagagacattaaacaagacaaccctatcaaaagagaatatagcaaaggcctgtctaaaggaacaatttctactaaagaaaacagagttccataatcaaaacatataaggtcataagaacaggatttttcggatgtggcaccaagaaatcttcctgaggatttctataaaaaccttgaacaaacccaaatctctacgagtatttgatccacaatctccttttgttctgtctgaaagttcctacctttccaacacagttgagttgcaaagttccttccttgaggagaaattctcaaatctctaataagccctaactcaatcctaatctccaattttgacctaagatgataccagcaaaatggttacaaaatctacaatttgttggaataaacctagatttgctaacacctaacaacaacgtgttattttttccctaagcagccaacagaacaaaaacaagaaacagctcaacaaagaaaagacacaaacattcaggttccataaatagattttagatttttaaaccaaaaaaaaaaa

SEQ ID NO: 22588 - DNA, 554 bp, Arabidopsis thaliana landsberg
  unsure (1)..(554): unsure at all n locations
ctcttcctcgaattgannnnnnnnnnnnnnnnnnnnnnnnnnnngtctggggacgccctgggtgacctgtcgactcggagcaccattaagatcccttcccccaggggacgagatctagattccagcaaagaggaggaagacgaccctattgccaggtcgcggaccgtccggcccagagctgcggaccgtccggcgtgacgcagggaagacaccgctcctgcgcccagatcgcggaccgtccggccctgtgcgcggaccgtccggcctgaccagagagcaccgccgccggttcttgttgagtgattggcgcccgaaaaatgtgtcaacataaccgaacaagctcttaagaaagttttttagccacaaaaccttatccgaagatgttgcatagtgaaaaggttatgcgaagttgatcataaaatttgtctagtaaaagctaggctgagaagtttgttctaaaaagagatgacacgcaaagctacaagtgcccgtagtatcaaggaacttgctctggtttccgaggaaaggaaggaacattcatgtctggccagaat

SEQ ID NO: 22589 - DNA, 545 bp, Arabidopsis thaliana landsberg
attaatattgagtatagggcacgtgccccaccttagcactatgtagatccaccattatatatatatgtatatgggtttttgtatatatttgataaaaatataaaacacttgtatttaggtattcttagaacgcactaggcgtatagcaaaaaggcataccaaatactaatgttttatgaatttattataaagttattttatgtcccgcactttgcaaatgttgttgaatggtaacataggttgtgaactctaacctataaaaagcgatttttgaaattttttttttaatcaaaaacgcaatagtgttaccaatcactatttttatccaatttgcatttaaaaaaatttagagttttgtccaacagattatgccgtggaacgcatttcaaatcaaaccagtctttacccaggggatttgtcaaaaagcgcgacatgtaatgtttttttccaaaatttgattttttaatgttaaatatatattgtatgttatattacgagaaaaagtaaagaaaattaattatcctctccattattttcttgtttct

SEQ ID NO: 22590 - DNA, 782 bp, Arabidopsis thaliana landsberg
cctgacgccaagagaaaacccctgatgacctagcgtttcgttttacttgttttacaccgctcttcttattgacatttacttttattgctttttcttagtttccttttattgctttcttacttttattgtattctgtactatttttcactgcatacaacaacccccactcttttgtttgtcctgatccaagttacctaactaaaattcttccttgtagctacactccctgtggattcaatcctcaaatactactccgaaatactgtgcacttgcactagtcatgtggtctttcaagtacaagcctgaggcaaaatcaaacacgcatcaccaagcggttataaaagtgcggtgcggttttcttgtggtgcggttgattaaaacgcagtatgcggaacgaatgcggttagtgcagaacaaacaatgccggacaatgtatgaattgtatgaattgtgtaaaaagcgatatgcggtacaatacaaatgagtgaatgataaaaaccgcaataagcggtacaaaaatattataattatatattttaaatataaaaatagattagtgatattattattattataaaagttaaagttttgtgtttaactaacgattattttatattttattaccaaccttaagataatttaaatattcgagtttagaatattataaaaatgaatttatttcagaaattaagtgaaacaattactatcgaaaacattagggaaataatacattaccaaattatattaacgagtatttttgattttttttaccacatggctgc

SEQ ID NO: 22591 - DNA, 4206 bp, Arabidopsis thaliana landsberg
cgaagaagaagaagaaaggaaggccatctctattagaccttcaaaaacgagctatcaaacaacagcaacaacaattacaacagcaacaacaacaacacaagaacaaccatcaagacgacgatgaccaccaccacaacaacaatagatccggctcgaaaaaccctaattctctcaatcaccgatccaaacgccggaaccctaattcaaacgacggcgattccccttggatcaaagacgaaggtgaagacaacgacgatgacgagcggcgagagaagaaacataagcttttacatggattgaactctcactctcatcgacattctcctaattctcaatccgatctgaatctcgaccaaactccagaaccgtcctttaatagacgcaacctctccgccgccgcctccggatctgattatcatacggtagcaaattcaatccctttttctgatccaatccctaaattgaattttgattatcagaaattaggtttcaaataatttcgcgcgtctgttatcttcttcttctctgatttgagtgagtgggaggattgagtttgactgagtcattccttgtttttaattggtgggaatgagaattcataattctgctttttctctctgtgtaaattaaattttccctttttttgtcttcagcttaagaaaattcttttgtgtgtgtttatcgctttaatataatattgattttgtctgctaattaaaattgttaacttacctctgaaatataagatactgaaaacaagttccaattttgtctttgctttactgcttaaacatgaagataaaacatgaacacatgtgtactttgttttctctgtgaatctacgaaagctttacattattaatggatatactttggagttgatgatgatgatctgttggttaatactattgcagggagaaaaggcttcgaaagcgacagacattcttcttcaaagtatatatcttttttcttgtttttttgttttgaagttatgaaaaggcagaaacttgggatttgttttgtggtaattaattaaatagatttgggtattttaacttgtggacaggagggtcacttgtggagtctacacctttgccagacaaaaagttgttgttcttcattcttgatagagttcaaaagtatgtcaatttttatggcttctgacatatcttccttctccatgtaccatgttcttctatttttgattgattgttgttttactatacttgcaggaaggatacttatggagtgtactctgatccagctgatccagaggaggtgaagttttctttatttgtttaagcttgtttgatgttaaagtatgttgttttgccttttatcttatctgtgaatgttttgtttacagcttcctgattattatgagattatcaagaatccgatggatttcaccacattgcggaagaaattagaatccggggcatacaccaccttagaacaatttgaggcaagtcttgtaattgaatccctctatacatttctgcgctttgctttagctaaaatggagtgttcacctttcatagttttggttcttcatattgttaagtcttgttcaagagtttctctggtagtaacaacatcgtgtttgcctacaagcgtgtaaggttttcttagttttcctagccacaatgtgttaattctaccatgagaaggtgcagatatactgttaaaagtgaaagccttgtggggtctgaattgtttcgttttgttgcagcaagacgtatttttaatatgtacgaatgcgatggagtacaattcagcagatacagtatactaccgacaggtttgtcttggcttatataaacttgctattttacttccttttgttataatccattctctgatagtatatctatggcatgacaggcaagagctatgcttgagttggcgaaaaaggactttggaaatttgagacaagaaagtgatggagaagaaccagtgtcactgtcacaacagccgaaagtagtcaaaagaggccgtcctccaggctcaggccttaagaaacagcttgagcaatctttgattgatcgcacgacttctgatatttctgctgatgcagcagcattcacttatgctggagatagctctagattatccggttcttacaatctaagaaaaaatcctccttcatatggattccgtcatgcagaaacttcggttagaatcaaccataatagcgagaaccaaagtggcttgttgatagattgggagaaggagtttccacgtaaagatctacttttctaatactaccttcttcagaccattataccaaatacgtttttgttgacataaaccattttgtgtagcttctgttgtgaaggctgtcaataaatacgggatgaaaaatgtcgacgagaacaggcgagatacctacaaccagaactctgcttccttgcaagattcttcgatttttacactgcttgatgataatttaaaacaattaactccagtacgtgcttagcaacttaaaagttaaaatatttctccttttgttctaagcaacaaagaatctgaccattgtttcgttattttaccaggttggactgaaagctgaatatgggtatgctaggagtctagcacggtatgcagcaaatattggtcctgttgcttgtacatttgccaatgtaaggattgaaaaactgttaccaactggaaccgaatttggtcccgggtgggttggagagaaccctgagaatcctcctcaacagcaaaacttaatgtcgggaaagcaaaagtgttcgaatgactatgcatctgatgatcatcatcagtcaagtagaatcatgtctccatcaacctctgtctcaagctccatcataggaaacatacattcttcccatgaaagcaaagagtctgttcaggtattgaatcaagaaaccgagataaatggtctagtccgtggttccagcggatttaaccataaaccaaaccagatgctggaaacagctggctcgcagcaaggcaacataaaacaggaatttcagcggttgccaccagatctcaatgctaggctttcctcaccaaactcaccaggctctaaccaccaggcaggttcatcgcagcatccggatttggcgttacaactctaagtaattcctactaatattgaaagccttaccgatatatgagggagaagaagaggcaaaggcatgtgattcttgctacaaggttgaatatatagggaaagtcttatgtacagattgttgcaattttctgatttttttagggtaaaaagaaaaagaaaactgatcgataagagtactctcacaagatgtatgactgtaaaaaaatttgtacaatttcctagtccatcaaactagagtgtaatgaatgtactcgggattgtatatcatgtacgtttttgtttggtcttgtgaatctgtgcataatatataatactaatatttataaatatcgaaacttaacaggataagtagaaaaaatgattacaaagaaaagtagaaaaatattttgaaaactccgtttgaaaagattatgatagctccctgtgattaatcaaaagtcaaaacacagttattaggatatgtttgggggattatgagaaaccgtgtctcttaaatagtcagtcttacattttgataatgttatatacgttacagtatataataagtagacagcttaaattagttccaacggaaaaaaaaagaaacaaacgttgaagaaacagaaggaaggaaggaagaaagaaagaaaacgacgcgcagttccaaaattaggatcatattggctcctttaatttctcttccgttgccatttcaaatattttcacagttgcttcctttcaccactctttttaatatttctctcaacatttttccattagcatataagagagtaaaaaagcctgtttcttcttcctcttttagtatatatataaacaaaccattcttcaccattcaaaatgccatttgtataattttagtttttctccacttttcagattcttccttaaggaatcattttcccatttttctggaattttaagagagaaagagaaaagctctctttcccatttataatcccaaagacacaaatcctaggttttttcttctttcttttattacaagaaaccttggttttttgtttttgtttgttctgtttcgtgtgtagggttccgggagctgcgtttgatgataatgttggacatcatctcaaaccagctccgtc

SEQ ID NO: 22592 - DNA, 558 bp, Arabidopsis thaliana landsberg
  unsure (1)..(558): unsure at all n locations
agaactctttgcattttataataataaatattaaataatttaaagtttagagtttttattgaatctttacagttttttattgtccaatggtggtggagactttaagaggatttcttcaaaaaaaataaagattttaaaataaaatattataaagttttttatttgacaaaacttaataattattagaaataataaaattgtaaacatacatcatgacataaaagcaaaaaaatatatagaaatgaaaatttgaaaaaggataatatttaagcttgattcggaccaaaattttgccatatatatactctgatactcaatcaaatcatatttcaatcgttcatgctaagtacaatctcgaagtcgggttttgatacttaataattactacaaatattaaaattgtatacatacatcatgatataaaagcaaaaagaaaatatacaaatcanaaaacttaaataacgactaaatttaagcataattaaaacaatgcataatcctttttttatatagttttttctcagccagtcacaaagcaacacaactaaagtctttaac

SEQ ID NO: 22593 - DNA, 606 bp, Arabidopsis thaliana landsberg
  unsure (1)..(606): unsure at all n locations
tatgcaaatccaagtttactgttggataggtttctctggatacaataacgtggatttatgaacgattcgtatgaataaaaatacatcgtaaatggcgaaataaagctatacttggattcaaattaaacaaacaatactttcaatcagtacatctactaattgcaataaaaaacataatttgaaaaaccaaatataattacacaacttggattagaactactagtcctgttaaaacaacatctccatttggatgtgaagttctggatagagtaacaggtaggcacatatctcctcccaaccttgcttccatttgatgttgtcaagatttttgaaatttgcttatcaacttccggaagtactagacctgaatgtgcttgtgacttcttctgacgcgcattgaaccaacgagttaacatagacctaataaatcttatcaattccataatatgggacgcgctccccttggacaatgccttgtttaacgactcagcaatattgctagtcatcagattgaaacgctgaccaggaaaatataaccttgtncaatgagccaaccctatatcatgtagatactttatgcanagggnggtaatggcattaatctga

SEQ ID NO: 22594 - DNA, 606 bp, Arabidopsis thaliana landsberg
ttcgagctaaagggaagagggccttcaaaaccaggaagagacttgataattgtggcagaactaactttttgctgacctaagaatacagtgtgaattaacagaagctgcgacctcagaacagagaaaacgtagttgctaaccatttgttttttgtttttttcagttctgattagcaatgtagcaataatgccttttaaggacaataattacatttttatactaaaacaaaaaaaaagtcgcctaccaactatctttcaattttggctacatgaccaaaccttgttgcaatttttaattggaaaatctcgcaatcttgattctcccacctcgtagataatacaaaaattatttgttaattcctcgtttttttcgcgatcacgatcatagaagtattagaataaatttttaattttacatatctttaatgatctgaatccttttttcgttcttcttcaagattacctttaaaaacaattgatataaaaatacatatgtgatctgtaaaaatgttaaaagaaacataggaaaaatgtttttattccagatttgatgaacaaagttaacagaagaacacaaagagagttatgactattaaaattagtttat

SEQ ID NO: 22595 - DNA, 573 bp, Arabidopsis thaliana landsberg
  unsure (1)..(573): unsure at all n locations
ccgattgttacagagaaccaaaagtttcaaacgttcaattcaaagctaacaagatcttgtataatttaagagcatgaagacgactgagactaaatataagaacattaaggaacgttttcttcaattatagtgaaaaaacagtgaatattgttacatatcccattaagtatttgactccaaaacgtcatcatgaaatcatttccatcacacacaaacgacaaacactgaaagatattgaaaaagaacagaggacagatctcatacagaagaaacaatgttgataatttaagcaaatatactcagattaagacagaactaagagaaactgcaaaaccttgttcttaagtataaatttcgttaaagagagaaaaccagtaaaatagataacgttgatttaaaaataaaataaaaaacgcatagttaagaaaacaaaatgacatgctcattgctttcgcctaaatgataatctctttatcttcttctgattctgaatctgattcatctgcactgatggaggatggactgacttgaaatgttntaaattgtaaacattaagatcctctacgtgatcta

SEQ ID NO: 22596 - DNA, 413 bp, Arabidopsis thaliana landsberg
ttttaggtttcctctatttggataagtgttaaatttttaatttttgtgtaaactaatttttttcatcatccaaacccctaaaaactgttctagattcaatatatggtttacacattatttaactttttaacacttgttttgcttttattaaaaatgcttttaaacttatatttttatactactattagatctttaaggttttaaggtttcatttataggtttaatatatggtttacatattatttaagtttttaacacttgtttttcatttattaaaaaatgtttttagacttatatttttacattactattaaacctttaatgtttttttgggataattttttttttttaattttgtgtaatctaattgaatacaagattcaaacatgtaggtggggttttaggtttaatat

SEQ ID NO: 22597 - DNA, 1671 bp, Arabidopsis thaliana landsberg
  unsure (1)..(1671): unsure at all n locations
tatttattttaactaccaaatgtgatccataagtcagggggagggaactctgcaaacacatttataagtgattacataataataatataacttatttgtataagtgatatgtaaatagtgttcttcagcatttgtttgttttagtcaatctaatataaatatcgccaaaaaagattgatttttggttttgaaaaagtttccctaattgttcatattattttatccgatcctaattactttgaaaagcaaattagtatcttgaacttctccttgacaatattgaaattcgaataagaccagtttactgccacagtgccattcgtactatatcatatttgagtttattgtgaatcgatttttgatgttgcacaataaaaaaaaaaatagtagtcaaaatttagtcagaaataattgccaaaaaagagtttaacattagactttaaaaatgatcatgtaatatgtatgtattagatactataatatatggtgttagtagtcaatttatcaatcaaattaatatactttttacgtattggaacaaccattaatattttgtgcgtattggaacaaccattaatattttgtgattatggaaataaataattagaaacttggcaatatatgtaaatatctaaattataattttttttgtattttagttaattttatgactacaaaagtcaaagagttaaagagtcaaagagtgatgaatgagcaaagatgagatgcacatggaacaaaaagccaagagattagagctggaaaaaatatgaggctctttgttcattggtttaaataacggatcatattattagaacgcgcgaaaattggtactcgtaattgctttcgttacacggtaaaattcgaaatgagttaaagcttnnttttttctttnnttttgttcggacgaaatgagttaaaatttaaaaaaacctttattcttagatttcagatcaggagatttaccgtaatgggtaacaatttaggtgttattaccagaataaaacagaactttttttaattactgtgatatttttgtttttttcttaatatctagcgtgcccctactaaacgttaccggaaaaacgtaattataggcaatgccactgccacatcaaaatttgctaacgtggattaaatgaactcagccgtaacgcgatacagcggcagttacggctgagttacggtatgtgcggctgacttacgacaaaaatatatgagtcataacaaaacggcaaagtatgagtataactcagccagacgttacggctgagttgtaaaatgttgcctgagttatagtataactcagacaacgatatggttgagttaaggaatgtcggccgagttataagaagttatacgataacccagacaacgttatggctgagttatgagaaaacggctgacttatttcctagacacggccgagttatagttttggacggcttagttatggaatgatgtgacggcttagttatggaatgatgtgacggctgagttatgatcgagtgttataaatcagccgtaaagagctcgattactaaataactcagccttgttacgactgacttatgtgcaaaagattaattactataatagcatgcagttacagccgagttttaaaacgttacggctgagttagttgagttacgacattacacgactgacttc

SEQ ID NO: 22598 - DNA, 1339 bp, Arabidopsis thaliana landsberg
aaaacaaaaaacaataagcaaaaaacgggtaggaagaattcaagaataatagagatgtgaaattctacgcaccagccactctcgtgatgcttcatacatgagtaatctccctagttcagctattgcattccctagataattaaaaaaactcaagctttaaagatcaacacagacttatactagtagcaaacctaaaaaaactcatattcaaacgcaatgtagcagataacaccaatctaagagctaaagattgtccaacgaatcaaaaaaaaaaaaaaaaaaaatggatgtaaaattcagttctttaacaacaaacactggttaaatcgcagaaatactcataagaatcttatctactcactgaaaacaggacaaggagtttgttcatttctcagaacagagatccagtgtttgatcaaaggatgtggtggcacaaagacctgaaacaccagaatcaaattcacatctttcactttcaaatcaaactcaaaaaaatctgaaaattgaaatcctagagttttattaccagcatcctgttgctcccgttaatggaagcctccgacgcagccatttttgttctagctcgtatagtccgtcgggaaagtgacgaagaagaagcacccaaattctttaaaataatccagaatttgaaaatcaaaattcagtttgaatatgcaaaaggcgttactggaaaagtgtgctttggacattagaataaatatatatatatactcgatacctgtgcgagaattggggaggaattaaaggagaggaaagaggaaggattagggtttaggcggctgctgcattgttgtcggggagcaaaacgcagcgtatcagaagaacacctgaaagcgttaccaattgagcacgccattttcgacgagatgtccgaatctggttcgagatttttgcaatgacgatagcgcgggcgaagattaaccggtcgtcactactgtaccgaataactttgggtctacttattacacggcccattgggcttttatcttaatttttagcaatttctttccaaacagaaatctacaaattaaggaataaattaataaataatttattaatttacatagagagttttctaatgtagtaactttttaaaagtttctacaagatatttttcatcatagagaatatctttctaaaaccaattgcaagtaaaaaataattatcatgtctataaaacaatatcaaaagttttgatacagtaaaatattataactaaattcaaataagaacaaatacgagtttaagcaaaaaaatattagaaatatatttcaaagaaatttcttacatataatatattagatatatatatatatag

SEQ ID NO: 22599 - DNA, 1925 bp, Arabidopsis thaliana landsberg
acaatgaatttatcatgacatgttttattatcaattttgggctgtaataaatattacaacgacatgatgagcttcaaatagtgtaatgcatgaacagtcaaatcatatacaagaaattctgaggaagtaatccaaagcttacataatttccccaccaccatacgtctacatttctccaccaccagcatactactttccttcaccaaaggttaactacaagtctccaccgccaccatacgtctacagctctccaccaccaccatactacagtccatctccaaagggtgactacaagtctccaccacccccatacgtctacagttccccacccccaccatactactctccttctccaaaggttgactacaagtctccaccaccaccatacgtctacagctccccaccaccaccatactacagtccaactccaaaggttgactacaagtccccaccacccccatacgtctacagctccccacccccaccatactacagtccatctccaaaggttgactacaagtctccaccacccccatacgtctacagctccccacccccaccatactactctccttcaccaaaggttaactacaagtctccaccaccaccatacgtctacggctctccaccaccaccatactacagtccatctccaaaggttgactacaagtccccaccacccccatacgtctacagttccccacccccaccatactactctccttctccaaaggttgactacaagtctccaccaccaccatacgtctacagctccccaccaccaccatactacagtccaactccaaaggttgactacaagtccccaccacccccatacgtctacagctccccacccccaccatactactctccttctccaaaggttgactacaagtccccaccaccaccatatgtctacagttctccacccccaccgtactactctccatctccaaaggttgactacaagtccccaccaccaccgtacgtctacaactccccacccccaccatactactctccttcgccaaaggttgactacaaatctcccccaccaccgtacgtctacagttccccacccccaccatactactctccttcgccaaaggttgaatacaagtctcccccaccaccgtacgtctacaattctccacctccaccatactactctccttctcctaaggtagagtacaagtccccaccaccaccatatgtctacagctctccacccccacctgtactactcaccatctccaaaagtttactacaagtccccaccaccaccatacgtctacagctccccacccccaccatactactctccatctccaaaggttgactacaagtctccaccaccaccatacgtctacagctcaccaccaccaccattctacagtccatctccaaaggttgactacaagtccccaccacccccatacgtctacagctccccacccccaccatactactctccttctccaaaggttgactacaagcctccaccaccaccatacgtctacagctccccaccaccaccatactacagtccatctccaaaggttgactacaagtctccaccacccccatacgtctacagcttcccaccctcaccatactacagtccatctccaaaggttgactacaagcctccaccacccgcatacgtctacagctctccacccccaccatactactctccttcaccaaaggttaactataagtctcccccaccaccatatgtctactacatgccatactatcgaatttgaattgcttcattaacaggaaacatgaacggactattcccattatatgattatcttacatccgagccttctggaactgttcttccgctcaactatcttctaatgccgtcttgattcataaatcatgtcgactctaataaatgtatttcttagttgata

SEQ ID NO: 22600 - DNA, 1292 bp, Arabidopsis thaliana landsberg
gcaattattggtcgtggtactcttaatgccttcgaagcaatccttcatcctgcctatctttgcatgaagataccttcggaccaagggcctattgttatccatggaagccaggaagctgctagaagggccgaagaagctggaccgactccaaggcaatccataatatagatggaactgaagcttgtgaacagtacaaattcagaagggagaaggcagcttcagcagatcagccgaagcccatgctattgtgtgaggacatagcagagcagaaggtgctgttgggctcgcaattatctgaagaccaggagaaaaccttgataaggtttttattcaacaacaaagatgtttttgcatggtcggctaatgatctctgtggagtaaatcgggatgttattgaacattcgctcaatgttgacccatccttcagaccccgcaagcagaggcttcggaaaatgtctgatgacaaggccgaaggggctcgcaacgaagtaaaaagactcctaagtgcaggagttatcagagaagtgaagtatccagaatggctagctaacactgttatggtgaagaaggccaatggaaagtggagaatgtgtattgatttcacagatctcaacaaggcttgtccgaaggatgagttcccgctgcccaaggatagactctttagttgatgcagcagcttcttcggaactcatgagtctcctggattgttactcaggctatcatcaaatctggatgaaaaaggaggatgagccgaagactagtttcataaccccaagtggtacatattgctatcttcggatgcctgaggggcttaagaatgctggagggagtttcagcaggatgactgcgaaggttctccaatctcagataggcagaaatgtgttgacctatgttgatgacattattgtaaaaagcacgaagcaagaagaccatattgctgatctgcaggagaccttcgccagcttcagacaagctggtctgaagctgaatccagaaaaatgtgtcttcggagtaaagaagggtaagttccttggatgcttggtttcaacaaagggaattgaagctaacccaaataaaatcgaagctatacttcgaatggagccaccaaccacaagaaagggggcccaaagattgacaagaagactggcttctcttaacagatttatatccagatcagcggaaagaaatctacccttcttcgaggtgctaaaatcagctgaagtctttcaatggggcccagctcaacaaaaagctttcgaagaactcaagcaaggggatactctagagtcgac

SEQ ID NO: 22601 - DNA, 568 bp, Arabidopsis thaliana landsberg
  unsure (1)..(568): unsure at all n locations
ctttgtgtgttgcttcactgtccttcgtgtgttgtgatgctgatcaagtatagttggtttactgtcctcaatgatcttctctgtgtgttgatggtgtagcagcttccgtccacttcgaagtgtaacagcatgggcatatgctttggagttctgaatggcttttccaggaaattggcctggaggcgttggtgctaaaggagaagcaatttgtccttccatgtatttcagcctagagttcaatgcctcaaactcgatattcagagcattatatgaggaatccaccatagtgtttatctcagcaagttttgtctccaaaaccatagatccaaaagattgaccttgtagtatttgatgcagtatacttttcatgtctgcatcgtgtgcattgtgagttggttgttgttgannnnnnnnnnnnnnnnnnnnnnnnnnnnnnnnnnnnnntccttgaaactgttgcatgggaacaaacccttgacattgattgtatggaacaaaaggcttgtaatgggtttgatgttgtctatagtggttgaaaccattgatatangctccctggttctagatg

SEQ ID NO: 22602 - DNA, 2741 bp, Arabidopsis thaliana landsberg
  unsure (1)..(2741): unsure at all n locations
tcgatgcaacctttggtctatggagtgtcgatggcagatctagaatcagtaagaaattatacacatctatccaagtgagttgattttgaagtctcaattgcgaattcatttgttggtaagtggaagcaattatgtttccagcaatttcctccaatcatgaagacatttcattcatagtttttctttcgatgcattggcttcactcaatatgaatcacttataaagtttgttttcggtggtctaattcaccgacgttatctccggctgagaaccgacgaagtttctcctaacaaattgtttagggaagtcatttgggtatttgattaaggaatcaataaacaaatcttttcgattgaaggaattggtccgatgatgatgccctcgctgtcctccgattagactattcatgttatgtgagaaagaaaaccatggtcactagtggcaaggatgttataaaaaacatgatccaaaaccatttcaaggaacatttcagtatgtttgtttaattagagttatgttaaagatatttgagagtttcatctataaaatattagcattttatgagtatatgacgagaggacttaatagattttatatgttgcatgtaaggtttccatttgaaaagcagggttacttccaccaattcatcaaaatcatgttttatttcctttatttagttcaattgttgtatttgaatggtttcatgtatcatgtaacatttctataatataatataactgatttgctgttaagaaaaaaaaacctaaaatcatccagctactatgccaatttatcaaatatttaagcaaaaaaaaatcgttgaaccaaaatgaaaagtctagatgattccgtcatgattttgataaaatataatatgttgatacattatctaaattttgtcttctgtccaactttttgtcttaaaatccttttttcttttttatcacctataactttttcttgttattcatttaaggctatctattttactgttttgtattaattatattaatataaaaaataataacaataaatatctacactctataaatattataaattaactttagtgtgattttcttcatattaaggtaacctcctaaataaaaatataactcatattttgtcttatttgcctcaagttttcatgtgcttttattacctcgatttgcggtctttgcatcctctaatggtataatatatagattagattacaatttatctttaaatcaaaaggttatcgttttatactcaatcacatgcgtacacgtaggagtggaatagatacgctatccgaaattcagtgttatctaaaagaaatgagtccaacaaggaaattaaaaccttaatgggtcatagcacatttcctttactatataaaccatcttcatgccaataaaacaaacacccataacaaagaccagaccaagaaaaagatggatcaagaggcttttttgcgtgagaggattgaaaaagcacaagcgcaattgcaaaagttgcgtgatgaaaatcgagttatgaaggctcgaaaaattatgtggggttgtatcgaaggaaatattaatgtgtgtcaactcggtgaaaaggatctcaaagatttgagttctgttattgatgactatctcaatagccttaaaagcagggttgagtaccttaagaagaatggtgagtcttcttcttctttacctcctcgtgttgtcccatatcttaacgttgaagaggatgcngacgttccttcaatggatggtagccaccactagtttgaaactaatcgtttcgctaccaccgctgatgcttgtgcgcctaacatcaccaataatccttagtcctatggggattttttatccgattgaagaatttaataatttgtatttctgttttctatcatttttaaagttcaaatttcgaagttatgctttctgatttttctaataattaaagggtttccctttaaatttgttgttatgttatatctatttactaagtaatgaatttgcgtggaaacaatttagtttttttcatagaaaatataatcatatcagaaataattaatagttataacagttttagtcttgtaaaatatgaaaaataaatcaatagtactagaccatttatggagactgaaaaataaatcaatagttataacagaagtgatgttttattatgttttctgatttttgtaataattaaagggtttttctctaaatccatgttatgttatttgtgattactaagtcatgaatttgtttggaaaagttttaaatttattcagagaaaatataatcatatcgaaaattaatcaatagttgtaacaatttgtcttatataatacgaaaataaatcagtagtactagacaatatataccatgtaagaaaactcaagatgaggaagaaacattttcttttgattactgattaactcttaacgattacatgagactaagaaagcatgctttttaccttaaaagtactctctaaaaaatggtttacctatctgaaattgactcggtgttccggtgtttacaaatttagtcaatgtgaactgcaatatgaagaaatgttgaaagaaattgaaatagtaagctcgcatggttccaacaatcactttttggaaggtacaagatctcctgcacacttgcctccattaatctataaaaatttgttaataaatcgtaaaatgtgggacatgaaccccaaacttcttggtataaaagcaataatgaattctgaatcaaccaatg

SEQ ID NO: 22603 - DNA, 2747 bp, Arabidopsis thaliana landsberg
agcaatctgagctttttctgaattagaaggaagagtatgcttgtttttcttcagtttgttgtaagcgttgggagtcattaggaggctcatcctttaactgttcatttgaggctagactttcctttcggttttgcttcatgggcttaacttctttcacatcattaggttgttgtctagcttgctcaaaacgtctatgatcatcacgaatatagtagtaacaatttgattcatctttggttggtctactcctccaattatgcttctcttggggtctatttcgttttgcctctttttgatgcgagatctgctcatattgctctattcctttgagttggtcgttgatcggcttatgtttggcatcaaatattttctccatttgtaacgtgatagcatcgatgatggcttggtcattagcactcactcccgagcttgatttggatgtcaccattcctgccaacaaacaacactaaactagtcactagttcaaggagaatatcaaacgtttgcctaatcacaggcaaactagatcgaacaaataaattatcaatcatgctctcaaagtccagaaacacttttatagaatactagtctcgtccttgattcagatgctattgatttcgcaattttatcacaagccaattatttataaaaattaaaataatttgacagcaaagataaacggacagatgagaaaatgaaacgagatgatgaaatgaattgaattgatgaaatgatgaaaggataaaatactcaacttcagagtgtatactacaagaaaacacggtttttacgactgcaatattagtcgcaaagtagccgttaaaagagtagttacgactatgttacgactaattctcgatgtcggaaatccatagtcgctaacccaaatagtcgtaacattagtcgctaaataacgactacgatacgactaattcccgatgtcgtaagatttgtcgtaacatagtcgtataatatgacgactgagttacgactaagttacaattgaatcacatgtatatcgactcgtgtatagactactttgcgacaatttagcgactaaatagtgaccaattaacgacagttaagcgacaaccatttcagcaaaaaaaaaaaaaattttttttctgattttgtccgtatccaaatccattccaaaacacataaaaaacaagacaaaaccatgattcaaaacaaactaaaaaccagaatagattcaaaaacaccaaattcaatatccaaaacatataaaatacaagattctagtaatttgacatacaactaaaacgtttgagaaattcatgagagttatgaagtagggaacttaagactgagatggtgaagattagataggatcggttatggttgcttcagaagattgagtagccataaagttgagaaaggctggatcagtttggcgcaaatacttttccaccaaggccaagtgctctggcttgtctttctgttcagccacagctcggacttgctcttcctcacgtctagcattatgagcagcctgctcttcgatcttctgttgagcttctttcagttgctcttgcaatgacacaaaggaggtagagtctgctgcatgtttgccctttccagtgactagatccggaagattatctttgaggcttccaactccataatagttccctcttgaatctgtctctgtggcctatgaaaaaaatagccaaaccattaataaagagcttgagaaaatgcagacaatatgcaagtgaaaatgtaaactttacctctagaaagatgacagtatgatcctctattgtgagctctcgaggtcttgattccccgtctgaaacatttgaagtctttgcctccatttcagacaacttctcttgcagcttcttctcataatttttaacaatctactgtgcctttttatctacataagtaccatctggtttggtatgagtcttgatgataacctcaccaacactcatcgtccttcctaactctttttcctgtgatgttaaaaataaacaaggcttaatacaacatctgaacttaagacagagacacattaaaaaaaaacagagatagaagttaataaccagttcatgtttgatgttttgatatgactttggccctgacaaatggatgtgaggaccgagcccattatggtcagacaagcgagccttggaatatatcttactcctcgctattgcttcttcagtatcccaatactcacacatcgctttccagatatgagaatcgatgatccatttagggcactcttgactagtccttatcgtgctaaccatgtctttcatccttcgtttacagatttcttcaaaatgccattgaactgtacatgttatcaaaggatcccaatggtgtgttttctacaaataaaaaagagaagatgttagtgaaaacaaagcagcttaacttaatactcttaaggcaagaggaaggaaaactataccgcaaactcaagaaagtatttttctcgtctatcccgaggaacacatgaccagctatagtacagaccatcaaatttgttggtccatactttagtaatcttcctaaccaggcttgaatttgtgtcccgagtaaacatgcaagcaatacacaagacacttaatacaatcaaaaccaatacacatgaggctctaaatcacagctactaatcataacaaacacataacactcaaaaccacagaaaactaatcataacaaacacttaagacatttaagacacatctaattcagacacaaaaacacac

SEQ ID NO: 22604 - DNA, 1521 bp, Arabidopsis thaliana landsberg
tctatcaacctggaacaagtcaaggcataaagaattagaatgagtttagatatcacgtaaaagagatacaagtctattaaaggcaaaagtgaaacgatttggaaatctcttttatcattcagtggatgaacataaatcaaatctcataatacaaaatctgcaattccaacattagttcaccaatgagtatgttcacaagaaatggagtattgataacatattaagccaatgttatttttagactcttatggagctcttattctaattcgagaagaagggaagaccaaaatatgaaaggagacattttcactggaaaagaagaaagctgacctcaagcccagcatttttcactaattccctgacttcatgatttcttccttcgtgaacctgcacagatccacacaatacatgttaattcagctgaaacaaatcatgcaaccaacatcaataggttagatagtgttaacgcgtttggtttatgaacctataaaattgtcaaataaaaagactacgacactatttttagtagaaaaaaccacattcttcagaagctatacaaggtaggggaagttatatcactggatttcagtaacatagtttgaagttaggtcaaaactctggcagtcagaaataaagagaatcctaaagtctagataatgtatgtggagatactttgtcgttcctatacttaaaaatccaatgtgactacgataggtctcatctaattttctacaagataatctaggactagcaaacagcataaggactggtgacaccttttagaatctataacaacaaagaactttaaaactgagaaagctttggaaaagtaccactatacgcagccatgctcttggtatatcatgctgctttggcatcaactcaactaaatctgggacacagtggactccttccaccattgtgccttcactgattgccattaagtgtcgtttgtgtatatcaccgacaaccgtggtaatatatctgcaattttaaaaacgaaagataataagagcagtataaatatacaaaacctttgaactacttagacggaacataaatgttcaaggaaacaaacaaccgttccttatctctatttctccgatccggttcaagatctcgttcacgacggtcacgctcacagttctctctcactctctatctctatccctatggcggtgtcgatctcgccatctatctttctccatgtcgcagtcacgacggaatggacgcgaaatgagcggtggagtctaaaagacctagctctcatttgggggaaaattgatgatgaagatggtgttcctccggtgacgacggaggctacgaaggtgtttttggaagggattgtgtctcttgtgtagagaagagtgaggaggaacaagacggtgaagaaagtgacctagatctgatttgggggttttttgttttctactgttttgttgttgaggggaaagtttttttttttttgcttgggggtattagattgggaggactaaaaaaaatttttggatttgaaaaatt

SEQ ID NO: 22605 - DNA, 530 bp, Arabidopsis thaliana landsberg
ctgcatatgtgtcttttcctttctcgtgtttcatcgatcctgctctcggtttactttaaaatcctgcttctccgttttatgtccaagcccctttgatgttgtattgccttgtttttgatgtgttcttttgtttgctgcctcgtttcggagttgatattgtgttggcttgtgctttggtttgtggattagtttacttcttgtttgaaggagctagtaagatcttgggatgttaagcgctgttctacattgatggattttgctctgtgctagccgacctcggggaaagagcttggtagagtgagcttgcgtttctcgtttccttaggttcgtgtggttccgccttgagaaagctcatggttagttcaaagagtgtctcacacatgacgcagatggagtgggtgtttgtttgctccttgtttcaacactgttgacggttcaggttcttgggttaccagtgaaaggcttcctttcgttttagtttctttgactcgatttttaccgtttgacagcatgatgcttcttcttgaggt

SEQ ID NO: 22606 - DNA, 259 bp, Arabidopsis thaliana landsberg
tgagacgcccgcactaagaatcttatggctccggctctccacaaacacgatcagttctgattatcggggcatctcataatttctctgtattggggacatggacagatactaggtggagcaaaagttttacattgtggacatggaccaggatgacactgttttatttcatacatgaggacagggattctctttaggcgtctcatcaggagcaaactctttcttctatagactagatcaagatgaccccccgaataatgtc

SEQ ID NO: 22607 - DNA, 367 bp, Arabidopsis thaliana landsberg
ttagcacgttggtcaccagatctcttatgtatactgtattgttggcatgcgaccacataggtgaatttaatatcagcaagtgcttgacactcagcccagagtgaacttccactacttgaagcttcggcactcttgtatcctttcattaattcttgaacaaaacaaaagcatttgagggaacatgtccatagtttctacaaataaaagtaatcataacaaagactttcatgcacctctttcattagctagatcaaagaaggcctgaagctccaaagccttttggtaatacatcatgcctcgcactggttgatcaaattaaaaaaaaaaaaaaaaaaactcactcacaactttttaagtccagtttctt

SEQ ID NO: 22608 - DNA, 372 bp, Arabidopsis thaliana landsberg
ttaagactatattaaatcgtcaacaagatatgtatataaaatgtgtaaaacagtacatgcttggttgaatataaacaagtacccaacaccagatacattataattaatcccagctcacgaagctttaaaatcttcaccttccatttgctattgatcatcttcttacatctctctccctctaaatatatccaaacaagaacgaaaggcaaaagagtacatacaatggtgaactttgtggatttacaaaaaccattgttgtaccgcctcatgaaattggccggagtcattccttacaccgtagagcttgaaccagggacaaagatgaacttctggatcccaaaagaaaccctaaaaaaaaccaaaaaatctgac

SEQ ID NO: 22609 - DNA, 1175 bp, Arabidopsis thaliana landsberg
atttgcaaagtagttcttggacgtttttagtccctgatatacttaatattttggtcatttgttagacctaagttttcttaagctcttttttttatattgaaatacatttttagggagaagaatccaatccctgcagagaggattctgaactccttttactctatttctaattcatcaatgcaaactattcagatttatgatttgtgtttctgttatcatgtctgagtaatcaccttgttgggtttagtgagtctcaatagggatttagatagattagtagatcgaaaaccccttaggattattcttagatttcttcattttgattattcttattattgcttgttttagattgatcacctagaaattgatattagataataggtatgcccaccataggtacttgttatttgaactatcatagatgaacctaggcatttatgaaagaacaggtaggctcatagaaaggctctagtttagatactaggtgaactaatcaaacttgataataatgcatgctttagtataggatttctcggcttttccggttatcttagctctaagtatagagagtttcgcggaacaccaccggttactctaaaatcatagctctatctcaagaatggttgataacaacttagctatttctagatctactatcatatattttctgagaataccctaagcctgacgcttttaatatcttattttacttccatccaatcgattgctattgcttacttttgtttctctttattttatttactattttacttagcttaattcaaaaccttagtctattgcgtgatccgagagctttgtgaatttgatccctaagtgctgcaactgacctctttatatgagagagtggtcttaggattaatttgacctatatcattacacataatcgttcgaagagacggtctatgaaaataagtagaagtttagctacatgaagaaacaagattaacatccaaagcactagacggcttgatcaggggattcaacaaaagtgacatatgtgtccatcgcatacactttcctaaagctcgagacaccatcatcagtaaacagagccatgttagaaaaccctaaaccatgagcatgcatttccaaaaacttgcagctaaccggtccacaatccatcaccatctgtcatataatgaagatgctagggt

SEQ ID NO: 22610 - DNA, 581 bp, Arabidopsis thaliana landsberg
aaaagaagaagaagaatatgcttgcattgataaacatgtaacattatatcataaaagcagaaatcagtggctcaagacaagataacattattaagatagccgtacaatttcatgcataaatatccactctaagattacatgtgatgaacaatgcatctctgaacctcttctcttattcctaggatgtggctagtttgactcctcgtatatcaaaggtcttcactttgttgaattcattagtcattgacgaagaagagtcatctgtttctgcgtagtgatctccataataatcgccgacttttggtccgctgctgcctacatgtgagatccattctggtttgggattgaacatgcatttctcgggcatcttcttgcacgcactgtattttacatctttctttttcttttctaccggctctggcaatccctctcttttcagaggattggcttgattacttcttttctttctacatcttctttttttccaactggctcttgcaatattcctgtttttacgaggttggcttctttcttgctctgctcttccttgaaacaccatgatttgaaacaacttaaacatc

SEQ ID NO: 22611 - DNA, 751 bp, Arabidopsis thaliana landsberg
agttaaaagcgaaaatcttcgacaaagatgtcggtacagaggatgatgcggttggtgaagcaacgtaagttcctcaaacaacatcgttttagattcccaattgatacctttagaacctaattgaggagttatgttatgaaacaatgcagtattccgttggagccggttttcgtggaaggaagtattccaccaactgcatacaatgtggtgaaagatgaagagtacaaaggagagatttgggtggctctctccttcaagccctcggtataaaacatcttgcattgttcttgatttttggtcttacaaatgtttaagtagaatctaaagaacaatatgtttattgtggtggtgtttgttaggaaaaccgaagcaggggtatggacgaggagtcctatgggggctggaaaaactctgaagcatcatactaagagaagaaaccattgtgtgtcactgtttgatttgagtcttgggaaccaaacgttggtttacaagagacttgtaattgctcacgacatatttgtttagtttattttcatatttgacgtttaatgcattaagcggatggaacaaaatactgttgggtggaacaaaatactatcggatcttatagatgtcaatccgtttataaattttattcatagaaaatataataggttggttcaaattattatcccacttatgcactcgatattttatatttaacaatactatatttagtagatttgattaagaattgaatatatatttggca

SEQ ID NO: 22612 - DNA, 1006 bp, Arabidopsis thaliana landsberg
aaggaaaattaacacatggattgctacatgtgtttgagtcaataaaataaattgagcatgtattgattataaacaaaagatcattgagtctggatattatgatattaaataattaaaaaagaccactcaagtttaaaataacaaaaacatcattttattaacaaaaaggaaaattaacaaatctatttttacatgtgttattggtcaattaaagaattttagcatttattaaatataaagacaatcatcatttagtatggatattaaataattaaaaagaccattgaagttaaaaataataaaataattgagtaaacattaaattacattggttaaaactatatttatcaatgtagtatagtgtttttatttgaatacttagtgagaatattagtatagttatacttatggtttaatctaagaattttaacgcatgtattcattagtataaacacttaaaactaggaaaatatggcttagagggattgattcttgattatttgatgaaaatgttaatataaaattttaatgttttatttataagtttgaagtcatttaatatgagtttgacattaggtaaacctaatctatgagattatagaatgtagcaaaactatatcttaaacaatgtttcttttccaattttttttttttttggttcattatgttttgttatttgttaattattttaatatgaagtaattatattgattttatatgatatacatattattttgatataaaatttaacacttatccattaaaataacgtatgcataaccaaaatcgagattattatgatgaaacggatagttaaattgtatagcaaaatagaatgtgtaagattaaatttttggtttttagaaaattactaaataaaatacagaaaaagtgtgttgactactatttaaaatttaaatatcatcaataagatatagttaaagtcatcaagtgtatagcaaaataaaaattgtaagattaaaattcgatttaaaataaatattta

SEQ ID NO: 22613 - DNA, 390 bp, Arabidopsis thaliana landsberg
aactccagaacaagctttgtttggctctttagaatttgttcaagcatagattctatttttgtctttgatgagggtggaaggggggctgaattaccataggtcctttggaagttgctctgaggaaaggtcttctggaaagcatgctttagagtgtagttggaggaaatctggttccctgtaaacctgttgccactatagttaccttgttgctgtccacacttcatgtagccctaaccatctatgtagaatactccttcttcagactcagtctcaggctcaatagtctcatcctcatctgcaaagtggacatgcttcttccctgtaagcaagttgtgaaccaaatccagcttagcaatcacctctaccatttgattgcctgaaatagctcat

SEQ ID NO: 22614 - DNA, 1833 bp, Arabidopsis thaliana landsberg
ggtgtttccatatccaacaccagttacttctgctaaaaagacaaacgattagaacacaagtggtgtgcgagatgttatgtaggaatgaattcgaattcacctgtgcggggaaatctagggtttctgagatagacggtggtgattggtgctgagatttcggcggtggaggcgtgaagagattgaagagatcggaacaaagcaggaaaatcggtagtcctaacaagatcaattgtgttttgtccatggcggattttgaaatctcagagagggaatttgaagttgaaattttgaaggagatcgatcggagaagagaacttttatcacttatgccacttttttaaaaaaactgatctgaactgccatcagttaatctgaatgtcaccgaaaatgtgatataccagttgtatccttaatgagttgattaaaaaaatgaaaaagaaattcaaaagctaaataaagaaaatcgagattctccgttctctcttcttcggcgtcgggtttttcttcttgcgtcgacgttcatcttcttcgtcggccaccatcgattccggccgccgccgacttgaaatccgtcgtaaaaggcaacgaattaggtcagtttcttctgatatttcctttgacattggtgcattgcgatattagattgggattttgaattatatataactcccagattcaaattgatagtttgatgattggtttgcaaagtaaagagtaatcgattagaggttgccgaaacgttatttgaggtgatgagcaaaggaatgtaggttgaatgtgagttgaatttgaattccgagatttcatattaaagatttggggggtttgtgttgcaaagtactagattaaccaattagtttaacgaataggtatgtattaacattgtgaatcaattgaaaggtaacgaattaggttcagttgaatcgagtgcgaagagagattgatttcaacgtatgagtacatgtgggataactattaaaatgtatgattggagttgaactggttgtattttcaggagtgatgaagaagaagatccacactatggtacattttgattttggagggtactattttgaagtgaatgagtggattggtaaaaattcactatatgctatatcgtttaagacgaatagtttggagaagataacatattcgatgttagttgacaagatcatgaagaaggttgcgattgatgaagcttctgtgaagttgaaactgagttacaatctgtctaaagttcggagagagacgtatattgtagatgatgaggacgtcttcatatttttaacagaatctgatgaagagagtcgtattcctgttttgcatgtgaggaattaaatggtataggagttgagagggtggaaatttctgtaccggagcgtcaaagttcagttggtgtaaatgtaagagaggatgatgttttaaatgaagtatgtgagatggtgcatgatggatatgagaatgatgtgaatgattgtgagaatgtagtaggtatggagattgtggctgtccaaaggccaatggaaaggccggtgaattttgatgaggaagaagatgaggatgttaggattgattatgatgatattcacgatattccacgaagtgtagaagttactctgcatgttaaagaatgggatgatggtacgggtattgaaattgatcaagaattttgttctagggaggctgtgtgggaattggttaacaaagctgtaaagcaagaagtttttggggtctatactattaagtcagacccgttgagacttatgctacgatgccgccaagcttctaaagggtgtacttggtatctaagagttgcgagaacgaagaaatcac

SEQ ID NO: 22615 - DNA, 2304 bp, Arabidopsis thaliana landsberg
ttagacgagaatttgagacgttgggaggattgcttgcctcatgttgaatttgcttacaatcatgccacgcattcttctacaaagatgtgccctttccagattgtttatggttacatccctagggcacctattgatttgatttcacttaatgttgcgaacgcccacatgtagatgctgctgcacatgttgaacaaatgattaccatgcatgaacaaacgaaacagaacattgctgctactaatgcaaaaaatcaggttgctggtagtaaaggaagaaaacttgttacttttgagccaggtgatatggtttggttgcacttgagaaaggatcggtttcctactttgcggcgttctaaattaatgccttgtgctgctggttcttttaaggtgctaacaaagattaatgataatgctcatatccttgacctgcctgcggaatttggtgttccactagttttaatgttgtagatttgaaaccatatatggccgaggatgaggagttcccgcgaggacgactccacttcaagagggggaggatgatgaggacatcaacaccaacacgagcacatctacaccagcagcaccttctctagcccaggcaccatcttccccagtccaggcgccaccccttccacctgggccagtgactcgggcccgtgcaagagaattgaactacatcatgttgttaaagaacgaaggcccggaagaatagacgaccagcccaattgcggcccataatggacgacctagggttgagccgcccgcttatgtgcgccccctctctattttatacaggactgcgcctcctttattttccgagttttgttttacattagctttagctactctcgaacacggcaaatctgcgctgtcttcgtgtattcagaactccaccctcgagtaatagattagattgctcgcatctttttcttgttcgttcttccattgcgcacaggaaacgatcttcgtgatcaggtcgatctcgcatcagcaaggtcggtaaccattggaagttggttcagcgattgcattggcgcttagggatcgctcgtcgtagtcggatcgtgagggtctacttccaccaaatcggaattatctccactcaccgaaagatcgggcactccagctctatcatgctgcatatctttattgggagttagaggttgaacaaaaattttcatgccatgatattgctgcacattctcaggttaaagctgctattagtgaatttattgattttgctttaatttggtggcgtgagtataaacaaaaacttcccattaacagtgtcattacttggacccaattaaaaactgccatgcgccacagatttgttccttcgtattatgctcgtgatttgcttaataaaatgcagcgttttcagcaaggttctcaatctgttgaggactatttccaggagttacaaaaaggtatgattcgttgtgggatattggaggacaacgacgctgctatggcacgttttcgtggtggtttaaaccgtgaaatacaggatatacttgattataaggaatattatgatatgactactttatttgaatatgcttgcaaagctgaacgtgaagtgcagggacgccgctggaagcaatattctaacccttttgcaggacaaagctcgacatccaactcagcaccagttccccctgcgccatccacgtccaccactactccacgcgagaagacgaccaaaaaagccagcactgccccacccataggtcgtacacgagatattcagtgtcatcgctgtagaggatttggccatgtgattcgggactgcccgaacaagcgcactttgctcattcgtaacgatggtgagtactcttccgctagtgattttgaagaaattgaacatgcactacttgccactaaccatgtagctcaggaggaggtacatgtcaacccgggcgacactgataggtatgaaagtcttgttgtgcatcgtgttcttagtacacaagtcgctttgcccgagaagaatcatcgacacactctgttccatacaaagggtgttgtgcagaagcgatcaattatcatcatcatcgacagcagtagttacaacaatttgacgagtaccatgctggtcgaaaagttgtcgatacccactcgttagcatccaaacccatatcacattcaatgactcattgatggtgtgaaaataaaaatcacgcgttccgagcgtattcctttgtccatggttgcttatcctgatcttgccgaccgagatgctatacccatgacagcatgctctgtggtacatgacccagcttggcaatatgatactgatagc

SEQ ID NO: 22616 - DNA, 526 bp, Arabidopsis thaliana landsberg
gcagcacgaacaaccccactcgatgggggagggcctgcggacaacagaagactgacgggaggctcgccgccgcccgttctgactgcgacgacaacgacccccgctccgggtggccgaactgcagcagcgcagacctcgggatgggcgctgctgcaatcttgccctcgcccacgccggcgctcgaggggcgaggacaagtacaaagagccggacgccgaagcgcggatggtggcggtgatcccgtcggcagacgggacttctcgagccgcctccacatacgcaccgacggcaggggccatcagccccctggcagatccccactcaaatcctcccggacgagtagagcacgacctccgcgtggaggcaccgtaccggtgcaaaggcaggaccaccccagaacacgaacgtcgccctagcagcgcgcgacaccttgggcggtcctcccgtgcacacggtgcggcagcagcttccggcaagaggggcaccgggagccaagccgacgagctcgacacgctgggggtgacga

SEQ ID NO: 22617 - DNA, 590 bp, Arabidopsis thaliana landsberg
tcatttccaacctaaaaaattccataatcaaatttggctaaccttgcttgattataccaaatcaaagaaaaaattgtcgaatttagaaccaaatgttccatgttcataagtcataactatcttgtgacatgagacagaacatcaacaatttgatatagaaagacaaagatataattactactaccattttgagtttgaagttcagtttccctttgaccgttccgcataatgaattaataacttaaggattcaaaaatggtgttttgattatgaagaaatgttttataaacaaaagaataataaagatgaccaagtgttgttagctcaattggtaaaaatcctaggcgaagtttagaagtcgtcggttcgaatgacgcttgggacgaaactaatattacatattgtggtttcgggtctggggagattacgagtggcggaggcagtggcgagtcggtgcgacgacattgtggccagtggggagggtttatcgaagaacaactgcaacactgcctaatccagagttgcttgctctaatttatgttctttaggaaagcggtagattttatttttatcttaagaaccaaagcttc

SEQ ID NO: 22618 - DNA, 613 bp, Arabidopsis thaliana landsberg
gaggtatactaactaatgcagcgaagataaacaaaaaagaatagtaaatttgcggatttcaaaatgagaaagtcgtcgaacttattttccataaaacaatttatttcatacataaaaagacgtcgtgatcctaaatatctaaagctaaagagacagtcatgagccaaaaaaatgttcttttgataaatgttgtaagcctaaaagttgtattaaagttatttttagttttgtatttaaattgtaactattgtcatggtaattttaaaattcaaagagtttataatattaacaacaagtagacatataaaaacatatctttcaaaaaatttctataaaaattttattcacacaaaaaaatattaaaaagttttacaaatagacccatgcgtagcgtggattcataacctaggatttagaacgactaatcgggagttgccacataaataattaacatatttagcatctaattaattaacatttttgaaaacgaccagtcaggagctgccacatcaataattaacatatttagcatctaattaactaacatttttaaaaatagtaattacttccttaaaatttaaaataaaaaagtgaactaacaaatattagattt

SEQ ID NO: 22619 - DNA, 560 bp, Arabidopsis thaliana landsberg
  unsure (1)..(560): unsure at all n locations
caaccctactggagtcaggcaaannnnnnnnnnnnnnnnnnnnnnnnnnnnnntgctatttgactaggcacaagctcaaaatccaatagcaaccacaactcaaggcatctttgaatgcgatcaaaaaagtaggggataacctcgtagaaaaggtggtcataaacgtggagcacctggatcaacttgtcagcattggggctagtctaagtgagagcttccgaagcgaagtgattcaatttctcaaaaataataagggcacctttgcatggactatcaaagagatgactggaattagtatgaaggtcatttcacacgagctgaacgtagacccaacattcaaactggtcaagcaaaagcgtcgaaagcttggtttggatagcgcaaaaccggtgaacaccgaagtcgtctgacttctcaaagcaggctcgatccgtgaagtcaagtatccaaaatggcttgctaaccccgtagtggttaagaagaaaaatggcaagtagcgtgtatgtgtggattttccaacctcaacaaagcttgtccaaggattgtttccacttcccaca

SEQ ID NO: 22620 - DNA, 482 bp, Arabidopsis thaliana landsberg
  unsure (1)..(482): unsure at all n locations
tgacaatgtttggttnnnnnnnnnnnnnnnnnnnnnnnnnnnnnnnnnnnnnnnnnnnnnnnnnnnnnnnnnnnnnnnnnnnnnnnnnnnnnnnnnnnnnnnagacacatgctttacatgtaaaaccattttacatgcattgaattccacgccctgcgaactgcccaaagaacattttgcaattctccaaaccacgcgcctttataagcgtttaatttcttttaaaggtttgagatgattgtcttgttcattgcttcggcttgcccatttccttgcggatagcgaggtgtagaatggctaagacggatctgccactcttcagaaaatacctcgaattgctcggagatgaactgagatccgttgtcggtgacaatttcataagacaggccgtgcatagaaattatgtctttccagatgaagttccgtacttggacgtgagtcatgttggagtaagctgcggcctgaacccattttgagacata

SEQ ID NO: 22621 - DNA, 755 bp, Arabidopsis thaliana landsberg
  unsure (1)..(755): unsure at all n locations
cacagcgataaaaaaacgagaaaacgttattttacatagagcctctgtgtatacatacatgcatataccaacatcatccatctagggagccaaaactttgagaactttaatgatccaaagaatgattcaagaaattccaatggtcttaccaagtaaccagagaacaagcgacatttcgataccgaagattgtatggagagtgcttctatcaagtgtaaacccaaacaccgtgattcctgatctattgttctcaaagtaattcactacaaaacaaaaaatgtgaagatgaataaacataactaaagatgtgaaggtatgagatttagtgtggatgcagaggaatatattttacatacctagagcttgccgtttttggaatgatatggtgctataagcataagcaggaatgagattgttgttatcgaaatcatcttcttcgtctccataatcttcactatctgattctccattatcatcatctgttggatagtatccgtgtccgcttgctctatcaactaaccttggagtctctccatccacagtctcaaaggattctatcgtcgcacatacatgccacttggctgcaagacaagtcaccgcctgagccttgtgtgtgatctttgatgcacttcgtagtaaaatgagcagtgcagtgaccagcgtcattgaacatagctgagataatcacaagaaaaaacanagactaagcaaaatatttcatcaagaaccaatagtatgtagaaacagaacttact

SEQ ID NO: 22622 - DNA, 119 bp, Arabidopsis thaliana landsberg
acataacgaccggaacaattagcgaccggactatcgctactaacaggtaacgatccacattagacacaaaggaacgatttgcgacggctgaaggattacttgggcgaacggccaagaca

SEQ ID NO: 22623 - DNA, 757 bp, Arabidopsis thaliana landsberg
agtcgagtaggtcggatcccgattacgtctctttaggaggaatatcaaatcttcaagccagtcacagtgtgttcttgtgggttgtgtatttgtggtgctactagcaaaccaacaaaagaaagagaagaggagaagattcacttgtttgttttgggtctcgacgactctcggtttggtggtttaagcacaatgcttatcgcaatggatctgtttcctactcctggtgaaatatacccttgcgttatcagggaagaacaacgccttgcttcagtcaggattcgtgagcagagacaagaagtggttggcttcgcaacacatggcgatcaaagtagtttgacatctttgcgacaagagatacagcgtggaggacgatcagactcctctatcattaagcctcggtccatgatgtgttccaattgtggtcgttcgggtcacgagaaaaaggattgttggcaaattgtcggttttctcgagttggattgaacgtaatggcggggtcgtggttctaacacccgtggcagaggaggtcacagttctggtcgtggctgaggacaaccggtgacagctcacgcaacgagctctaatccatctaccttattagaattttcgcaagaccaattgcaagttctcgcatagatgatcaagggacaaatgggcaatccaagttatgataaactgtccggtaagacaaaatttggcaatgttattccgatattggagcatctcacacatgactgggcagctctctcttttgact

SEQ ID NO: 22624 - DNA, 625 bp, Arabidopsis thaliana landsberg
tttttagtttataagatatttatatattaaaatctcaaatatttaaataatttttgttttatacaaataacgttatatttatgtcatggataagtttaaatttaggtttcaacttaaatcatatatatgaaagttgcccaactttttccatatgagtgacacatcatcacacaataaaatgacatgtgtcattctacattaattaattaaaaaattagtaaaactaattgagaaaaaatcaaaagtctattgttgtgttaaattctccattaatctcatttttaaataaattttttaaaaatattaataaataaaaaatcatagtatcaagtactacttttattcgattctacttattattttttatttttatcgatagtcattaatccataatgcctaaaaatttacttgtgttgtagtttaaatgtttgctacctaacctcatattaatttagtaattttagttggatatttttttattattacattttgtgaatctgatttatcatatgacattcattctgtatatttctgtgggttctgataactttgtaacattgatatacaatttctgacgtaatagtcatccaagacattagacataccaaaaaaaaaaacatgagag

SEQ ID NO: 22625 - DNA, 477 bp, Arabidopsis thaliana landsberg
  unsure (1)..(477): unsure at all n locations
ccctcatgtcaacattattggtaattttctttacaaaaaatgattaaagaaaacacacaaactgctaactttagtataaaatcatcacccaaactcttctttaacaaacgtaatcattttcttaagaagattagaaacactaatcatacgatttactttttctttttgtcaacataatcatatgattctctaaaatcatatctccccgactttctcccggtgtttggcctcgagtcatttacctctccctctcttttgagtgtgatttaatactcatgagacacacgtcganacaactttgacatagtgagacagctacttggacgtctgtcttacctccacgtgtcaagcttagaacatttaacggttttgcttacaattttcatttatttgatcgaancaacaccgtctcatctccgatattttcgggaatcatagtcagagataaattatcacggtgaagctatttttcacttg

SEQ ID NO: 22626 - DNA, 807 bp, Arabidopsis thaliana landsberg
ggagagtgatgcaggtcagcctgtagttagtcatgcatagtctctcagcaacaaacttaggcatgacattgatacttgatcccagatcacacaaagaggggttgaacctgcctatggagataaagcaatcaagaacaaagctacttggatctggaagcttctcagtggtctgatcaggagtgatggtgcggatatactcagcaatgtccactctttgtgccttctctttcctgaccgtaggcagcatgattgcattgatgtcccgtgtcagcagtgaagcttcatctgagccaataccattgtcaactagtcacgtgacatacctgttgagtggggcagaagctgtctcagatgcatccttaggaagagaaaggaggatcttctccattatggctgtgcacttagcagcatgaatctcctgcttagaacgatgcttcctcggataagggataggaggagtgtaaacagactcgggctgcatcggtattcgcacctcacaaggtgcagtctagatccaatgtcgatctacactagaggggtatcgatcgacaccttcgtaaggaatcgtttctgagaagagcgttcgatagggtgtcgatcgacactggaacgtgtcagtcgacaccatctctgcaactacaagctccaactcgtcttcagtgtctaattcttcccacacatcatctccttctctgatcaagatggcattacagctcttccttgggttagcatcaggattaccaggaataaagccctcttgtctcttgatggattgtgcactgtgaactgaatccagttaagcattca

SEQ ID NO: 22627 - DNA, 1330 bp, Arabidopsis thaliana landsberg
gctctttgcttatttagtgggagatgaatatgagagataaacctaatttgtgaataaaaacatgtgaagagatttgtggtaagaagaaaccgcgtggaagtgtatcaaaaatgtcgcatcaaaccactctctcattttcttattttcttctgctttgcttctaatagtttccctctagtttccgtacaaccactattttcacactttttattcgttcccttctcggtgactcgtgcgagagccacacacctctacttgtccctcatttacgtacgttactgtgacaaaatcttagttagataatgacacgatgatcttctcaagtcttgagttctattgatcattgcgaataaaaagacgtaggtcagaagattccgaagtatatacaaatgaataatatgcgtgtaagtgtaattactaggacatgagtttcacaaataaactgaacataaatattgactatcgaaccaacaaaaagttctagatgtatgtcgactatggataagttttttttttttttttccttggtgataaatgaatacggataagttacgtaccaagtagattttcccaatctcaaagagtaaaaggcggcttaagaaggaacacgaacccgaagagaccgcgttagagtaaaatatttattagatatatatctatatattaattaaacttgttttttttggataaaaataactaaaaatggttatagtctttcaatatttgtcaaattagtggaggaaagcaataagaatatatatattctttcacaaatgaatatttccatttttccgagtttttagtgttaaagcggtgactctgattttctacatgtacatctttacaccgcagcttcaatttttactaacttaggcagcaagtcttgagagggtattttcgtcaattaaaaccgtctttactcaatccagtctcctatatataagaggagtgagtcaacacacacaagcataaaacaaaaccctagaaagtcactcgctcgattcgaaactaaaatcatggttgcggaaagtgataatcgtgatctgacggtggatacggcggcgagctgtctgatgttgttatcaggaattggagaacacgacggaagaaagaaacgtgttttccgatgcaagacttgtgagagagacttcgattcgttccaagctttaggaggccaccgtgcaagccactcgaaactaaccaatagtgacgataaatcagttcctggatcactaaagaagaagcctaaaactactacgacgacgacggctcatacttgtccgatttgtggcttggattttccgatgggacaagctcttggtggtcacat

SEQ ID NO: 22628 - DNA, 2476 bp, Arabidopsis thaliana landsberg
ttcgccctgctttgtacgtttcccgcaagttttcatcctctttaaatcttaaacttcctgagctacatagtattgtgtccttagatgtttgctggttttcctcactatgttttaaggtgaagtgtgtgtttgtgtgtagtgtttaggatttgtatttctacggcaacttgttgatgatgacttaagagatactcaacacttggatcttatctttgctatgtacaaattttacttgtggattgagattctagactaacaagatttatgatactttctctttatctcagtgtggtatcaatgaaaaatgttatgtcttttgttgactggtgtgaatactttatggatagttacttgtaattatggatatgaccctttatggtataagctgagtgttagtcttctatttatcctttacctctttttgtctcatggaaaataagtcaattcatgacctttcactatatcaaccatatatgatttcagcgatatcaacgatccgatgatagttgctgtggaatctctagacacaagcaaaaagagaaaacggcgtgctgaagaatcatacttgttacccttaccaaaacacttttgttctgagcaacaagcttctcttgttgattcttcacgtccatcatcagttatagattatgcagaatgctcttatgccatggagaacacaaaaaccagctatgaggcctcctcttctgtatcttttacaggcccttctttgtatatgtttaaagactctatttattcaaccggaagttctagttctggttatgctgctacatcaagcatagaacaatgcttttccaaagttgatcacaaaacacaagaagatactcaagactttactcacatggaattcatttatcacgactccgaatttgcggtcgaagatcttcaagaggttctgaatccagttgagtcttatattctttcttctgcaaggtggagtgtcagcaaccaaggtaatcaatgaaaagctaaatgctttagtgtcacgcattgtgtatgggaattatttgtgattattctttcaccatttggattgcagattccaaagaagctaccacgaaaccaaccattgatcaagagtttgagcagtacttttctacactcatgatgtaaacaacaagaatctatctacatatttatcaatatcactaatcactgcaatgtttatataaatatttcaccttgtttttgaatagaaacatatataaaaccagatcagaacaaaccttttacatgttcccgatgttgcagacaaatgatccatggatctcaccttcaatactatatagtagtcttagacacaaatgctgaaactattcacaatgatcatttcccttaactacttgtccaatgctgatccggtaaggtttatagtgaaacattgattggcataaacatagtaaaaacattgaaagcaatttatctctagaatcataaaaaacaaaaggaaagattattgattcagaataaaaaagaaataaaaaagcattaaaaaaacaaaatcctccaaaatcatatctcttagctttcttccaagaagaaagttgcgagctctttctccaaatgttcttcggtagttttcttcactgcgagaattggatgatagtaatcagagtgagtatccatacacttggaaaacgtcccaaagagtcccgcacacttagtaaccaaatctttgttcttctcagcttcctcttcagtgaaattgcaatcatcattccaagccgtaaatgattctttgcaaccacctcctttcatgaattctacaaacttctgatcttcctcttcgtttatttcgtctagggaaacagtagttgaagacaggaaagtcttcacaaggctttcttcatttgaacgttgctatatccattccaatcatcggtttatagtaatcagagtgagcctccatacacttctgtagcatcgggtaacactgaccgatagtttcattcttctttttagaatcatccacgcaatcttgaaaatccatatatacttgtttgcagccacctccttgcatgaaaacgtcatgttgattttgccaatcgcttgaagaatctaccactttctcctgcatcgggatttggttattgtattgagatctgtactccggtttcaaaatcctagatgatatgatccccatattttctcagcagggagagagattggatcttatgaaaatcaaggaacagacgaagacgataggtcagtcacagttaagagaggatatatatatatagggattacacgagtatgttaaaagagatgaattgaaagctggagaaataaacaaaacacaaatgaacagagaatatccaaataattaaccgatcccaacttacaaaatctacccgaaaatatatgcaaaaaaatcttttcgccaaatatatcggatataattaagagacccatccctcagggtcgtttgataactcaaaaaacaatataacaaatgggg

SEQ ID NO: 22629 - DNA, 479 bp, Arabidopsis thaliana landsberg
  unsure (1)..(479): unsure at all n locations
gaacaccgatcttcaatactaatatatggtttggcaatccagatatttttacgttattaaaaaaaattggtgtataaaccagcccatttttttnnnnnnnnnnnnnnnnnnnnnnnnnnnnnnnnnnnnnatatatcttttcttgacctgtgtgtagaaggatctagaagatccacaagttaatatgaagatattgtaatatttattatattgatatgtatagatttatttatatcttagtttagaaaaccatgttactatataaacatatgtaacccaaagcttatgattatgagagtgaatataacttcttccaattgtaaactctgatcacattatcatgtgtatatttactctcataatctcataatgtgtttctgactaccatgtaaatcaattgggccaagtcccaactgaccttataaacaaatgtgtttattgtttctaagaacaatcgaattcggatctgggaattttac

SEQ ID NO: 22630 - DNA, 3849 bp, Arabidopsis thaliana landsberg
atctgaattatctgaggcgaatttgatccgaaccaaaaatcaaaaagatatccggaaactcgaaatagttctaaaatacggtatatacggccgtatatatatatagtgtatatgtgttgtacggtcggaagtcgtactgtgttatggctatacaattgtttaatacggtaaaagctatacggtctgtatatagaacaattatacggtggattgcgcatatacggcgatttttttaaaaaaactcaaaaagaagaactccgtcattttggtaatgtttggaaaaataggttaagaaaactattagtttgactctcaaaaaataacttttccatcttttttttctattattttcctgcttattagttatttaaaattttataaatattttgtaaaagtgatttctgttgtactcatgtaaattattcatcatgcatggttattacagttatgttttattgttattataactttgtaattatatacatatcttgacaaattttatatgtatatatatatatattgttgaaaacatatccaccgtatagtcccatcataaacggccatatatacgtctatacactatacgatgctctatcgtacacctagcgtataacatacggtagttataatttaataccaaataagaaaaatatccgaaataacctagatatgcaaaaatatttgagtatatttctcaaaattatacaatgttttacaaaatttcattaaaattaaactaattattattaaaattgaataatcttttaagctttttccgaaaatcgatctgaatctaacaccaatccaaactgaacccaaaccgaatagtgataaaatccgaacggataaaataaattctcctatccgaatccataaaaatctgcatcaaatctgatttgaaatctgaatgatcatgcctggtctcaactctcaagttatgcttacatgatcgacctgaccccaactaatagtatggtcactagaacatcaaggcctatttacattgtacttttattttgtggcaacagaggagtaatcgtcgctacaacgtggatatccatgaaattgaacacccgcctatgttcaacacaactcttagactaaccaactgtgaagaacacttgtgatctgagtggaagctacaccttctggaatgcggacaacattccttgtactgtatgtcacgtcgtggcaacgaaaacgcagctcctgagcccaaagttgtagttactcccagcaacaaaaacaatgaaaacgacataccgcctcctttgaataatgatgcatcatcctcaaaatcaccagcaattactacagttacagaatctgtaggctttcatgagaccatcaatgaaggagacacagtggaaagcttcaaaagtgtaatttctcccggtgtttttgtctctgaaatgcctcagcctagattctgtgaaatcatgatatcaatggtataattacccatcacattgctacttattctctgtcgtgcccttacctttttttgttgtgtccatgagagcaaccccaactgtttggataatcaggtctaaaagctcggacagtgggataacgtgacatagatccagatcatgagaccaacttcatgagtaaatattgttttgtactgacgaattggcatggatagtagtatgcttaacaatctcatagagggttttgtctttacagtttccaaaggcaagacaatatgtgacttatatgcattagatagaattttgttggttaatataatactacagtaacacttaagtacttgcaatctattgttttgcagtattctcccctcaagtgtctcgatcaacatgtgccggatttgttgttgattgtggtgaagatagggatcatgaatatggtgattcccctactctttattttaagaaaggaaagaagagccaggctctcgctgccagaagaaaggtatcacaaaatgacaatgattttgcactagtttatgaggtattgatttgagcctgctaactatctctcactaaaggaggaaatttttgatgactctcacataccggatcaggttgtactacaccatagtgccagagcaacaacttgtggtcattgggccaatgtgaatcttctatccacagggtaaactatattacaagcttgcctttcagagttttgagatcacagttgatatgattttcttctgcttttccattgcagagatgaaaacgtagcagaaggaattctcaagctggtgtagtcgatgcttccgagaaaaaaaagaaaaccaaagacatacttttgctgccagatagaaggtataacaacaataacaacaaaaaaaaaaaaagacaacaagtgtatataatatgttgattttgagcatgcttatgaatctatcgagatccataattgcaggagtttagctgcaaagagtgaaactgaagctagatgaaacacaacccatgtatagctttcactattggtatcgttcaagccctgaaatactactttgttgtgttgacaactttagttggaaaaaaattgagtatatctagaatcattggaggtaaaactggctctttgtatagctgtcacaattggtcaagccgtgttgactctttacttggaaaagaaacttagtataagtagaaccattggtcagtcgtgttgactctttatagattgctctttgtatttcgaatcttcttgtgtcttttacattactatgtacatgaaattggtctaattgctctttacctgtacaaggaaccatatagtattgatctaattgcctttatctttgtttggtgatgctgctctctagaaaccctccatggtgacttacaaggagccacataacatagttctaactcccatagttgttactctgtggacaagaccctgaaaccagagaccaatttgacctgtataaattaatatcaagagaaaataatcgcagtaaggacattattgatacctttaagactaaagtatgtaggtttggacaactcttgaggagaagtggcattacttgccaacctttatccttggcgtgagaggaatgataggagacacggagagacatcatcgagaacagagaaacttgtcaagctgattgatagaaatatgaggaaccacttgagcaccataatagcgaaagggggagaaaaaatcattggaggatttcaagtgtggtttgcatcacgacaaagtcaaggatagatagattgaaccatatttgattatgtcttaagaaaagtttgcattttgatgtataaacgtttgttttttctttgaatataatttaacattaaattcaaaaaaaaaaaaaacttacaatttaattaaatgaattatgatgttgtttcaatttattcataaaacagaatcggtagatagtctcaaaattattaattctttgcagattatcatcttcctatagaggaaattgattttgaaaattaggaatttgaataatatttctaagactttgtttattatatttatcatagttaggattttaattataatgtttttatcaatttgggacttttaatctttgtatataatgttatatcataattttaatattgcaaattattgtttctgtataataatgttaaatttaccaaataatcacaatgacacattggccatgcacctttcaaattgactacgtctacatgcctccgatttgattctcctaaaagttttacttgtttttaaaggcctcgcaaaacagcagctgtttaacagcctcaacatacccacaaatttgcaactaacatcgaagatatattaataagttaattgtaacgatgattaccgcagctcattaaatatcctgttttttcatcatttagcatt

SEQ ID NO: 22631 - DNA, 1684 bp, Arabidopsis thaliana landsberg
cggattaattgagtaaaatcctactatcataacacccctatcctttcctttgcccaggacagaacgggagcgtcacgttgacgcccaaagtcagccaaccaaggctcccggaacgaatccgttcgcccaagtcatccgaccgcgagtgtcgttcctcacgaacgcggcctaaggctttgcaacccgtactgcgatacgtgagttgtgatagtccggacaggactaattataccatgggagacacgtggttttataaaatcagagctttattactattaataaaaatatcgagtcttacatactatacgcaaaactatatcttgcaaaggcaaaacaaatctacaccggttggcctaacgtcctttgccccctaaggtctccctactaaaggttgcctgcaaaagagagtaagggatgagcgctaatcgctcagtgaattcaggttcccctaaacatgcaataattccccacccaaacccaaaataacaagcaacaagcaaccaagcaatgcaacaatcaaagttgtatatactccacggagtatacacaaataatgcgcaacgaaagtaaatatgcatgcaactaactacttaaccactaaacctagggccccgcgtattgatcttcccttcccttagtcgtgaacacctatacacgtagccacaaaggctaaacgagtatagaacatcactaagttccgagtcccatattgtggtggaaactcaggctacatcgtcatgcagcagcactcggccataggttgcgagcccgtcatctccgagtcttcgtaccattcatgtgtagggaactagccactatgcacacactactaggatacggccttagggaagcatcacatacgcaaactagactaacatgcatgaaactaattcatgcaacaatcaatcatgcacaagcaaatataaaccatggagacttaacctcacatagtttatcaacaatcaaccacaataaatcaagcaatcacacaagcaagatttaacgataacccgattatatgacttaacgtataaccgaggatccaagcaatcaatgtagaattagcacctaatccattctagttatcaaacaattaaataaacaagttggtttacatgcgttcattgaacaacatgcaaccacatgcaacacgcataacctgaactcaccttggcttagctctcaggaaaacgactactctcgactccctatacggactacgatcagaccaagctttctccgacggaatggatgtaagcattggaccgaaccaacctcccaagacctattctaaaactaagagctaaaaaacataatcatgattagtcccgctaatcatggtttagctaaccctaatcatacttaggaaataataatcctaactaaccattactaatcacacttaacaattactaatcctacttaccctcataattaattacttaaatagtaattaactaaatcaagttcctaaacatatggaacttacctctgctaagcgattaaggactattagacgcctagactctcgactaaccgctcaaaggcacgctcggtaactctcggacgaactaaagctaaagtctcgggttttagtgatttttggtgtgaggagacaaatgaaacgaaatgggggggggtatttataggttggttgggcggcataggtaagctagaggtggaa

SEQ ID NO: 22632 - DNA, 520 bp, Arabidopsis thaliana landsberg
tttaacctgtgggctatatatatatatagctttgcacacataagaacgaaacataattgtttactccttcaaacccttcttcattctgccattcacaattccttcatttttaatttttgattcatcctccattttttttttctgaaaaacaagaaaagttaaaaaaaaaacaaaaaaaacaatctcggttttcgtcattgtattcatctttaatagtagaccgtagacacgtattttgaaggtatattttaaatatctctgtataatgaaaatttcttactttgcgtaattttattgagaatctaatccgatgaatttggtcaatgcaacttatttatctacaatgcagggaattacaaaatttaatactatttctcaccaaaaaattagaaaatagagagaagaaaaatgaaagtggcagttataggaagtgggataagtggattaggaagtgcttacttacttgcgaatcaaggaggtaaggaagttgtattgtaccagaaaaaagagtcattaggag

SEQ ID NO: 22633 - DNA, 767 bp, Arabidopsis thaliana landsberg
aacaaaaggaccgagtcattgtcaaagatgaaaccatcatttgatttaaggaacacaatgcaattctcctttgcacatgggagcttatgtaccgagcagcagagattcgtctgagctccaagaaagataactcggtcgttcaagtcattaacttgaacccactttctcttccctctttcttcatcaagtctaaacactctgaaccatgtatatagatattcgtcataacgccgcccagcaggtgtgaaccgttgcactagcaacaactcctcgcctgactgaaccagactttctttagaagactgttgcgatcctctgactgaggggatctccgtaacttccgaagaaacttcgacaacaaagacccgtccccttctacttgaatcaagagcataaaactttcctttgaatgcaatcatatctcgatatgaatacttttcaggatgctccataactcgagtccaactcatgttacggcttctatacatcaccaaatttctcattcctccagcaaaaagcaccgcaaaatctctgctatcttcactatctagtttaagaaattcaactctcttgtttttctccaccaactctagttcatcgggtaatccataggggtaaccactgagttgcttctcaatgtaggttatctgcatcgaagattatgggactaaattgaagacacaaggaaaataatgataataataagattagaagattacatgctgctaatgcgatgggtttgatatcaccttaaatcctatatatct

SEQ ID NO: 22634 - DNA, 994 bp, Arabidopsis thaliana landsberg
aaataacagtcacttatgcatacaagaaagacaccaaaggagagcgccacggtactcctgaaggttaggctcttactcttgtagttgtcttaacttgtggattcagtttctttccatcattggaacaataacaaattacttttgtgaattacagagaggcttttggctgcaaattcccaaagaagcagaccccataagctattcgcaactggcccttctacgcataatgctcctaaagttaacggtctacaacctgtaccaatcccgggtccacgtccaccaccacaaccacaagtgtatcaaactcagccaccatcttggccatctcagccacaacaacaatacggcttagcggttcgaccacctatgcagttccgtccgcctcaaggtatgcagtcgcaaccaccacctcctcagtttctaaatcaccaacaaggtttcggtggtccgaggccgccgccaccacctcaagccatgggaatgcaccaacatggaggatggccaccgcaacacatgcagcagcaaggtgggttagtcatattaatattaaataacaaatctttgggagattgacacaaataggaccaaaaaagttttttcttccaaaaataacacctcattttaaaagtttcacaaatagcactaaaaactttaattaaatattaaatataaataactaatttaattaaaataagtaaataaaagtaaatattttccgccaattgtttttgtcaaaatttatctgttaaaaacatttccgccaaattttctcgccaaataaattttcgtcaaaagtttcgcgccaaaaaaacaatccgtcaaattttcccgccaaaaaatctttcgttgaacgcttcctgaatttagtgaaactttttttgaatttcgtagaatccttcctaaatttcaggaaaggattccacgaaatttaggaaagattctacaaaattcaggaaaaattctacaaattgcacaaagcatttcatgaaattca

SEQ ID NO: 22635 - DNA, 956 bp, Arabidopsis thaliana landsberg
ctttcgattttgcccgtacctaatgattttcgtttgtccatctaggaagtactcgatttaaagtttagaactaatttaaacaatcattgtttcgataaggttaagtatttgaaatcacttttagatgactttggaatagttttagaaggttataatccagtgaagtttaacgatgcatcgttattccttaacataaatagaactctaacttaaataaatttcataacaaaatcaatatttttaacgataatgttggaacataaattatatagcgcatacgattatttagaggaatttgtaaactaaatattaatatcttgttcgaactcgaaaatagcttacttttttttcttcataagtgttggctttgatatataacaacaaagtgttacaatagtggaaaactccacttacagaattcgataggctaatgagcattatgatattaaattatcaaacacatatagataatctcctttaattttcatctactcagaattgaacatcttcataatctgcaagttctgcttcatcttgtctgctttcattggaaatgaaatggtatatgttggtcggtaaaagacgaatcaaatttgtaaactaacaaggaactattgaaagagtaaatcttacagaaagttcaagcagaaaataaaatactaagagaggacaaatcaaatctctcacttaacccccgtcctaggaacctttacacttaacgcgcgacccagcggagccatgagtgcaatccaatcaatccaaaacttctgcaagagtctcaactactaaaatcctaaagcttgaaggaaaggtaaccacaaagcaagccaaagatcaaatactaagaacttagaaatacacaagtggccgagtccaaactaattccgaggttacaaaacgcatccttaaactactgaaagatacataccccttctttattcattcactatgtcaca

SEQ ID NO: 22636 - DNA, 451 bp, Arabidopsis thaliana landsberg
aagtggcactcatgagaaccaatctcagatctggacgccgtggaagaagctcctttaacactataattaagaaatctgcaaccaagaagtgaggggcatattattatgagactctatttgcagaaacctaaacatacattagatatatagatatgtaccttcattcatgcccctttcatgaatctcatcaacaaaaacatgtgtaactccattcaaattgcgatcactaagcagccgtctgagaaggataccacttgtacaaaatagaaggtgggtattctttcctctcattccttctagacgaactttaaacccaacctatcggaaattctctgttaggtatgaagtcatgaataaacaagcatcttttaacaaagtattagtgttaattggagtaatcagacagcttttgaatcgatgctcaattgaaggacaaggattttggctaacc

SEQ ID NO: 22637 - DNA, 1616 bp, Arabidopsis thaliana landsberg
cgagtttgtttttcaaaagataagcttagtcatcaacggtgggcttttttagaaagtgaaacaagacaccacgtcattcatacgcattcattagacagtagcagcaagaaacttttggaaaacaaatgttttaggaactgtaagcacatgagcaaaccactcaacgtttccccaaattccactatttttgcgcctttcaagcgtaatcaccgcacaccaaatcatcttcttaccgcctctgtcaccagtcccactataaggcatattctgctcccacaaaaccgccatctttccaccatattcagccaatctaacacaagcatgaagagagaacctaggtagtcctaccaaaccctccaatttctccgccgtcttagctcagtgtcataccatcttttggagcactacacattcattgagtacatatgcgcactacaagaaaacatcatgaattcctatttacaaggaacggtttgataatgaaccttatttatgaacaaccaaaacatcatgaaacactcttgataattatgagttgtttgtagggttttataaatttctgaaaaagtgaacagattctataatcaaccagtggcattaaatgattagaagtgaaacaatagaaagagttatacatcatggttgcatgcatatacaccacacacattcatcaaatggtagcaacaagaacattttcgaaaacatatgttagagggactgtaagcacatgatcaaaccactcaacttttccccaaatttcacgttttttgcgcctttcaagcgtaatcactgcacaccagagcatcttattagacccactataagtcatattctccttccacaaaaccgccatctttccaccaaaattagctaatctaggacaagcaagaataataggtagttgttctaccaaaccctccaactttctccaccgtcctagctcagtgtcataccatctgaaaacagtgccacgccatgttttttcgacagagtacaaaacgttctctatctcacaataatcatatgaagacttataactacacatctctgattcaacaaggtcccatatacctttcttgggattgtaagaaaccacctttctcttagcccctacataccacttttcgtcaatacataagcttttggagtaaatgttgtgttttgcttcgttgtaagggataggtacatgatcccaaacttgtgtttttgtgtcgaacacctcgaaagtgttcttcaagggaagagaggctccatctttgcaacttccgcctacatatatctttccgtcaaggacgccagcagaaactttaactagctccactggcaagcttggagcctcgcgccacgtgtgagaccggcaatcaaaaatcgagacactagagtaaggtgatatggatctgccaatgttgtagatattagaaccaaccgccacgagactggaacgttgcacaagacgaggatgaggcattgatactgtagccaaaacatacccacttgacttcttcttattacttggttcagaagatagggcttgatcaaggttcaagcaaagagtaaaccagctagggctctcaaaggatttaagttaagcatacatatagacaaccctcggtgcg

SEQ ID NO: 22638 - DNA, 830 bp, Arabidopsis thaliana landsberg
tatgtgagtcttggaacaacgttatcacagaggcacggggagtacccgctaatttgcatgttggagtacataagaacaatgttgatggattggtttgcaactagaagggctcaagctgaagactgccctacaacattagctccaagagtgcatgaaagagttgaggaaaacaatcaagctgttatgtcaatgtctgttaagcctatttgcaactttgaattccaggtctaagttcggactagggaatgtttaattgtcatattggacgagtctacttgtttgtgcttggaattgcagggtttagggatcccttgtgctcacgcaatagccagtgctgctaggcttggcgtccatacagattcgttagaagcaaacaaatattttaatgagttagtgaaactaagttacgatgagaaaatctatcatattcactatgttgcttcagaggtcgcaacaggaattgctttaggaactacaggcgagctgcatccatcttttgttcgtcggccaccagggagaccaaggaagatacgaatattgtttcgtggtgaattcaaggctagttcctaacggtaaacagtacaaagtccattatagtggttaaaagctaacagcctctctcctttatatatgcagcgaaacagaccaaggtcccgacagaggtgttcacgttgttgtggtgttggccacaacaaaacctcctaccctaatgctatataaaccatcaactaatgctatggggtgttaaaaggtgttatgaggaaactttctggtttgggcataataatgtatgttcccgcatatgttcggaagcgggtttgttgacttct

SEQ ID NO: 22639 - DNA, 3151 bp, Arabidopsis thaliana landsberg
aaccactttcgtattcagaagaatccgtcgtagctaaggtgctttattgtttcctaacgtttttgtcgatcatcatatggccaagtagataatattttagccaattaatcatcaattgttgcagttatattatatttggtgattacatcaaacattctttcgaacaatatcaacaggagattaaaatcactaatgatgatgagtccaaatcttaccgacaatgacgatgacacactaaaccaatagtagctagctagttgaggaattttgctgatgacgtggttaattatgccttaagtacaatggtcatctcgccacttgcattgccgtacggttctttgtttttggattatggcttctttgatatctcaagagtcactacgaattctatgtcccatcatcttaaatactaagaatatgaactgttttacatagtaaacccaatatgcaattacaaaactttaaccaaaacaaagaaaaaaaaatgcaattacaaaactgagagcgtgcatggagtgtgagaactctactatggtttaacttaataaaaagaagcaacccatttaatctactttggaatttgagtttctgtctagttcagtacttgtcataaatggcaacgtaaatccccttgcggcaagaaaagtgatgatcgacgagaatcaacaaagttgacattcccttaacacgtaatattgatccccaaatattggaattttttctcttcatacatcatcatgatcacaagttactactatatgcatatcaatctctatcctcttactcacaatttgtcaactctcgagcatcatatcatcagcttctcttatccacaatctatctccccacaaaataagattctccctttagcgttgctccatcattataccaagatacctctattcataaagattacatgcgagtatatgtgtatatatagagttccaagactcacctctccaaaacaaactcatcaaaacaacattaaatctccaatcacttcaaagaaaataatatacataccaaaagagtattactatacaaatggatgtggtagcaagattagcgtcgcaaagagcggtggtgatattcagcaagagtacgtgttgcatgtctcatgcaattaaacggttgttttacgagcaaggtgtgagcccggcaattgtagagatcgaccaagacatgtatgggaaagatatcgagtgggccttggcccgattaggctgtagccctacggttcctgcggtttttgttggagggaaattcgtaggaacggccaatactgtcatgactcttcatctcaatggatcattgaaaatattgctcaaggaggctggtgctttgtggctttagcactcgtttgatctttactttgacctttgaaagtctcttcactttatgtacgtttaattaaagcatatgtgaagaggaactactttgtattgagagtaattaaatatgtctatgtggaggttgatttaatgattaactataacccattatgggcgaggtcgcataaacctctgttttatttcctactccttacaaattaattcacaagtcaaaaatacatgcaactttctctaagtgaccaaatacctctttgcaaacgattgaatcaaactcatgatcataacaagtttatgccattttaatccacaagcgaaggttcttggcgacaactttccagctaatcttccgtctcttataacttgtttgtctttcatttgtcgatttcttctcttggctttaactgatctacaattttaaggctatttgtagatttaaggtacttagacggtaataactgatggaagcccatactgttttcctctaacacatgttgcacacctaggttatgaatgaaaacgtgcaattcaactacggataaaattcgaagcggttctaagagcatcctcattggtgactttttagagatgtctttactatactttattgtaaaaattaatattattttaattttaagtcatttattagtcaagtgtttttttttgtgcaatgaggatggtcttatagtgattgagtagtgatttcttctactaaaattgtaagcaaattgaacccaaaaaaatccgacctaaaactaggtcattttatttgttaaaacgttagacgatttaacccgcaaaagggtcaaccataaaaacattaaaagactcgatttttattatttgatcactctgaatatattaacaatttcatatgaaaatattaataaaggaataaaaaatttgatgaaaatgttagtaaataaatatcataaaaacaaagaaaacaaattctttcatatgatcatattggagaaggattaatcatagaaaaaaaagagacatatatatatatatatatatataattatatttaatcaactacattcattacaaaaacatcaaaaactattatatttcttttaccgttgatgtatgtaatcaaaaacctcaaaaacattttatagatatgctcttctccgccgatatatgtaattttatttctttttaatatatagtagatgccaaaaattatcaaactttaagaactttgatatgcgggtagtcgtaataatatagtttaatttgagttgaaactcgaaaactattatatattcccaaaagacttcgtcagttaattaagaatggaaaagaaaagaaacaagaaaaaaaaaactcaagtggaacacgaaaagatggtaaaatttaaacttaattcttaaaaatttcaaaatgacttagcattcaagagaagatcgcacgacgagaaaacgtgttgcacaggtgatcttcgtcaatcattttgagtttgtcttttgtcattttttgatatttgaagaaagtttcttctcaattatttgaacttccccgggtaaatatgtatgaataattttgctcagagttgttccctttcttgatcaaggcttttatgttgacctaacaatctgttatctaatatttacatgtaatttgtttgtcaaagcagctaaaatatgaatcattcggaacaggcttcagcgtacaaagcggtaaaaaacatagttttggtgggacgtaccggaaacggaaaaagcgccactggaaactctctcatcgggaaagacgtgttcgtctcaaaagcgaaagcaacaggtgttaccaaa

SEQ ID NO: 22640 - DNA, 2501 bp, Arabidopsis thaliana landsberg
aggcaaagactttggacacataaagtacttggtttcttctgtgtcgtctatgttaatcttcagcattctgcattgacgttccttcacgctcttcgggtaaaccagcatctgcttacaagcttcgttcctgaaattatcgatgctcatgtctacaagacttttataaaggttgttgaaacaacctatgctgactttttcttttaatcttccgtgatgctcaagcaatctcacaattgttcccaaaggcatggtaagaaaactatagacaaatcaacgaagtcactaccagattgaatccagacaacgtttttcttgtccacatgatgtacaagaagaacactgatcattgttttccctgatccttgatccattagagattctggagaaataattcacgaaagatgagagaaaatgagtgcagggataaaaaacaaactccacaaaaatcccagtggtacataaagacttaatcttttgagcttccctgtagatggataattagagttacaagtctcgaggatatatataaccattacataatatgcctatggactatatatataatatatggtagggaatacgaagaggtttcgtgtataatcttattttaactgaacgtgaatattcaaaacatcaaaccacgcgaaactttgtgctttcccaatgacttttattaaattgggagatgaagcaaacgaaagagattactccataaaggttttaaaaaaaatcaaaagtttggattgttcaaaaaaaaaataaccaagagacaaatgattttctacatgcttatacaattcatgactacgaagaaccctattgcataatactttcctcttattgcttttacatcgtttacttacttgccgcttaatttatgaaataaaacacattatgtattgtcttttatgtggacaacgtctcggaacaatcttttctgtccaacgtgaaaagagtgttttggaatcgcagccttgtgcggttgtgccaaaccaaaggataccatgacacaaggggtttgacatgccaaatgttgttccaaacgtctctagaggagaaaaatatatgcacatacgatctccaacttgccaaattggaacattcattcaaaaatgttctccattttccctcattttgatatccacacaaaaatttcaattatgtttaatattttgcttcttgatcaaatcaaacacaagtgtataatacctactaaatattatcaacaagagatgtatataatacgcacgggtaaattatctagcatttgatacaagttgaaacaaactaatgggtttagtcataaattgaaatgaagtataaaaccggtaaaaataacgtggcatctatggagtaacataatttacaagcgggttaacaacgaaatattagttttgttgtaaatccataaccaatttttagttgagcataaaaagaactctatgtaaaactcttatttgattacaaactaaactagacttaaaactgagaatttgcaataaataataaatttaaaacggcaaaataaaaagagacttaaaatggagttgcggaaatcctttaaacgtttgataaaaaactaatcgtttaacaaagggtttgaatggttacggcggttggggcggacaaaaccgtcaacggatcagaccgttttttatttaccattcatcaattatagtctgcagtggtccggattaaaaaaaaaaaaaaaaaaaaccgttgcgaaccatctgcgaaccgtttttacatataaataaatttggtccgcagcggtttattgtccgccccaaaaatgagatggactaaaccgcagacaaattagaccgctttgtccgctgccttcattcatagcctagatgtgtatcatacaaagcgtttctttctctctctcaaacctaattagaaaacaaattttagatttgtgttaagaaacaaatcttacttgttatcaaatttcacaaatttagatagattataaaacttccaaatccacatatttcaacatgaaatgattttccctcaggttacagatagtttattaatgatgcttagatatttccttctttcttcgagcccttgtgagttttttcatacaaaggtgttacagacttacagtatttagatatttttcaattacgggagaggtgatttattttggtaagaatatatatatatatgtgtgattagccaatccaatttctaaaggctaatatgataatgtttgtgccaacctcgagattctccagataaaaaaaaagataagtaatggccaatccagtttcgaacatcatccatctcattggctctgtaaatgagccagatatcattaatgtcagattcagaattttaaataaaaactttgatactaaattgtagggtttataaatcataactgggcaaaatcaataatacattacaattgtaactcaaaagtaaaaaaatacatcaaatgtgttgcaaatcaaatctcttacattgtctagccatgccacgctcaacgc

SEQ ID NO: 22641 - DNA, 620 bp, Arabidopsis thaliana landsberg
  unsure (1)..(620): unsure at all n locations
aaaaaaaaacaatctacactaagcaacaccatataacaaatatcatatacattttttttttttgaattcaatgttaaattatattcaaagaaaaaataaacgttcatacatgtaaatgcaaacttttcctagcataattataaattcctatatcctcgatgttatctcgatgcgaaccacacttggagtcttcccacatatgaagttcttaacaaataacatatacatgtacatatgaagtttcaatttcatgagtctatatttacttttagctatatttacatatgcatacccatgaatatttcatatttgacaaaagtaaacataaatatacacaagtccaaaagtagtactatatatacatactatttttttgacatcatatatacatactatttttcatatattacctatgtatcttgtgaaaatcttaaaagccaggttatcaaaaaaagaaaatcttaaagagatagagaaagagaaaantctagtacaatgggtttaagtaccaaaatcatgcaagctaacttgcagttgcagttggtcaacaagtctttntgattatttttttgcttttggcaaagtttttctttgaacttaaaacaattttgcagcgagag

SEQ ID NO: 22642 - DNA, 612 bp, Arabidopsis thaliana landsberg
gatctagcgggttcgtatactagtaaaaaaactatgtatagccactttaattttcgtggctaagcatgaatattcgtggctataagtcgatataaccacgtttagtcacgcaaaatatttgtggttatagcgtcatagctttattttttcgtggcttttcgtgggtggagattcacgaatcagtcactcttcatttcgtggttagatatatagtcacgaatttgtcacgacgatttcgtgacaaatttagccacaacataggagcagcactttcgtggctaaattaaggaagccacgatttgattatgtagcataatcgtggtaagtcatttaaagctacaaatatgagaagtagcattatcatgacactgttgccaacgttttgtatttttggtgacaatagtagggacgttcaaacaacgaaattttatttgtattatcgtagctttgtataattttgaaagaaaaaatataataatcaaaatgctataaataaacctgaattgaaaagcctaacattcaaataacatgagtaatgagaatatattacataagctattagtcttgtagagattacaataccaaaagggcaaagagtcataccaaagatcc

SEQ ID NO: 22643 - DNA, 472 bp, Arabidopsis thaliana landsberg
ccagtaattcacccaagaaatcttctaaatcgtctgggatcatcactggttgctgttgaattctgttcaactcagaaaagttataaggaaaaggctgcggctgatgttgttctggaagtaaacaatactgtggttgatacacaatatcatgaggctgttgcagctgcaactgttctggttgatgcaaatccagctgctcagccaaatcatgaggctgcggttggcaagaatctagaggtgctagcggttgatgatactcggcattacaaggctgctgcccttccgatgcttccacaggttctcctttcttctgcttcttcttctcttctccaacttctttgttgcttgtggagtaagtaaatcttgcacaaagtgtaatcctaaacgcacaacaaaaacaagactcaaaacagaatccaaaacttgaaaacctaaataacttgggaaccaagaaacacatacttaccttgtc

SEQ ID NO: 22644 - DNA, 465 bp, Arabidopsis thaliana landsberg
taggggtactttcttggcgattgtaagagtgccaacttcttcagtatcgatatctttatgtgtcatcccatcaggcaacttccagtcgaagaagtaaagtaagttcaagagtcccaattctacagtagccatccccatcgatatcccgggacatatccttcgtccagacccaaacggtaagagctcgaaatgttgtcccctacaatccacaggactatcgataaacctctcagggtcaaactcttccgggtttgtccagagtttgggatctcttcctatcgcccaagcgttgaccaagatccgtctcttgggaggaatatcatagccttgaaccttgatgtgagccattgtttcccttgggagaagaagaggaactggatggtgtaatctgaatgtttccttgatcactaggttcaagtaaggaaccttattggtatcttcttcggggattctctctttatttct

SEQ ID NO: 22645 - DNA, 608 bp, Arabidopsis thaliana landsberg
  unsure (1)..(608): unsure at all n locations
cccaacgggcatccaacgtcttaataaattttcgagaaatgtattatggaaaattgctcattaaatgacgtgatcaggcccatcatattgggcttaacaaaagaaaagcccattatagggaaataaaataaaacgaccatattagaagcaatttagtgcaaagtggtttttnnnnnnnnnnnnnnnnnnnnnnnnnnnnngtcgggaaaaaaaggaaaaccagatcggaaagttcacgtttttcaaatcttctccggagaaatcagattacttgattcttcaaacaatggatgtgattaagacgcaacagatttcagcaaggacgatcgagaaagtggttgttcatccactagtcttgcttagtatcgtcgaccattacaatcgcgtcgctaaggattcaagcaagcgtgtcgtcggtgttcttctcgggagcagctctcgtggtgttgttgatgacaccaacagctatgcaggtatgccttatttatccttttccctctagttctcttggatcccagatctcagattctgttgaggtctctgctaaactgaaacttgaattgggggttattcatacctggcttctaggcagatgtgtgtaataacac

SEQ ID NO: 22646 - DNA, 659 bp, Arabidopsis thaliana landsberg
tatacatctaatatacattaatttcaataatctctgaaaatgttgttataaattttatgtgtttattttatcgataaacaaccctatgtaagtttactttttattttgatcacttaaaatattattaaattatttataatttgataactattttgtccgtattttatttaccattcaaacattctcccgcaacacttattttttaataaccgcacttgttatgcattatgtgtttttctccaatttaccgcacttaaaccgcatcgcagtactcaatccgcttgtcccgcaccgctcgatccactgtcaccattcggtgcctacagcggattgaacggtgcagaacataaagcggtgaagaacataaagcggtacggtttagatgtggttagtgggagagaaaattattatgcggatcaagtgtgtttagtacggaacaaacaatgcttgaatgatgactattacaagtgtggtataataataataagttattaaattttaattttaaaaaaaataatttttaagtaaaagaaacaaattattttttgaacaagattatgttatttgataagattaatacataaaataaatttcataattttctaaacttaaaaatatacatatattatatattatatatgtatatacacatatataca

SEQ ID NO: 22647 - DNA, 907 bp, Arabidopsis thaliana landsberg
ccatgttatcacctcctattctgttatttctaccactcatgatttggtccatttttgtaacagtgcatctccgaccgggctaatctaagatctgtctgaagatatcacatgagttagctactaacacttaaccactctctctctctctctcaaacaacaatacacaatgatataaaatatccatggaaagcacttaagaacgtatttgttttcttattatctctcaaagctccaacaagcttgtttcagctgtttgtcaaaagaacactacgtgtctaatgactccttgctcttaatttttgagccgaggcataaccaatggaacgaaggaatcgtatacggacccttgagtaatccatcagctatccatttgtatgcagcttcagtcatatgaacgccgtcccaattcacatactttgaaggatcactacaatattttactcctacactcccacattttttacttaaggtgaagttgtacggtcctcctaaaccgcaacaagcaggtaagggtctgtccatgaaccctagttgtacaatgaattgaatgattaactcaattatcaaattgaatcaatgaacttggttttttaggtaattaaactaaggatcaagaaagctaaccaaatttggatggttcttggtaaaggcgcaacagagcattaaagtagtcaccatatatgatgttgacatgagggtaaagtttactgagtctgttgagttctgcctgaagcttctcgttgtagtattctgaaaaatcgttcagccatgtcaaacatcctgttagaggatcatactcttccttgtttgatgtttggtataatgttaaatacgttgctgagcattccagcgggaagtttccaggaactaggaatgtttttccttccatatcgaccaactcctagat

SEQ ID NO: 22648 - DNA, 1373 bp, Arabidopsis thaliana landsberg
taagtagttggtcaaacttttattagcagttactaagtgtaagtaaataccaaaccttaagtaaagtaattgaacaaaattaataatagacccatgcaatgcaaatgacaaaattgaatttaagttccataatttaaacatcagagagtcctgagctgctcatgaccgtgagctcggctagtataccagttttatactctgcagaggttgtaccctttacccacaagtcatgttacccatctgccaaggggtcgcgactcccatacacctctacctaggaagcgcgacagggcaacactacgaggcctttacaaagttccactagcttccgaaaacccgctacagttatgggaagagcacttgcaagaatcccccgtctgaccgccatcgcagctaaatcaacccgagaacctccttgcatgcaactcccctactgcccttgccctttcgggtaaggtagtcttccactagctttcctaattagtcagccaagggcgtcccattaaacccttgtggtggcacgtgtttctcaagttaagctctatgttccaattaacattaatgatatcaacatgaatataaacagaataacaacaagaattggaacatagaggtaataaatgattatcccaaaaccatataaagcaatagcaaactacccaagtgattcaggggtaaacaaggtaatgagataaacaatctagggtgacctattgggtcccatcaaaattaacctatgcatgagtatgtgatattaaagaacattattgggtaaaaagtggtcaagggcacaacttgccttcaatgagctcctgctcagctacttcaatatgctgctcacccgtatcctcagcaacgggttcttctactcgccacaatacaaacaagcacagtgcatatagagaaattaacattacaccaaacatataaacaaattacacagaggtattctacatattaaaataaaaacttaggaactggaatcataattttctgagttatagattttaagttatggactttcaaaggttttatgtgtttaaaataggcttaagtgtgaaataaatttcttactgttttcatgccaaaacagaggttctaggtgatagagaataaaaatacaaaattttaggaagtggaatgaagtaatttggagttcatatgcattttctatgatttattgaagttctagcaattattttcctattaaaaatctatttaataatcattttttctggttttattatgttctggactgggcctcattttctgcaaagtacaggggtctcggggtaaaactacagagacccagcgcatagtgactaatggacggcgggttaattcagtgaaccgagggctcctaagtaaatgga

SEQ ID NO: 22649 - DNA, 555 bp, Arabidopsis thaliana landsberg
agcgacagagatacaaacagatctgataatagataattagttcataattcgtgcaaaaatacagacagatctaatgataaataaattggtattggtgcagaaactaacatgaacagaaaatttatcttgttagcttaagattttgtttgtttaggcggctaggttttttttttttttttcttaagcggctagggtttactcagataggtaggactcgtgctgataacgtgttataaccagagaaatagatataagaaaatgagtgtgttattccattgagataaagggttctttatataggagtacaaggaaagggtaaaaccctacaaacatctagataatggccttagatgatgagccttataatgggcatccatctttattcgtaaaagttattgatttcttcttttgcagaaaatccttttatattggctcttttttcctactacatattaattaaaatatgactgtttaattggttttttcaatctgaaaaaaaatatttacattaaaaaatcagtataacttggttgtggaaatgacggaaaaaaaaac

SEQ ID NO: 22650 - DNA, 512 bp, Arabidopsis thaliana landsberg
attttaaactcattaatccgagttaagtatatagcccatttaaccttgctcatatgaatctgaaaaatttttttgggcccatataaacccattgacaaaaaacctgataaccaaaatctaagccacaaagaaaaagaagacttcacttaaacgacttttcatacaagaagcttctgtagcagaatatgtgtcactttcacacttgtcttcaaagcaaaacctgcaccaatagccacaaagctcatacctcaattccagcagaaaagaaaagaaaagaaaacattgcagaattgtccatcttgcagcattgcagaattgtccatcttgcagcattgcagaattgctcatacctcaagatgggttcgctttagacaaaatgataatgtttccatgaatcgtcattctcttgctcttgaactctcatagctggggtagtcattatcttcaacagtacctacaattcaacatgtaaactgattataacaattagtttaacaatacctaagaacgga

SEQ ID NO: 22651 - DNA, 681 bp, Arabidopsis thaliana landsberg
tgaagattgatgaattattcactctaatgcctttttcttgatgccccttttcaactctacccttttttcccattttcatttctagcccatctaatagttttatccccaaactacccttaatgaaatacaaacacttcatcgacctaatttcatttcatgtctctcttgttcttcctccgtcggaaattgtttagtttgtcgccatcgcatcccatcttcgccgtcaaagattgtcggatttgtgttgtcgatttcaccgtctcagtcttcattcaatcttttgttttttccaggtttgttttttgaatcgatttcaaatttgtaatgttagcctaaatatcttgatttcgaattggtttattcgattttgttgttgcttatgtgaatttgttatactgtttcgtgatattgattcaatcgacagtttgaaatttgcttcagcttcgaatttgaattttgtttaagatttgatgattgaatttgtttctaaaattcttgtaaattcgttatactgttttgctttcgatttttgggttgattatgtgaattcgttattaccttttgaattcattatactgtttcgtgatagatttgattatgtgaattcgataaaaaatgtttcgtgtagattttagtggtcgatttagtgtttatccctttacttatgctttagtaatagat

SEQ ID NO: 22652 - DNA, 573 bp, Arabidopsis thaliana landsberg
  unsure (1)..(573): unsure at all n locations
aattcaccagagaatgttgcagactacactgttgggctggaatcatgtgtggaggatttgatgaatctgcttaactttaaacccacttctagtgttcagttcttgggaatttatggtatgggtggtattggcaagacgacccttgctaaatacttttataacaagatcattgtcaacttcgagcatcgagcaatcatctatgacgttagagaacaatcatcaacccaagatggcttagacgatctcaaaagaactttcaaagttgctcgtgagaagaagaatattgtggttttagatgatgttgataacatcgaccaggttaatgcgctcgttggtgaaacaagctggtatggtgaaggaagtctagtagtcattactaccagagatgaagagattctgaataggctctcagtgaacctacgatatnnnnnnnnnnnnnnnnnnnnnnnnnnnnnnnnnnnnttgttctgcttttattcactacgaaaagaaaaaccaccaacagagggcttattggagctgtccaagaagagtgtcgagttaacaggactgttgccattagctcttaaagtc

SEQ ID NO: 22653 - DNA, 567 bp, Arabidopsis thaliana landsberg
acgaagcagctcaaacttcttgtgatactcctcaataccattcgtctcttttaactgctttaattctgaaattggatcatctaaaacttcagcaaaatgttcctccaacagaagcttatacatgttccaattactcaacaatttaaccccaaagtcagactcaaacaacgatttgtaccactttgctgcagctccatcacaaagagtcgatgcaatgcttaccttcaactcctccggagtgaaatcaagagagaagaactgttccagcttaaacaaccaatcccttacccgatctccactaaatctatgaaaatccagtttggatgaacgagtaacagctgagtaattcgaatttgtaccagttctgcgaacatgaaacacttccgacgacggatacaccgtttctcttgatcgttgctgttgtagatgaccactcgatgaagcgttattcaccttaacggagatgagtcgaattgtgtcaatcaattgagcaaaactcttgtcgagcttttgattatgctctgctatcttggtttccaacttttccatacgcaatcccagcggatc

SEQ ID NO: 22654 - DNA, 554 bp, Arabidopsis thaliana landsberg
cgaagagaccagggccccagaacccgagaaggggaaagaaatggccgaagacacttcgaaagctgaagtttttaactttcaaaacttagttggtcaagaactgacgaaggatgaaaaagaagagctaaaagaatatgctatatcttgcggatatcagccgagagcacttctcttcggtggcattgatgacgaaaggttgggctgcgttcgggatcagactggtgtgaaggttatcggtactctatcaaagagtatcggtttcccgaagctcgaaacagatatcagccgctaccgacgacagcacatcgtcggtagtttattttattccaatttcaaggtaaacaacttttctctgacttttattgttttttataacgaagatgttttttaacgaagattgtttatgtgtagagtatgctactgagcaaagctttgaaaatacagcagaatttagaagatagaaaacacgaagttataattgagaatttagagagcaagataaaagatcaatcagctgttattgaaaagaaagacttcgagcttcagaaaatcga

SEQ ID NO: 22655 - DNA, 516 bp, Arabidopsis thaliana landsberg
  unsure (1)..(516): unsure at all n locations
acgcaaactagggtttctccacagaacagagttagtcaccaaaagacagaggtcntgaacaagaaaaagagaagctgtaaggggggagatgatcctatattggacacagtggaaaacgtagaaacgacgggatcccattattaaagagtttagacaaggctgaggatttagaacaagatcgaagatgggttttttcaaggcagagaaaaagtttacagaataactcggcaatacagattcaagctcacaactttacggtacacatcaacagaccttgtgaaccaactcatgctgtttttctcattcactgctttgctgtgatccacagaaagagagaagaattctgttacaaaacagagaatcatctcatcaaattccagtgatgacaaaccaaggaaaccaaacattcacaacaattgaaaggattgagaaaccataaaacagcgaagacgataagtccatgttctgcagcattgaacaagtataatttattttagcaaaataagaactaaaagc

SEQ ID NO: 22656 - DNA, 629 bp, Arabidopsis thaliana landsberg
gcagaggaagatgaagatgaggaagctaagtttgaggctgatgttggaagggaatcttctcccacggaagattcacttacagctctacatgagttgcttctccacccaagccgtgagaagtatacaacggtcatctctcccacatttgagcttgaaacccgatggtaagttgcatattttagggagagttgctaagttgtgtatatagatgcgaagttgattatgtgtgtatatggtaagctgagtagattatgttttagggttaatattgagtaatgtgtgtatatagatgctaagttgattaggtgtgtatatggtaagctgtgtagattacgtttagggttaatattgagtaatatgtgtgtgtatatagatgctaagttgattaggtcttctaattggtttatgtaattgtaggtttggtcatgacaatggtaagctgacctggaagattgcaaaggtattcacaaacaagtttgatgggccatttttacagttggagatgtgtacttactgaaaaagacagaaatacttcctcgaattcacgtaaacttctatctccagttaatcttttactattgtctatatccatttggtttggtttggttgtttgatcactacacaaactc

SEQ ID NO: 22657 - DNA, 523 bp, Arabidopsis thaliana landsberg
aactacgacggacttctctcccgggtaagagagcccacccgcgatctatacgttccttggataatcgctcttcgtgcttgttgactcaatttgatgcagtttgtgaaatggagctctgcatctggagtgtttaaagggtcgctaactctctccagtgatatacagtcatctgctaatagctgttggagtgaatacgggagctctggcaatgacgtgagtcttttgcaccgtgatagataaaggtgtcttagattacgaagacccttgatgcaatctgtaatcgtcttgataccactatcacatagctctaaatatgttacacttggagggagatgtgctgagaaggtcttgaagtttttactactacttataccaacatcgctaagacgatagcaatgcctaagtgatgcaggtgattcttctaatgctgtgtatgtcaaagaaagtgatgtgatgttggcaggaatatctggaatagatctcattcgtgtgcatcccatcacgaagatcgagtcgagagatg

SEQ ID NO: 22658 - DNA, 523 bp, Arabidopsis thaliana landsberg
  unsure (1)..(523): unsure at all n locations
attatataaaattcatttataattactcgaatatgttttattaatcttatattatttcatataacaaaaacaatgtcaatttaatatttgcattaacgtcaagtaatatcaataaaataatctatatatatattttcgcagccattttgtgaaataaatcctggagttggaacttatttataaaggctgccactggtttttaattattggtttttcagcaataaattgattaacaaacgaaaaacattctaaatatattccaatcccatatatcacgcagatttttccaaaatttgaactaaattttggcaactaattaaaacaaaaaaatgtttgacaacccaaaaagacaattgcaatcccttaaaatgagcaaaacgcaactaaatacatttcttatcaattcactaaatcttatttctccaaaatttgaattagatttcgacaactatntaaaacaaaattttgtttgacaaactaaaacacaattgcaatcccgtaaaatatttattttaatataaat

SEQ ID NO: 22659 - DNA, 321 bp, Arabidopsis thaliana landsberg
ttgtagggacctacaagaaagttgagatcaatactattaagcatagtgagtagttcggtacacccccagttacattatattagtgatttgtgttttagaatagttcgataatattcataatttactgctagatctactattctgatattttttgagaattttcctaaacccgacgccttaataatcttaatctacaaccaatctgtttattgctttcttgtcttttacttttataatattttctgtttagctttattcgaaactattagtttattgtatgatccgagaactttatagaattcgatccctaaatgctataac

SEQ ID NO: 22660 - DNA, 671 bp, Arabidopsis thaliana landsberg
ctcccctgtgtcctaaaccagacttcaacacgaagacccaacaaagaagcaggtgaagacaagtagtgattccagaggacacaaatacagggaacacattgttttgcgtttgcaaaaacctgtttaggcattgaagaagagcgtaggcgtagatgcttggaatcatgtatctagcgtatgaacctgcaagtctggcgatggacttgttttggtgaaccaagacaagaatgtcctctgtgtaaaaccaaactatcgagagaggaaccgagagtatcagcagaacaaacatagctctctgcatgaaaatccctagcttcccatacatctttgctccgtaagattgaccacaaagtgtttccaacgcactcgctgtacccatctgttaggaaaaatcgattcagtttctggtaatcaattcaattacactgaaattgagaagagagagagggagagaggagaggtcacgaaccaggaaagtgaaaccagtgacggaggcgaaagaggtggcgatggaggcggcggagagaggaagtgagccgagatgaccgacgaacatgacggagataacttggagagagtattggaggaggctaacgccgatgagtggagcagagagccaaaattgcttcttcacctcctcttttacactctgagtgtgactatttccgatc

SEQ ID NO: 22661 - DNA, 473 bp, Arabidopsis thaliana landsberg
agggatcgttaagccacccattggatgatcaaatccaaactcttcctcggatttattgagaagagcttgaaatgaaggttggctcaagtatgagagcggcaccaaatatctcttattatgggtctctcctacgtacaccgcaagaaacccttttggtgccgccgatgcggtggagcggcttagaatcttctttgcacccaatagacttctcaccaaagccatatctgttattgttgtacgaaaaggtttttgaagcttattaagatggaggaaaagattcaagttattgtatatattgctagttgttggttgatgatagaacgaatgtgtgtatgagtgtatatatagaaagatcaatgaaggagttaataccttggtgaaaaaatcattgaaacttgtggtcttgatgcgtgaaactgtactgttcagagctcacatggatctgacatacagagtcctacatataaatatat

SEQ ID NO: 22662 - DNA, 1167 bp, Arabidopsis thaliana landsberg
tttgtttaacgtaagcaaaattgataacgatttaatattatagtatgacatatatattcttttattttagaataaagttgagaaatcaatcttttcctcctgtccatgtgtttgcccatttgttcatgtgttaaccattttaaaagagctttaatttacttaaatatctctagataatttgaagtctaaagtagtatatctatttttgttttcgttttgttattgttaagttaggaaaataaactcactatatagattatctttatatatatacattagatttatgcatacaaattttaggattttactaagattttcatgtaatgaatcactttggaaattagctttttatttggggaaaagtttcttccactaattcgacatattcataatatatatatatatatatatatatatatatatatgtgtgtgtgtgttgttgtgactgtggagagagagcaacacatgatgattaacccatcatgtgttttgtctcaactcggatctattgggtttgtggctgagaaagagacaaaacaggactacaaagcagaaacataaacattacccagttcttaactacgctaatatagatatagaagcatgcacatgcttagcgagattccacattccatatagttagttatatatagtaacgatggaaaaatcatctatatctagctagggaagtatgtacatatatgtacgtacccggaagaattggtccatagaccatttgatttctctagaggattcgtcaattcctcgctatctctcgattttctattcatatcgaacatccagtcgtctgagttattatctcctgatgatccattttcatagacatcagattgtcctgaataacattaagaagaaagaaaaaaacaaattagggttctatcagaatcacatttcaattaattattaaatcatatatatccaataatttgacccataaagaatctgaattatttctctaacactaacctgacgaagctgctgctttgtcggatgtcttcactgttctgtacatctgatattataaaaaaaaaatgtgcatcaatatataattaagaagagaccaaagcaaatgatgattcgtctaaatccggatataaagattagagagatgcatgtatcgaattatatggaaaaggaagaagagac

SEQ ID NO: 22663 - DNA, 571 bp, Arabidopsis thaliana landsberg
tcttgatcttcgcttttcaggctatagttaatgaagttcttgagacgatagagcttgaggagatttaagtttccttagtaggagttcctggaattagcggtgtaacagcagaacaacgcaaaagactaacaatagctgtggagcttgtttccaatccttcaataatatttatggatgaaccaaccacaggattagatgcaagagctgctgcaattgtaatgagagctgtgaagaacatcgccgagactggcagaactgttgtttgcacaattcaccagccgagcatagatatctttgaggcatttgatgaggtaaaacctcgtaaaaccttcatctcatttaaagtctcttgtttaaagtacattaatatgtgacccttcaatggcagctgattctgatgaaaaatggaggaaagattatctattacggacctgttggacaacattcaagcaaagctattgaatactttatggacagttcctatatattactgaaactgttgcatataatgttctcttctctacttccaaattataacaataattctcaactgtcgagcattcctggagtt

SEQ ID NO: 22664 - DNA, 702 bp, Arabidopsis thaliana landsberg
caagaccctaaaaaccattgcagtcactgccaccgtctcactcatgagttataagttctgccccggagtagcaaggaaacctgatgatcaacaccacatctctacctcaaaatctgcctctgctcatgcctctaagtcaaactcacgaaactactacaccccccatgacaacttcacaactcctaggagtaattctcatatctctgaaagaagtgtcatccctcaacagtttgtcaaccctgcaaaacgaaagttgaaccatgatggggccaagtccaggtccccacctgcccgtagaacctccccacagaggaagtcttatgctcgagaggactatcatcttcagggtgctgttcagtctccccgctatgaaagcaggcagggttatcattcttctcaacaattgcagtggcgagagaagtctaactcttcaacagggaatcatgtttcaccatcagaacaatctagagctcggagaccacctctcgagagaaatgttacaactcctgatcctcctacccctccacctctgcagactcttgaccccagatgctcggggatggaagtttcttctcctcctctacccccaccttctaaagaccaggtgatgagtgagctgagggatgtcactatccagtatatctcttgccctgacccaaaagaaagagctgctaggaaaatcagggtgttccaaggagaaac

SEQ ID NO: 22665 - DNA, 570 bp, Arabidopsis thaliana landsberg
  unsure (1)..(570): unsure at all n locations
cagctggatattttcaacatgtaatggaccagatcttattctttacacaaagagagaaacttttgcctgagctggccacaccataatcacaagtcactaatnnnnnnnnnnnnnnnnnnnnnnnnnnnnnnnnnnnnnnnnnnnnnnnnnnnnnnnnnnntgatcacctaaagaacatgtttttggaacaagcaagttcgacagaagaaacaatagaagtttatcagccaagtggagaaaagattcaacaaacagacaagaagcttcacgaccaaaaggcactcgccgagatctatctccttagcctaaccgatgaacttgtgacaagcacaaggtctacatttggatatgtagctcaaggtcttggagggttaaagccatggatactctacgagccaagggacaagaaaactccaaacccaccatgtgttagggccatgtcgatggagccttgttttcttagagctccgctccatggttgtcaagctaagacaatcaaaatccctccttttgttaggatctgtgaagattggaaaacagggctgaagctagttgatgtttcagatgaac

SEQ ID NO: 22666 - DNA, 1425 bp, Arabidopsis thaliana landsberg
  unsure (1)..(1425): unsure at all n locations
ccataaatggtttttattctatattttataagtttctctttctttgtattctaanatagacaataccccatatttatttntagtaaaaggtaaaatttntacttttctcgaatttttntgacaaaaattatagagaaaacaagaagaatgagaaactgaaagctacaaaaagaccaaaataacaattcacaagtagaaaacatgaagcaaatactagcgaacaaaagcagaaacccatgaagacacaccgattctaaacagaaaaggtcagacagttgcgtgtttcctcaactcgaaggacgtagaatcctcatatttgttgccatgagcaacccaaactcaaagccgtcctcaaacctcaagtaggagcacctacaacttttccgaagactaacgcaaaaacaaagcggctatagaaaactaatacccttacccggcgacacgagagcatctatgggcagctagataagctgcctccagccaccaatctttttgcaaatcaacaagaaacatctcccatagatagtgaagccacctagaccaaaccaccacctctattccccacagagaaccccaccagggcaacacgcaaagagatcttcgctgcaaaccagcgtaggctgaaactacaacaacaaataccagcaacacacaagtagtaatcaaaccaagtcacgaaagagccacggaaaaacggagccgcaaaaccacccagccatcaaccactaccacaaccgtaatgaacgactaaaaaaaacctcaccgagaactccgacgaggcagttatcaccacaaagggcccaaagagagaagcaaaaccgatctaattccaaaacctggctgagagaccacatcgaaggcatgaaagagttagattcaaagccgtcctcaaattccattacctcctctgccatcaagctctccccatgtagaataatccgagctgaatttcttacacgcgagctcttacacaatgccgcaaaaaaacgcaaaccaccaaaccaagctcacatatcttatctagacaactcacctaagctatgaccagaacctgagagaataatcaccgctcaaagagaagacgttagccaaagctgtgacactccttgccaccacgccgcatcaaacctcggaacaaccaccttctagagctgcagatcaagacagagaaccataacaaactcaaagcctaccaaagggggaggaaaagacagctgagaagtaaaaaaaaggagccctctccggcaccggaaacagcataccggagaggcaatacaaagttttgcgtatatctactttggttctttgaaactgaagagagaaaagagaggagtgcgtggattcacgtcaaggttttttttttctttcgttgtaataataataaccatatcttttagggagagttactcggatgttatagaaaat

SEQ ID NO: 22667 - DNA, 2006 bp, Arabidopsis thaliana landsberg
  unsure (1)..(2006): unsure at all n locations
gtggattctgacagttgatttattgacagcattgtttttggagattataaatcatatatggccaactctctccaaataaatgacacatcatcacacacgaaaatgacatgtgtcattctatattttttaaattaaaatattaatcaaattaaataagcaaattaaatatatcatcaatnctactcttaattgttttcttcaaaataaaaataaaataaaaaattaattttaataaattaagcactacttttattatactctttttattttactattttttttgatgtacttgatcgttacctaacctcttattagtttacgaattttattctgaagctttgatacacattgacattcaagttttttcaaataataaacatttaaaacattagacctatcaaataatttaatacacgatcatttctcttatatggatatatgcaatgacagaagatctaaaantattgacttaaatgatactttcatttttgctttctttttattttttcatatgaatatttttgaaattttgttgagtttatatcaattctatatatttaatcatgagcctataacaatgttgttggagtattatatcaggagaatacataaaaccagaaatagtttatttataattaagtgagacaattttcaaatcattctagacacgatcatttttctaatattgatatatgcaatgacagaagatataaaagtgttgacttaaatgacattcagattttgctatctttttattttcttcataccctttttcatacgaatactcttcagatcttgttcagttgaagtcaatccaaactttaatcatgagcttatcacaatgttgttgaagtacataaacatggaattaatttatttataatcgagtaaggtaaattttaaaccacacaagtaatatagttatacataattgtatcaaaatatcatatattgttgttatatgtattcatgatagtgaaaaaataataaaatcttataaataattagctttatatatgaaaatatataaattaatatttcgaatcacaaatgaatctaaccataaaaattataactatatattatgaatcaaattttattaacaatacaagaataaacaaagaataaacataaattactaaaaagaataatcaatttaaatatttttaaatagttttcaaaacaaacccatgcgtagcatgggtactcatatagttataacaaaagttgaataatctttttgaccttaaacacactaagactaaatcttatcgaagaggaagcgtctctctcttctctcacatctattcttcagagagagaaggtgatttccggtttcttagaattaaaatccggcgacctcttaccataagaactttacctctcttcactcttccagatctttcagaaaggtaaagcatgtcgccaaaaaggatctaaccagatctgtttataatcttatctatatatgatctaaataaattttgatttcatgtcggattcttcctaccggctatgtccgggtttttgtcttctcgctctcgcgagattgatctcctttcttctagcctattgaaaactctgcttttcttcaaatttcaactgatttgcccatcctctcgtagagtaatatcttcatcatctcctttggctcatgaagtttagagccaagatccgactacatcaagttcggtgtcgtccgtgatggagcttccccggagttggagttgctcgaagttttttgaagcttatcgtaaaattgaaccgagtttcttcgcgttttaggcttgaactggagaccggcaaatgggaagggacttaccaccgatacagaactggaccgcgatggctatcacagttggcggtgttcggcgtgatgcatgcaggggtgtccaattacctgacgcgtggctcggcggagttccatcactcaacacgtgtcagcatctaaagattagggttttaatctcgaccgttaaaaatacgcttgtacctttatttgggcg

SEQ ID NO: 22668 - DNA, 536 bp, Arabidopsis thaliana landsberg
  unsure (1)..(536): unsure at all n locations
ggctgagatccttagcaaaataaacgtggttggctaagctctcagctatttaggcagggcaaaaaacacacgggtagtgttatacgaaaggncaccacacaaaacgagaaaagcaaaagctttaatccttaattgccaactaaattataatgcttataatttactccaccatttacttcactaaatatacgataacgcttataacaaatgaaaataataattagtataaatcttcatatataatagcaacatgtctcctcatatcatattcatatgggtacggaaacgtaaatcataccataagtccatagacgagattgaagcagctatttccgatggacgcggccgcaagttcttgactaccaacatgaccggcgaagacacgagcggatatacccattccggagttgactaaatagataagtatcgccggtagtgccaaccggaaaagtactttcaactctatacaggctcctaagtacacacgcctccggtatgacaagctactctccgttaatacgctctcgagcccgacc

SEQ ID NO: 22669 - DNA, 484 bp, Arabidopsis thaliana landsberg
atgccaaattatcttgcagcttttcgaagagtatcctgacaaggatttcaaaaggtgtccatttgttactggtcttgggagtaaaatgcaggatatacaccacacaaaatggatcatcaagaggaagaagaaaattctgcaaaagggaaagaatctgaatccgagggcgggcttggcacatgtggtaaccagaatgaaacctatgcaagcaacaacaactcgcctcgttaatagaatttggggagagttttactccatttactctcctgaggttccatcggaggcgattcatgaagtggaagaagaggagattgaagaggatgaagaggaggacgagaatgaggaagatgatatagaggaggaagctgttgaggttcaaaagtctcatactcctaagaaaagtagaggtaattctgaagatatggagataaaatggaatggtgagattcttggagaaacttctgatggtgagcctctctatgga

SEQ ID NO: 22670 - DNA, 936 bp, Arabidopsis thaliana landsberg
taagaatggattggtcaactaaacttgatgagactttatgggcctataaaaccgcatacaaattgcctattgggagaaccccattccagatgctatatgggaaatcttgtcatctaccagttgaagtggaatataaagtcgtttggacaaccaaacttgaatttggaaatcaagggagctcaagagaaaagatcagtcgacctgcatgaactggaagagattaggctggaagcatatgagagtttgaaaatctacaaagaaagaataaaagcctttcatgacaaaaagatctcaccaaaagatttcaacattggagaccaagttctgctgttcaactccagactcaagttgtttccaagaaagctaaaatccaagtggtctgggcctttcaccatcaaagaggtattgccatatggggcaattactcttactagggattggagttcttaatttactgtgaataggcagagggtcaagcgttatatgacagattgccctattccagaagaaactacagttgacctctaggaacccatcaatgcctaaaatagtaagaagtctagcttaagactttaaactagctcacttgggaggaaatcccatgcctatctctgtacatatttaattttgatattttgatatgctttttagtgtttttggaagtcaagaaataaatcaggatttgtagagctgtgaactctgtgatcaagaaatatctgcaacagaagcaattctactctataaattggtcgagtaaaattgcatcaccattttactctatcaattggtcgagtaaagtgactaaacgaccaagaatggtgatcgagtggcccacttgtctctccatcattctattactcggtggaaaaagcctttacccatcatgctcaatcactatttggtcaacactcttatcccaacaaaaaagcataggag

SEQ ID NO: 22671 - DNA, 620 bp, Arabidopsis thaliana landsberg
  unsure (1)..(620): unsure at all n locations
gtcatctgttttgtggattcctcggtcatgtatagctgttggatcctcggtatgaatggaaggtggtgtaggattgttatggggatgttgagctgcctcttctgtccatcactagaatctaccttcatgaacctagacaatttacacttcggatagtactttgcctccatgtattctttcctggaataggacgcagcccttcggacaagcatgcatctactcatacatcatcttgagtgcatgaaggagtttctgtgcctcgtacatgctctttggcagatcgtgatcgtctgggagcaggctgccaataactgtcaacaaaccattaaaggcatttcgacttaggctgtactacgactttaactccattatacgtcaaatagcatctagttgaaaaacctttgtctggccatgaaggagtttatatgcctcgtcaaacatgtcatagaacgccttcgcagtcacctcttgctcatccattgtacgtctttcagtgaattgtgcctcgtgatagtcgttcaacatgtctgctacccgacatcatcataataatcctcgacatgttgtctcacnactcctctcttatacgatgtgcttcaccatgtaagaccattgggtat

SEQ ID NO: 22672 - DNA, 1420 bp, Arabidopsis thaliana landsberg
gttacattcatgttgtaatcttttatcgttgagaacttgaaatcatctttaacaaacctccagattgtagaatgctctgttgtaaaaaatttaagatagtgaatatttggattctgatcaagccgagatagtaaatctatactctattcttgtgagtttcttgatcaaatcttctccaagcttcaacattgaactgcggtgatcgagtctttgccatcgaagcttggtgtttctcctcgtagatggttacatttcatttatggggttatgttattctttagtttcaagattaacttcagctacagtgccattaaacttaattcttaaagagtttgttattattttgcatggttaccttctgataataggctttgtgtactaaaattaattggagaaaaatagaggaaccatattatataattgcttggtagctgtaaccagtttaactcaacaaagcaaaaccaaaacaacttctagattatgcatatctaacttaaacctatatatagataaagctgaagccaaattgttatgcaagaaaattcgagtttgcaaagtagaatatacaattgaagaccgctactacaaggccggttttaatgaatcaagtgtgagctgattgtgaagacaatattcttgaatggttatgctcgccttcgtaagttacaattaacattgaagtttcatcaatacatcgctccacatgcttccttgctggacaacctctcacactgctgcatttatagtatcccctgcaaccgaaaacaacaaaaggaaacttatatcaaaatcgacataaagttaaagaaatcttctaccagaagatgtttatatatataccgtggatgcggtgaaccctttatcggtttctgtccatacttcctccaagaatactcatctggaggaatgtccgcaatcttgttactgattgcaggcaccttgattgatcgttttaccctcagtttcctgtataagatcaaacctttacaaagagatacaaaaaaaaacaatttatgggtcaagattgtcacaaagaacaatgacaaaccttttcttggaacagtgacatttgcttcgacttccgcatttcaaactaccagagcacatcttccgggtatgctgttggtcagacccacgggacaatccggtcaaatggaacgagttcctatcgtagtctgttacactagcattcatgcttagagatgacacaaatgatcttgatccttttgatacactctgagtatatcaactactaccagatccatcaaacttaaggttcacaccgctattacttctggaattagctatctgctggtggttgtggattaactgataaggagcacgaataggaggttgctttaacttcagaaacgactaggcacacacattttgtgactaagcattaattaaggatgaccca

SEQ ID NO: 22673 - DNA, 913 bp, Arabidopsis thaliana landsberg
aaccaggacgtacgctttcttgacagaggtcttcagatttggtaaagatggtgtcttccccaaccaaaagaccggcattttcagtgtatttggaggagttgcagaacgacaaggaagaattcacaaacttctctttatctttaatttctcgtagtgtaaatgtaaaagcggataagttggcacgaaagattcgtttccaaccgcatcttgttacatatgtaaacaatattccacatgattggctcttttgagttctaatttatatcggttgaccaaaaaatgaaaaaacaaagtagattttaacaattaaaacttttacagtcaaaattcttacaccaaaagtctctacagtcgtcaatcagtccctagattttacagttttccgccagttttagcgattgaactaaaatcaatttttgctcaacatgaattcaaatagatggacgacaacttccggctaacttgtcggtgaagttttcaaaacggtccttgtatgtgtgtttgtccattgtatagtattttgagatttcttatttatgtaatgatcaagttcctacgccgaaatactaaagatcaaattttatttaatagaaaagtattgatcaaggagcaaaaagaacattggtttcacatgtatttatgcaagtcttataacaatttgggctcaaaataatttgggttgacacaggatcttagatattttaaacatttatatgcaagtaggattatatattttgtccattcctcttaaaaatattcaagtgggatcttatataatatattgtccattccaaaaaaaaatattttgattttatcgaataacaaaagcgtttgcttttaaaattatgctcacttaaacatagaaattgtatttttttttctcccctatagatagaattaataactaaaatta

SEQ ID NO: 22674 - DNA, 539 bp, Arabidopsis thaliana landsberg
atattcgttctctttaaacgtttcccatgcaactctgcaatgctctttcgatgtcatgtgcaaatgctcataccattgatccggattccataataagaacagaatgcaacacaatacatatcaaatcaaaaagtaactgcactaaataaattgtcttgcgagccaagactttcaagcgggttgagaagtcattagttcgtaccaccccctcgtttttttcttatctctgtagaggatatatccatccggaatatatctgctggaattgaaataaacatgtcgattatttcctctggaatatcaacatcttcaagaacctgcagaggagcaaggataaggcattaggcatacaatctcatagacaactctcaaagggactaaatttgtattgctctagattctagtgcttaggtcaaaccttaaatacaccatctacattgcggccaccaacaaggaaagtgcaacctgtccgtttgcaatcaccaagtatcttcaacatccttttgatgcttccttcatagtactttggctgcaagaaa

SEQ ID NO: 22675 - DNA, 1539 bp, Arabidopsis thaliana landsberg
aggtgtatgcttcaacgtgggttatatttgcgagctctccaagaatgtagtggctatgaagaaagacatggatttgctcaagaaaaagcgagatgatgtgaaaagaagggtagatatagaagagttcacaaggcgtcgtgaaaggctttctcaagtccaaggatggcttacgaatgtctcgaccgtcgataataaattcaatgaactgcttaccactaatgacgctgagcttcaaaggttgtgtctctttggattttgctctaaaaatgtgaaaatgagctatctttatgggaaaagggttgtcctgatgttgaaggagattgagagtcttagttctcaaggagattttgatactgtgactttagccactccaatagctaggattgaagagatgcctattcaacctacaatcgtaggtcaggaaacaatgctcgaaagggtatggactcgtctcacagaagacggagacgagattgtgggtctttatggcatgggtggagtaggcaaaaccacccttctcacacgaatcaacaacaagttttctgaaaaatgtagcgggtttggggttgtgatatgggtggtggtgtctaagagtccagatatccataggattcaaggagacatcgggaagagactagaccttggaggcgaagagtgggataatgtaaatgaaaaccagagagcccttgacatatacaatgtccttgggaaacaaaaatttgtgttgttgttggatgatatatgggagaaagtgaatttagaagtgcttggagtcccttatccaagcagacaaaatggatgcaaagtagtattcaccactcgttctagagatgtttgtgggcgtatgcgggttgatgacccgatggaagtcagttgcctagaacccaacgaagcctgggaattgttccaaatgaaagttggagaaaacacattgaaaggccatccagacattcctgaacttgcaagaaaagttgctggaaaatgttgtggcctaccattggcacttaatgtcattggcgagaccatggcatgcaaaaggatggtacaagaatggcgtaacgcaattgacgttttgagctcatatgctgcagaattccctggtatggaacaaattcttcctattctaaagtatagctatgataatttaaacaaggagcaggtgaaaccatgtttcctatattgctctctgtttcctgaagattatcgtatggaaaaagagaggttgatagactattggatatgtgagggattcatagatgaaaatgaaagtagagaaagagcattaagccaaggttatgagatcattggtatccttgtccgagcatgtttgttgttggaggaagctatcaataaagaacaagttaaaatgcatgatgtggttcgggagatggctctatggattgcatctgatcttggggaacataaagaaagatgtattgtgcaagtcggtgttggattacgtgaggtaccgaaagtcaagaactggagttctgtgagaaggatgtcgctgatggaaaatgagattgaaattttatctgg

SEQ ID NO: 22676 - DNA, 1010 bp, Arabidopsis thaliana landsberg
gcaaacatacaatcggctcaagacccttatcaacaagataagaagctacgggagcacgcgatggacggaccacgacgtcgtccgcctaatgctaaggtcatttaccgttcttgatcctcacttggtgaacaatatacgtgaaaatcccaggtacaccaagatgtcgcccgaagaagttcttgggaaatttgttagcgggcgaatgatgatcaaggaggcgagatatgtggacgacgccttgaatggtccgatcaacgagccgcaacctctcgctctcaaggcaacacgaagcaaggaggcgctacctagcaaggtggcacaaattgaggcggccggactcaacgatgaagagatggctctcatcatcaagagattcaagacggcgctaaatggtcgcaaggggcagccaagcaagaccaagaccaaggggaagcgctcatgcttcaaatgcggtaagtttggtcattttatcgctaactgtcctgataatgaaagtgaccaggaaaaggggaacaaaagagaaaagaagaagcaatacaagaaggcaaagggcgaggcgcatctaggaaaggagtgggactcggattgctcctcctccgactccgacaacgaaggactcgccgccactgccttcaacaaatcggctctcttccccaacgagcgtctcacatgtcttatggcaagggagaagaaggtaagtactcaagactccacttatgcttcttctagtgatagtgggtctagtgatgatgacgtagattattcatgcttgttcaagggcttagatagatctaagatagataaaatcaatgaattgattgatgcattgaatgaaaaggataggcttttagaaaagcaggaggatttattgtatgatgaacatgataaatttgtagaggcacaaaaatcatatgctttagaagtaaaaagaaatgaaatgctttcttatgaactatctacttgtcatgaaaccatttctactttacaaggtgttaacaatgatttaaatg

SEQ ID NO: 22677 - DNA, 628 bp, Arabidopsis thaliana landsberg
  unsure (1)..(628): unsure at all n locations
taataaacggcgaaaatgtcatttaaatcatcactttaccattttcgttggtttaaatcatgaactttggatctggtgaattaaatctttaattttatgttgactttcaaattaatcacaaattcttgttgactaagcaaattgaggcacaaattctttttttcgatgtcgtcaatcgacgtaaagacgaaagattactttgaattcgaaaaagaagagaaattccaaagaagatgagagattctgaagaaaaagagagaaaaaaccagaaattttgattagaaagatttctaacgatgtgccttaattggcttagtcaacgaattcgtgattaaattgaacgtcaacataaaattgaggatttaaatcactagatcgagattttatgctttaaaccaacggaaatggtaaagtgatgatttaaataacatttatcccgttaataaaccaatgaaaccaataattgtgggttgatatatcttgaactattaatttggagagatttggatatagacattttattttagggagaaaactaggtatagaactntagttctagagatatataaaattatagatcggagtcatacttttgactctggtatagtttggaaatagaccttttttt

SEQ ID NO: 22678 - DNA, 502 bp, Arabidopsis thaliana landsberg
tgagacagcaagggtgagctcacacatgatcatagctcaacaagttgtggggaaccagtggcatgaactcaccaaaggtgggagttcatgtgatgtgtaaggctaatcaacaatatgggttaaagctcagcattgcttttaagtagttggtcaaaattttattagcagttactaaatgtaagtaaataccaaaccttagtaaaaataatagaacaaaagtaataaataatcccatacaatgcaaatgacaaaattgaatttaagttccataaattaatcattggagagtcctgagttgctcatgaccgtgagctcggctagtataccagttttacactctgcagaggttgtaccctatacccacaagtcgtgtatcccatgtcgtcagggttagctagacccttagacaccaccgaggtgaatagctagggatccactacgaggcctttacaaagttccactagcttccgaaaacccgctacagtttatgggaagagcactt

SEQ ID NO: 22679 - DNA, 1499 bp, Arabidopsis thaliana landsberg
tcaactccgtggcaaatgggtaacacgacttgtgggtaaagatgcgcaacctctgcagagtgtaaaactggtatactagccgtgctcacggtcatgagcggctcggacactcacatgattaaattatggaacttaaactcaatctgtcatttcattgcatctgggaatatttcattattacttttatttattatttctaatggttggtatttacttacacttagtaattgctaataaaattttgatcaacttataaaagcaatgctcagcttcagcctttatttcattgatcagccttacacttcatgaactcccacctttggtgagtttatgccacattattccccacaacttgttgagcgatgaacgtatgtgagctcacccttgctgtctcacacccccccacaggagaagagcaggtggttcaggaggatccacaaggcgaggagtatgatctaatctaggtggcgtttctcagttgacattggcgccgacgatccttagttcgttttatatttatcttttatttttgtaagacttctactatgtaataagtactctgatgtgattgtgacatttatctctatacactatgttattatatatgttgtcttttttggcgcatgtatgagatgcacccggctttgtcccttaaatctggtgtgacactggcccccatcgggactcagcacaagtactgcttgcctccacctggacaccatgcctacgacacccctgactgcaggacccggataaacttggaaccatagatcgctagtgtcggaatttgtattaaatgctgaagttaggagtcttagtcttagtcagtcttagttagtcatgatagtttgcttatcctgtgtttttatgcttgtcatgatgaacttatgatggatttggatctttgtaatgattgtcgacataatgttggtaccctacagtttggtttagctattaatgttaatgaaattagtcatttagttggaaagccttttacctctactttcctctttatctgagaagttgtgtttggctgtgttgtgagttagtgaagatgatcaattgttcagtgttatgaaaatttccataccttttcttacgctgaaagactacagagtcagatctgatatgtgtgcgctttctacatatgtctgagaataggcacagaggtggaaggcgtgctcagtaggagcagcaggcacccaggaggaggcagctcagcagtagttgccaccgccacccctgatgaccaagcagtccaagcgattggtctgactttagcagcaatgcagcaggtgcagcagcagcaacccccacctcaaccttaggtgcaagttcagatgccctaggtgcctagagataagcggacataattcatgaagggacatccccctatctttgcccattatacagatcccatggacgctgaagattggctatatactatggagcgtgagttgcacactgctcaatgcaacgaggggatcctctagagtcga

SEQ ID NO: 22680 - DNA, 1050 bp, Arabidopsis thaliana landsberg
cttcctgtgtttgtcatcagagtcagttgtgcttctgacagtcctatcgctttcctcgttgtagttaccaattgagcgagattcggaaccaattcccagccttcttcaacatctttgttctggaaattcccattgctggcggtatttagaagcattcttatgcgtggtaaaacgcctctataaagagtgcggagcagagaggctttagtgaagccatgatgagggcattggttggtagaacccttgaaacgctcccatgcttcacaaaagctttcaccagtcttctatgaaaaggcagaaatctcattttttagtcttgcagttctggcatttgagaagaactttgcgtagagaagccttcttgcaatcatcccatgtggtgattgagtcatggggcagattcttctcccacagatgggctttgtctccaagtgaaaacgggaacaggcgaagcttgaaatcatcttcactaactccattaatttttgtaaggccacagagcctttcaaactcgtccaggtggtcgagtgggtcttccattggcaggccatgaaatttgttcccctgaaccatagcaatgagaccgctcttgatctcaaaattgacggtctggatagcaggaggtgcacttcctttcctctgacgttgatcacgtggtgcatctccagcaccaatgttggcagggccattttgttgattctgttcgtcagccatatcgagtggttgttgaggtacaaggttgactgtgtttctcctttctctcagttcgcgagctatgcggtcgatgttgtcattcaaaaggaggttctgattgcctgttgatcgagttcccatacagcagaggtgtacctggatcaagaagacaacaagaaaaacacacagtttgtaactgaaaagaaaattgaaaaagatcttgaaatcttccgagaatatcgcgagaggcggtttgccaaacccctatataaagcgccgcaaaggacaaacaagggggacacacaaaaaaacgctctcaacctcaggctatcaaaaacgctctgactttgaaaacaa

SEQ ID NO: 22681 - DNA, 479 bp, Arabidopsis thaliana landsberg
  unsure (1)..(479): unsure at all n locations
gtgagagatttgatttgtcctctcttagtattttattttctgcttgaactttctgatatatctcctctatgtctttgatccttcttagtttgatccatttcttttgaccttgctaagatggtttcaaggcttaatttcatattttggcaaaaaacagatggaatgcagtgttatagtgggttgaaaccggagatattgagttaatctctcttccaccggttgttgaaatattttcaagcctatggtaggttttcatgtgcccctttnnnnnnnnnnnnnnnnnnnnaagcactattggtatctcatgtagtgtttgaactactctcttatgtggtttaagattattaagaatttcacaatgcaaatcacagatatgtaatcgagtagctatgtgtttggctaaacaagagtttagcattccaatgtatggttcctttgattgatatataaaagttacacttttgtgaaaaaaaaaaaaa

SEQ ID NO: 22682 - DNA, 533 bp, Arabidopsis thaliana landsberg
  unsure (1)..(533): unsure at all n locations
atctcacaacatccaaatatctcaaagaaaagataatcaaagctggatatgaggccaccgaaattaattagggattctacatgacggatatcaacactaatagatctcggctaatctagtctatatgtatatgaatccctggactcactttgaggccctcgactgtgaaacaaaccaaaccaagttttatgcaaataaaacagattcaataccnnnnnnnnnnnnnnnnnnnnnntcgatgaggatgacgataccaagaccaagccaagtaagaagaaacgagttctcgttttgtctctgctcctctgccttggccgctccttcttcgctcatctccacaggagcacgccgattcacctctctattacctctccctttcttgtttcccgatgtagccgcacttaatttcttagccggagaagaaaaagacgccggttaatcgaatcctacgctggcaaaccttgaattctttgattgagatgattcggaggaaagttttagagttttctcctgagagagaaacagaggaacga

SEQ ID NO: 22683 - DNA, 904 bp, Arabidopsis thaliana landsberg
ccacgttgctatgacaacttataggtagtgtgtaattttaggcatcgttttatctcttcttcaaatctatataagcccggttctttctttgttttaccaatacaacacaagctagctacaaaaaaaaaaaaaacatttcatattcattcgaaaatttttcatttgagttaaccctctctttttccttaaattatattctattatattcttcttttgtaacaaaaaatgtcttccaacaataatatagaaatcttaagaaagtagatgtataatcgtattaatccacgaactgcacgtgtatccgatgaaaatgaagctgggttaaatcaattcttggagtttgcaaactatcgattatatgatggggatcgaatatggtgtccatgccgaaaatgtagaaatggagaacttatttttataactactgtatataggcattcgtataataaagggttttaacccaactattatgtttggacagctcacggtgagaagtttgagcaaggacaccaattctatgatcaagccgaagataatacattttaaacagttaaaccggaatgaaatttttaaactagttatattagagatactgtctcaactggagatatgtcaataccacaatcaaggtaaattattagttatatatataatgaaattaaatttaaaataattaattaaaaagtcttcctataaatatatatatatatatatatagctcttaaaatttggttaataaaaatattaattcgagttaaattaaatataaatatatagaaattaataattagaagcggtgtgctagctatatataaagaaaaactatatgttatattatatattttatattctcatacattataaattttctttatcttaatccatacgtacaaaacataaattc

SEQ ID NO: 22684 - DNA, 1918 bp, Arabidopsis thaliana landsberg
tattgcatctggatggcccataatctctcaaatttaattttgtttctctttcgaatctaaattaggaagatccgtatgagcaaaaagtacttagcgtttgattggttctccttctgtcacccgcaaacgctgcgtttgcaggtggtagcggttattagcggttggcaccaatcatagaaaccgctagatatcgctttgtaccgctcgaaatcgccagatttcaaaagctccttcccgcaagcgtttgcggttgcgggcggtagcggttaggttaaaaaaaataataattaattaattaaaataattatgttttccacccaaaccctatacttattcttatcagaaaaccctaatcaatgaaaccctattctctcaattatggcatccacccaaactgacaaaaatcaaagtcaaaatcaagaatcaaacgtaagtatgatctatcctttcatccattcattagctagtgtaattctcggaatatttcatggcatcgttgtttttttttattttgtttttttttgagttttttgattgaatacatgttttgatttgttttctcgattagaaaatcatttggtcaaacgagaccacatttgcgttacttcaacgggttattgtggagaaataaacggaagaatccaaagaccccaaaatcagatttctaagtgatgttcaaaaagaaaatattcttaagaatattaacgtttggaaaaaatttgagttggagatgtgttaaaaatcgtttggatatcttgaagaaactttatcatatgtatagaggcaatccggaaaacccgcgagttcaacgttatttacagtttatcacactacttgatgcaatttttggtgatgtaccaaatgcataaagtattaaactttttcttacaaaatttatttatttttgaatttttagttttatttatggttttaattattaagtatgtttaatttttcaaatattatcaatttatcataataatatattgtattttttttcttttaatagtaatatattatatttattttggttattttttatttaattactatcgcacccgctggtttaccagtcataaaactcccgcaaacgcacccataaccaaacgctcaaccagtcgttcaaaacacttgataacgcttgaaaccgcaaccgcccgtttccgcaaactcccgcaaccgcaaccgcacccgctgcgtttaaaccaggcaggccctaagtttgtagcggtttattgtccgccccaaaaataatatgaattgaaccgctgacggatcagtcagcactaaccacaatatccattcaaaaccttaatatcttgcgcacaaagacaagagtattagatttgtctattttaaaattttttttaatcccatattaattatataaaaaaaatgtttacaatataaaattagcatgtaactaaattagttgcttttaagtattttttgttcatcggaaatgaaaataaaaaaaaaataaaaaattgcatttgaatctaaaacatgttttcttgattgttgtcgcaggctatgatgatgaggatgggcctgaatctaagctttgattatattgcatcactaacagtaatacctgtctctcgtcacctacatgattcatcccttttttgtgtcgaactttattttatttaatcattttacgcattttcacaagttctgacttttcagattttgagtgtatgtatttgcaagtgacagataatttcatccacttggattcatcttatcttgtaaacttttctagttgtgttgaaaaatacatatgtaaatgtgtaaacactctttcatgtgttcatacttcgaaatttcatatgtcgatatcaatcaaataaccttttagatatatttttatatcttccctcccttgtgtttcctaattaaagcaacacaacgatca

SEQ ID NO: 22685 - DNA, 1051 bp, Arabidopsis thaliana landsberg
ccaaacttttggtttgggtcgctgtcaactccgtgcattgacacctctatctactacttcttcggaaattagcttgttacattccataacaagttcaccattgcaattttcacaatgaaaagaatcgtcttccatagaaattaatcgcagggcatccagtgcattatatctataccagaaatgagaatctatacaggtttagtgaaaataatacaactcaccatgtaaagatttaaaaacataaagaatagtggactttactttcttttgcagttaggacagccatactcctgaacagtatttctatcttctagttcatctttgaactttttcttgagccggtgcagtttataacgaacaatatcatatatctgtaagagagaagaagtgataaagggtagtttgattaaacaaaaaaaaaaaacagaaagaaaaaacaaaaagcataacagcaaactgaaagaaaaaaataaatattaggggacaaaaagcatacctgtgcataatcaagacagcaatacgagtgcgtgtggaacttaacattgtcctctgctcggccatcagttgtaccacccactgcataactatacatcttcgcacgctttgcagtctattgacaagattgagaataaatcaaacaccagagtaaggaaagaagtgttaccggcatatagacaagcaaacaatcaaacagaaatatacaaccacaagtatgttgagttataggcttagcaaaaacaatattgtgctatatatcaatctgaaaaaagatagtttctgcacagacctctttcctgtggtaacgcatgacaaatttttgttcttcaaaatgtcttattaattttcgaagttccttagcattccgcttcacctcttttgccaagtcctcttctctaacccattgccgcctaacagacatagagtagaataaatagcagaaatgaaagtcagtgaaaacaatagccatttattcaacaaacctaataacctcaaaaaatagtctggaaactaccggggcaaccttagaagagatgtatacaaaccttgtaag

SEQ ID NO: 22686 - DNA, 507 bp, Arabidopsis thaliana landsberg
atggtggttctctcgcccctgtcgggattcaacacccttaccattcaccccccatgggtctcttcgactatggtaccccagactgcaggatccagatagatttggatccctagatcgacagagtcgggtctgtaataatgcttagttcaatgtcttagtctagtcagtctagttagagttagtttggcttatcttaaggttgaatgctaattatgatggacatgtactgtaacatccttaattttagggtataaaattttctttgctttatactaaaaaaatgcaggtgttacatttactttttactttgttcttttctctgttttttttaaaataagttaacctagtatttatgggtgttattttgaataaatatgagtgttgcatttcatgtcgaagtaaagtatttgtttgctaaaaataatcgtggcggtgtttacgttcggatggaggaaaaactataaaatttgaattagttggaaatgatataatataaatatatatata

SEQ ID NO: 22687 - DNA, 622 bp, Arabidopsis thaliana landsberg
  unsure (1)..(622): unsure at all n locations
taaatgtaaatctaaatgaccgtataatcatacaagttgattatatggtgatgcacaaaaacatattatatatgtttcaatattaacatttctttttgaaaatgttaaacacttatgattcaacttataaaaaaacataagttcatcattgatgtatttgggaaaaatgcacatttgaagtatatgatgagaaagtagattctaatgtagatatttaacttcctaatgattcagaataacgaatccgaatgattttgagtagtgttttgttgtattttttcaaattgattttacagtgcgaggtccttgcgagggatttgcaagtctttcgtagcacttccttcgcaaatatttaccctaaaacctaaattatttaaaatatttagtcatgtttttatttgttgagggtcttatttgaaataggagaatctaaatcaaatctgattcaaacactgaatcaaaatgatggagttaataggttcaaggattgcgagggagttgctagtagctctcgcatttccctcgcaaatatttacctaaaccctaaattatttaaaacaaagattgcgagggagttgctagtacnctcgcagttcctcgcaatatatgctcgttttaattg

SEQ ID NO: 22688 - DNA, 1084 bp, Arabidopsis thaliana landsberg
aagtagtgacggtagtgtccgtcgtacttattgctctctatttttagaacatgacgaatgaattgtaattatctattattgtatccctcctaattcttattaatgtattcaactattagaatgtattgaaaaaatcgcttatttttatgtttgtaagttaaattttcctatatcacttattgagatgtttacataattcaaaaacgtcacataattatcttgcgagatataatcaaattcgagatatgcgctaagcaaacaagctccaaataaagtatttcaaattcaaaagagacaatttagttttctagaaaatgttttctctcttctatcacaattcaggttgattcccaagcttgtcgatatggaagattctgtttgctagcttatcaatctcagcggctcctctctctaatttgagtctacaccaacaaaaactaaagggttcacatcattatgcctaaatggagctcatttataaaggaacaacttgtgcttaaggaggtaattctcagaccaaacacgaacatccaacataagaagtaataaaagctaagaaaaacagttatttacaaaaatcaataaataaaacaagttttgttttgataatatattaacacaaaaaaaatcagtataatcaacttaatagtttaatatattaattattatccctttaagaatttttttttctaatgcccttttcatgatgccctttttcaactttacccttttattttatccaattttatttctagcctttttaaatttttaatgaccattttacccttatttggaaattgttttaggttaacaaaatgaaaaattaatattttgttgccaaaagtattccaaaataaatttccggccaaaattttcgaaaaaaatttcccgccaaatatttttgaaaaccaatttcccgccaaattttgttttcaaaaatatttttcccgccaactttttttttttggcgggaattagattacaagtggattttatgagcgttttaaaagatttatcaagggattttaaaagggttgtatcaggcatacaagggagatcataagggtgatttacaggggatttt

SEQ ID NO: 22689 - DNA, 471 bp, Arabidopsis thaliana landsberg
tgttgaatatacactgcctttattatgggagaaacttgagatatcttcaaagttcaaggaatgatctgagatggtgaaggagtttaatctttgtaatgtatggcgaaagagagggatttctcgagtacctatagtccatcaagttatgcagagaccgaccccggggaaagtaagcatactgagtgatggttctgttgtagttgaggttggaggaattgagatagggcaaggattgtggactaaagtacaacagatggttgcttatggtctcggtatggttaaatgcgaaggaaacgaaaagctcttggatagaatacgtgtagttcagtccgatacactaggtatgatccaaggaggtttcactgctggtagcacgacatccgagagcagttgtgaagccgttaggctttgctgtgttatcttggtggagagattgaaacctattatggatcagatgatgatggagaagtc

SEQ ID NO: 22690 - DNA, 394 bp, Arabidopsis thaliana landsberg
actctgggacatgtcttggttcgccgggggatggataacgcacatgtcttgtctgagctactgatggaatctgtgctgcaaccgtacacataatgtaaccttatgggaggccggaccagcttgggacaggaacttactcgatggagcgctcgtctcaagcgtatgtaccaactacactgttcactcacgcttgtcaggcaatttgaatcctcatccaagaataacctctgatacagagagatcttcgtcgggatgatatctgagcatcacccactctggatacttactgcagcttatcacgttgggtggtcgaacttacggtgacgatcctcaagttgaacttgtgctcttttactttttactggtgaacttgctaaagcccttacttgtttga

SEQ ID NO: 22691 - DNA, 529 bp, Arabidopsis thaliana landsberg
  unsure (1)..(529): unsure at all n locations
aaatcagatggtggctccagctatatgtgccactgttggaggcacacactatctggaacgtagttgagctgtccaaaccattcgatatttcatccattaacagagtagtagctgggcccacaacaatttcacctacaatagtcgacatagatatttaaaagctctgatcagaaaactatgagaagctgtaagaaagtgaaagtacctgttgtcaacctcctcttttggccaccagatattccaggtcttgtggcatctcctgctcgtgtatctgcacagatatcgagtcccaggatctgaaagatagattcataaattattttatacgcagcgtgaagataattagtgagaagattagaaaagcaaccctgaaagcataatacctttagaatatagtcagtttgcatactgtttttcaaacctcaacagatattgcctgtaatagaaaagccaacgcacaatttgagnttgcttncttttaaatagtatattaagaagaaaataattcttgcatcaaaccaccttcctg

SEQ ID NO: 22692 - DNA, 625 bp, Arabidopsis thaliana landsberg
  unsure (1)..(625): unsure at all n locations
ctctacaacatcctgtaaacagactaattaaaccattgcgtcatttaatcatctacaagaaaattctttaccgttggcgcagaccatctgctatcttatgttatacacagcgaattcacaaatgctatgtttgcggcagatatagtaggtgtcacccctataacagcattggttagtacgctatgatatattttgatacgatagcaactctagaacgtcattatagtattttgatatagcactttaattttttgttataaattactaatatctcaaattttgtgtcatgataccttcacctaacatggcaactaaatattgctgtctaatataatttttgtaactttgtgttttatgatataatatataatttttcgacaaggacatcgaagaattgctataataaacataatgatggcttttgattatgcattaatataatctactatagttgaataccaccactaatttttgctattatatctgttctcatagaactatcttttgtgattctaaacctgttttgcntaacataaacatacaacatataacataaatctgaatagatattatatcataagtctgattccaatccacatacaccatntaaaagtaaaacataatc

SEQ ID NO: 22693 - DNA, 533 bp, Arabidopsis thaliana landsberg
cttttcatctttaagtcggtttcacctgctgctgtcacgccgaagctttcctgcttacaccttcggcgctgcaccaaccttcgtattattctggtctactgtgatgcctgacttgagtccgaagatacctgttcacacattatactccagaaacgctattaaatcctgtttttgaggatcttcggatgccgaaggtccccaacaccgtgttctagcccttgctgagccgctgtaacgccctgaatttgggggtagatttttttcttctttttactcaccaaattcaggtgttactctctttccttttctcgtttcgctccctcttcccaatttcaaagcaatgtagtggcgggtgtccgtgtcatgtgtaaacaaaacctaaatgtcatgggtgttgcatcatgctgaagcatatttctttgtcggttgtcgtggttagtcgtgtgttcatctcgtcccgtttgggatttaggttcacgatcggagtccgtttggtggatgtgcgtgtcgtgggtttgaccgcggtgtgacca

SEQ ID NO: 22694 - DNA, 435 bp, Arabidopsis thaliana landsberg
aggatcccagtgggaaatagcctagtatgtgtcagaatgtgacacatgtcagaggataaaggcaagccacttaaaatcagctggtgccttgcaacccctatcaataccttcatggaactgggatgacatcagcatggattttattatgggtctgcccaacacctctcagcatcatgacttgatttaggtcattgtggaccgattgacaaaagtggcacattttcttccagtgcacaccaccgataaggctcagaagtatgcaaagctgtatattgactgaatcgtgtgtttgcacgggttacctggacaattgtctctgaccaaggagcccaattcgttgccagattttaggagcaattgcaagagtgtttgggaaccacgctaataaggagttcaacttaccacccccagactgatggttagaccgaaaaggta

SEQ ID NO: 22695 - DNA, 1459 bp, Arabidopsis thaliana landsberg
aaaagaggggaaaaattggcctgaaaaaaaacccgattttatttaaaatttgccagaaaagatactgaaattttggggtggaaataaaatcaccatctattttgtcttttttttcaattaccacctttcaccgtaacggaccgttaacaacgctaaccaaatcttcgaacgctgttcattttattcacagaaaattcctgaaaaaacctaacgtatttaatatttgccaaaaaaaaacatgaacttatttgttgtaataaaaatacccgaactaacttaacttggagatagaaaacacatctattttttttccccaaccaaattatcaaatgttattaattttatttaaaagatattcttaaaaaatggactattgaagaaatcctctaaaagcttaagttctcgagtaatatcaaccaaaatcatgttattgatgggtaagttttatcctaaattactaatgttgttttcaccatctatcatatatctagatttgatgtaagcaacaataaattaaaaagaataccccttcagttactgaatgttcttattaatttcttcaatttattgtggttagcttctgaaatggatagatgtggtatgttaaaactagaattcaaatttggtccaaaattgattatgagtttataaagggataaaatcggctttatatatagccattctcatttatcacgtgcaaagaaaatgaaaaaaaagtaattgtaattttatttggttaattcttttgataaccattacgacaaagtgggtgaaattgaaacaaaaaactaggtcattctttttatttcaactttaaactaatcaataaatttatggcagcgaataaaaagttcaggcattgttttggcaaatattaaataaatcgtgtttttcagaaatttttcataataaaattaaaaatgtttgacgatttggtaaaacgccattaatggccgttacatcaaaggggggtaatcggaaaaaaataatagatcgtgtttttttatttccaacccaaatttgtttgtatatttttctgccagcgaaaaaagttcaagtaattttctggcagattttaataaaggaaatttcccaaactatatttattaatagatttttaaaaagggaaatttactatagtgacaaatattttgtgttttataactagcatgtcaaaaatacagattttttatatgtagtctctacaggtttttttctaaaactttaatatcttgaatggttgtgtaacatatctgccacatatttattttgtaaccgtagattcttaattgtgttggcaacatatttttttatttaaataaaaaaatgtcgcttaataacagatttttaaccaaataataagaatatataatgaggacagatttattttatgtaatcacaaactttctaaaacttgtcaataaatctgacattttacgagaagttttttttaaaaaca

SEQ ID NO: 22696 - DNA, 591 bp, Arabidopsis thaliana landsberg
aactctctcatcgaatgataatttcaaaatttacgagttttatatttaaaaaaacattatatatgagaaaatatgacaatatattgaagcaagatgtatataaatttagttattaaaatacataaaataattcttagtagtctcacaatgttgattatactatcatttttttttataagtgaccaatcgcgattagtcctttctccttgcctctcttatttaaagtagatcatctgttgcagatgttttaatcaatcaacgtcactatcttttctattggtgaaagttgatcacgaaatcgatcacgggaaaaaaatatctgacgtggcaggggcgactctgaaggtgatctagggtttttctatcgtgggttccaatcaagcagctcaggcggatcggccgccgttttcctccgtcatgtcgcaggcgacgacagtggagaacaatccaaatgatctagatgcctcgccaggggtgttgcagaagccatcatacttgtctattgtccaaaaccgaccaactctttcaaagcatgatttcagtgtaaccatggtagatggaagcccgactgtcccagttccagatgagatt

SEQ ID NO: 22697 - DNA, 503 bp, Arabidopsis thaliana landsberg
ggcgggcgcccaacattagatcgtgactacggatggatcaataacattttttacgttattggaactcatgtgatacatcatcgggtccgggagatcccacattatgatctagtacaagcagtaagagttcttgatgatcttaagtaaagactattctggtgtggacttactttaatatggtgtgctaaacctttcatatctatcttttcattttcctctttttctagacagaagcagctaaaccagtactaggaaagtactacagagaaccgaaaaactctggacctctgccacttcacttactgggaagcctcataaagagtatgaaacaagaccatttcgtaagcgatacaggagatgtcgtgtactatgaggcagatccaaaactcaatggacaaagaacatgaggacatactgcagtgaaccaggcatacaagttacatacattcatctgggtccattcattatgacctttttgttttgtgggaaagccttttcaggat

SEQ ID NO: 22698 - DNA, 728 bp, Arabidopsis thaliana landsberg
  unsure (1)..(728): unsure at all n locations
cattgctttttatctcttgtaactctcattctgtttcatttttttcatgtaggctcttattcagagtctccctacttctaagatggtggagtcatgctctatagctggtcctggatttgttaatgttgtactatcatctaagtggatggctaaggtatagtcatgttctagttcttgtgttaataattttgtgtttgtcataattgttttctaatctatctgcagagtattgaaaatatgcttgttgatgggattgatacatgggcacctactctttcggttaagagagctgtagttgatttttcctctcccnnnnnnnnnnnnnnnnnnnnnnnnnnnnnnnnnnnnncaactatcattggtgacactctagctcgcatgctcgagtactcaaaggttgaagttcttcgcagaaaccatgttggtgactggggaacacaggtaggtagctacttttctgcctttcaaatgatttcgtaaccaagttttgcttattgtattcattgaagtaaaaagctgcgtttgttatgcagtttgggatgctaattgagtttctctttgagaaatttcctgatacagagagtgtgaccgagacagctattggagatcttcaggtcagctgtcttgtttcatatggccctctcaagctttacaggtcttctgatggaccaaaagtttcattatatgctttatggtaagaaccaatggaatttaagttcttacctttt

SEQ ID NO: 22699 - DNA, 510 bp, Arabidopsis thaliana landsberg
ctcttaacgagtccgtcaagaactgtgaggcgcttgcccaggcagctgagcagaaggaggccgaccgcgtggctatgtccgaggccatctcggcgttctgccggacctttggcctcggcgacgttccctcgggcagctccccctatagtcgcctgtgggccttggctggccacgtgcgcagagactccgtggggcgctgcaccacgacgttagggggccttcgcgtcctcgcttcccactatgacgtggacttggagtgggtcagcgaggggtactgcatacccgacgaagaggaggccgcccgtagccgaggtccgaagcttgacgcggctgccgatgggccacgcgcttacattggcttccgtcttcgatgtggagatctgttcgcctgcgtcgccagtccgaagtcgggccatattccgccgctggcgggcatgatgccgatggtgctgctcttcagcctgcgacacctgagcctgtcgggaaaagtatgttgtaagcatgtgaatg

SEQ ID NO: 22700 - DNA, 651 bp, Arabidopsis thaliana landsberg
aacagcatttatgtgaacctcttgtcaagagaattgatgaagctatgcatgtatggaggtgttcaaaacaaacgcatggttgtatggaggagagttaggagatctcttgaaaaaatctccattgttagggtagttcttgagtttgtatcttggaatgagaagtgataaaagataagagttcatagcttcaaacttatcaaatggtgcagtgaacgtgaatcgaacacgcgacctaagtgaatataaaagagggttgcctagttgttctatgttggtagctagttagagaacaatggatttatgtggtaataagtgcgtgccctggtattcatgctaagatccaaaatcgaaagaaaaaaagtgagaacataatcggagatatggtggaggactttattaccaggaacatcaatggcagaagcatggtacttgcgaaagtcatctcgtcctttagcggtacgagaaccaatagccaattcaaaggtagagccacgtggatatccccgatgaaagcctccgggaacaccactagctgagatcattcccgctgcctcagaaagcagctctctgcctatctgcaaattcgtggaaaggcatcgaacgatctaccaccatagtgaacaaaaatcggaaacaggacgacctagcgtg

SEQ ID NO: 22701 - DNA, 291 bp, Arabidopsis thaliana landsberg
cgccatttcataataacatatacatgaaatacacgagttttattttatgttccttttttaatatatatataattttgtagtaacatgtaaagttttgtttctctaatattgtttgacattatttttttgaaatgtatgtcttaaatctttctatgaagttttatcattagaacaaatgattgtcaatattgagggtgtgttattggagtaagtgaccatcaaacccttattttgaaggtctgacatctttaaatttgaggactttttgaactccaacaaacccttattttt

SEQ ID NO: 22702 - DNA, 574 bp, Arabidopsis thaliana landsberg
agaccatcgaactcatcagataaggtttctatcaaaacctctgattatcaatcaccttttctgggcgaaagtgggtgggaataagttgaggaactcaaaggtagattcgattcgaaagtaaatcagaagaagtagatttagagagagatgaaagaagcttcgattttttgggtttccatcgactaaagagagagagatgaaagaccatcgaataaagagagataagaaagtaattaaaacatctttgattattgacccttagatgtattctaatcaacggttgatatgaatagttaggtgatccacacattaatcaatgagccaatgagttaattgtcctcttaataattcgtgacccttagatgtatactaatcaacggttgatatcaataataaggcgatccacaccttaatctattatccaatgaaataattttcttacgattattatgtaaatagccaaatatgaacgtattttctttgtattaactttgggatatggcgttaaaattaaacttaaaattaaagtttcattatttagagtttttaaaatcaaaattttattatccttata

SEQ ID NO: 22703 - DNA, 598 bp, Arabidopsis thaliana landsberg
  unsure (1)..(598): unsure at all n locations
gtataacgtctagacaaagcatcaacaatcacattatcctttccttttttatgcttaataatgtaaggaaatgactctataaatttgatccatttagcatgacgtttgttcatattatactgccccttaagatacttcaaatattcatgattcgaatgtatgacaaattctttagaccatagataatgttgccaagtttgtaaaacccgcactaaagcataaagttctttgtcatatgtagaatagtttagagtgggaccatgtaattttttgctaaataaggcaaaaggtttacctccttggatgagcactcctccaattccaatgccgctcgcatcacactcaagctcgaatgtcttgtcaaaatcaggaagttgcagcagtggtgcttgcgtgacgtttgtcttgagggtgtcaaaagcttgttgttgccctggtccctagcaaaacggtctccattctttgtcaacttatggagaggtgctgcaatggtgtttgaatccgcacaaatctcctgtaaaacactgtaagaccaaganaactctgaacatgcgtgaccatggtcggaagtggccactcgtgatggtacaatttttcc

SEQ ID NO: 22704 - DNA, 1929 bp, Arabidopsis thaliana landsberg
gcgccgaccagttagcgaataaaatcaggaaaattcattttaaaatcatttttaatacgaaaataatggtagaaacttgtataatccatagaaaattcatattaagtccaaattagcccattccagttcctataattttttaatactattgtttatcatttagtgtctctgttttgacatgaaagccatattaaaattgatatgataattaatcttgtacaaaacgcataaaatatctggaaatccataacttaaaatctataactccaaaattaataatccctgttcctgtgatcttatttcaatatgtagattattaatatgtattttgcatatatgtttggtgtaatgttaattttgcctataccatgtatgtttgtattgctacgtttagcggtgaggacacgtgtcatctgaagagcaagttggtacctggaatctcaagtcacaggcaagttgtgcccttgatcacttctttttacctagccatgttctgattaatcataatgatctgcataggttaattttgatgggacctaataggttaccctagtttgtctatctttataccttgtttaccactgaacttttagggtagtacttgctagtgctttatgtggttttgggtatgaagatacattattcatgattatacttttgttatccgttgttatttactgttcatgataagatcattatgttaattggaacatggagcgaccacccgggaaaacagtgctaccacaagggtttatggacgcccttggctgattaattaggaaagctagtggaggactaccttacccgaaagggtcaagggcagtaggggagtggtcagtgtagggaggtccttggttgattttgctgcgatggcggtcaggcaagggatccctgcattggagcttcctataaactgtagcgggttttctgaagctagtggaactttgtaaaggcctcgtagtgttaccctgcctcgcctcctcggtagagtgtatgggaagtcgcgatcccttggcagatgggtaacatgacttgtgggtaaagatgtgcaacctctgcagagtgtaaaactggtatactagccgtgctcacggtcatgagcagctcggaccctcacatgattaatttatggaactaaattcaatttgtcatatgcattacatcgcaggtgatgttgttacttttgttctactacttaattgggttggtatttacttatacttagtaactgctaataaaattttgaccaactttaaaagcgatgctcagctctaaccatcctctttggtaagccttacacttcacatgagcttccatctttggcgagttcatgcacattattccccacaacttgttgagcagtgaacgtatgtgagctcactcttgctatctcacacccccccacaggtcaagaacaggtaccgcaggatgaggcgcaaggaggatgctgcgatgagttcatgagaggtctaggccgtcgtctcccagtcaactttgggttgctggaccgttgtctccttataatgtaattatttaattattttgtatagaactcttgttatatagtaaagatgtgacattcgatcctgtgccatgattcatcatatgtgtgagacttggtcccagcacacctggtgattatgttcgcgcccgggtcttggtgccccgaaacccgggtgtgacactggcacacttgtcagccagagcgaagagtgtggtgacagtctccacgtcatgcgtggctaacttctccaacatcttttcatcacgtactccctggcggaaagcggtgatgatgaaagcattggagatacaaggtatagtgcttcgtaccttggtgaagcgggagataaacgcctgtagagtttccccggctcctgcctcactgctggaggtgggcctcgcacgccatgctgctgataagcgcta

SEQ ID NO: 22705 - DNA, 206 bp, Arabidopsis thaliana landsberg
aaccagaagggcgctacgcgctatctctctcgaagataaaccggacaaggtaggagccctaccggttaactaattgatcgcattagactagaacgataactgaattaaccagactaagcagctcgacaaccactagcggtgaagctcctcctccccacaaagagataatgagcatccttgctcggaagacacactatgtctaggaa

SEQ ID NO: 22706 - DNA, 564 bp, Arabidopsis thaliana landsberg
ttgtctcccttctcttagcttttcatttattattacttttgttctacacgatattttgaatttctcaattgcaaggtagttaatcagatcatcatgtaacaaattcttacaaaagtttacctagagccaaatgatatgaggttaaaggttctattcacttcaaaacagaaggttgcaaagttctcagttttaaagtctctagaaaactttatattagatggatgaaatgtgatcctcatggaggatgtttacaaggaattttggtacatgaatacatgataatgattagtaaatgaaacatcacttggatttctagtttttgctaaacaatccgctgctttgttgcccgttctcggaatccattggaccttcatgcttgtatatctctgttgccatgcatactcttatttcctgaatcaaattactatggtaaacacgtttagttataaatttatttatttttcatttcttaaagataaatattatgaagttagtttataagaaactcttacaagtcagatgcacattggtgataagaaattgtaaatcgatctttttatattc

SEQ ID NO: 22707 - DNA, 500 bp, Arabidopsis thaliana landsberg
ttgttcggatagttataaatatatatgtaaatatattgatcgcgataacttatattataccgtattaaatcatattatatcgcgataaattcataatttctgtgatatattatgttaacagtgacattttgttaattgtacattttatgcatttgtattcttaatttttatattttctggatatataaattaactattttggtatcttgttaacatagttatcagttaattgataaaaaagataagggaattgtaaatgataaaatagtctagaatatgttaataataacatttgtacagttgacaactggtcaaactaattatcaggtcttccattggtacatagtgatattactctttagtgaacttcagacctcacacgcgtttgctaattacagtgttgggcccttctcattcaagagtaaaaaaacgtacttattaaacagggtttaatcttcatattgaggcatgcctaattatatttttctcattttttcact

SEQ ID NO: 22708 - DNA, 564 bp, Arabidopsis thaliana landsberg
agaagtcatggagaaagctctatcgaatagtgtcggatcttcctctaagctatgcccttcgtatgttaccttttacctttgagtctcctcgctggcttctagtcaaaggagattcaatagtcttttcgattagttactatccatactaatttacaaggaatttgattaatacatgctaaatttaagtatatgtactgtaaaaacaataacacatgtaaaaataattttgttaagtttctttttggttaattatttttttttcaatatatatagacatatatattagtatatgtaaatttgttttcttattctactttttctatttttttaagaaaataaaaatattatcttaaataacaaaagtaaacatctaataattagatttgacacatgttaggattttatgagttaccaactttgaaaaccatattttatataataagatatatatatatatatatatttaaaaaatctttgttccaaacagtttataaatttaaattaagttcggataaatgaatcaaaattttatttgtaggtggactttattttaattttaaattt

SEQ ID NO: 22709 - DNA, 982 bp, Arabidopsis thaliana landsberg
ttttttgggataatcttaatccaactttgaattttaaagttttacagaaaagctcatgttttcccccctatctctctatatagcagagttctttaaaatattttgttaatatcttatttagttattagttaatactaatccattgtgtaaaacattttcagatgaaaaccatggtgttttcttttttaaaaaagagagaaaatctttggttgctttatgttctctattttaatataattggaaatatataatactaataaaaaatcatacattaagcgatgtaaagaaactataattctacgataacaaacaaaagtccttaattaattatagaattattagattagtcaattactggtgtaagatttagcagaggaaacagaggggctagtaacgtcacgctctccgtggccaccgaagttgccttttcccatcaacatctttatcgctatctgagctacttccgcaaaccactcttcctccggcaacgtactgtttcatcatccatcatcatcatcatcatcaaaccatcatacatacgtatgtttatgtttgtaacggataataaatacgtacctataagggtcgagtccagtggctgaaactgcttcgacggctcgagctattatgttcttgatcacttgatgaaggtttctcgacaagtaccttccttgcgaggcaaagatcatcacgaactccatgtccaggtaaaactgttgaagaccaagtggacctaatggtttatctcctgtctccatctcttcccagaaactctgatcatcagatatccaaagaatcactgtctccgtcagtctcatcagcaatatcgtcgcgaatctctctctccccacaaacatatcgctcacaatcatggctatcctcgtcaatttcgcaaacagttcctggaaaaatggtgaagggaaccattcaggctcttcagtggtttcgtccctgaagatataaatctcaaactgagacggac

SEQ ID NO: 22710 - DNA, 3737 bp, Arabidopsis thaliana landsberg
atcctgttactcgacatggatgcattagttactggaccattgaagtcatactgcccaacggagccactccaagaatttgtgggttccttgtgttatccggaaaactgccgctttccctcatcccatttagaccacttgaagacctgaagcacaacaattccttttatcatacacttgactcagattcgctatataacagaatcactcacgaaactacaacgattctttaaaacagcagcggactaaaaaggcttaatctttgaaacattataaggctatagaggtagctagattctagaatcagtaagagagcacgagattgaactatattggttaagatccaataagcaagctaagtcttgtgatgtataaccactattaatgcttacgaatattcatacaaacggaaacttcttatactttcatgaccacaaattagacaaacgaagaggcaacattcatcatttgtcctcttttatgttatcgaaaaggtcttacacaacaatgttagatacacacatgagtctgacccaattttgtaagccagggtttagccaagtaatgaatattatactatcttagacataagtttaagttttaaacctgaaaataagtttggcacccaagtatttcatcaaagtttcagacttttagccaaaagtaacctaatttcaatcagtgaaaatgggcaaaacccataaagaaaaattaaatctttcacagaatcaaacgaaaatacacaaacttgggttatataagagcaagagtagaaacaaaactgacgaatttttgagaaaaattagttactttacctcatcggagacgatgtttcagaagtcgccggcaaaaatctccgagaagctttgttgatttttttttttttttctcttaattttctttaagatgtacatttggtataatcgccacgtggacaaatcagtgccgaaagaataccatttttaccctcttcttgccatgtcttgagtttttttcccaagtcgctttctgtttctctgatgagagacaacgaaattcactaagcagcaaccctaaatttacactcctggttagtaacattttatctcaatttcgtttatttatcaacaaattatgtttctatttgcttcaatttcttaaatctccttaaaaagtttcgttttttcccacccattttgatacgaaatgtgtccaatttttatccaatttggttataatttcttattgcatgtccagtatttttcaaattttctattaaagtttcaatctttttgtataaacactcataaagaatcaaacttttgatgttgtgttgtgtgtttaggatatgagtgatacaatgcctgagatcgtgtctcctttagtagctgaaaactctcaagaacaagaagaaagtgtgttaatttcattggatattgaagaagacaagttgtttctcttacatttcatcataggaacttactttggaccagatttaagaaaacaacatcatcgtccaaagcaatcagcttttcagattcaagcgttgaagaatgttgtggtagatgagttaagtggctcacttatgaagagagctgagctagaacgtgtgtattatcacattattagaaatgttgatccgtctctagtcatgaagccgaaaaagttacgtgaatatttcaatgcgaaacgcaatgattcgaacagggattaccctcttttcgtggatctttttccgcgaaaattgcaccctgaaacccatgttaggcataagtttaagtttatccggagcattgtgttcattaatgatccagatacttcttgtatgagagaagaatgtgttgcgcggtttaagcggcttacgggattggatagctttgctttgagccttagtgttgatgtaactaaaagtaacggcgttgttgcagctaatgaggttaaggttgagattgatgagagcgtggaacctgtgaaagaggataatgcgggtacttgcactagcggtgaagaaagtgatgttgctgcaaaacctgaggtgaaatctgaagctcatggtggactaatggtgggactgatggacattggtgaatgtgatgacgcttatctcttccgtgtatcgcttcctggtgtgaaaagagatgaaagtgagttactttttgctttatctagaagatctctcatcccactaaaccagtttcttgatttgatgagtgtgagatattgcaggatattttagctgtgaagtagaagacaatgggaaggtactagttagaggagtcactacaacaggcgggaagcgagttaaacggtattctcatgtgtttgaaatgcaaacgcggagtctctgccctcccggtaacttttctgtctcgttccgcctccccggtcctgtccatccacacgagttttctggcaactttggaacagatggaattcttgaaggagtcgtaatgaaaaacttgcagaaacaaactgtgtaaacgtttggtagtgatataggaagcgtcggtttttggttttggttatgggtagggataagtacggactatttaaactcgagctaagccattttgaaaactatgtgtaaggactggttagtttacaatatcactgtagctttgaactttataagtagtaatctagccttttgtaagttcaattctcagtttatgaatttgttacattgaccgaaaacagtttgatgacaagataaaccaaactgaataacaatagataaatccatggatcataaaacagaaattattctactacaccaaactttttatgtcgcaatagttttctattaacattcttcttcttgagtagatccaccggggagagcttcgaattagacggctctgcggaaaacaaacaagaacaatcaaatcaagttttgtgtccatgtaacgataaagcacaaatctaaaccaagaactcacagtttattaggccaagctaattgtcaggatcctgctgctcaggtcctggttgttgccacattggctgacccatatacgggttcggcggatacgcgcccgggttacccataaccattcccgggttcccaattggagctgttccaggaggcaagtatccatacggataacccgcagctgtagcagcttcagcaccaacaccacccaagacttcatcacgaagatcctcccgaggaacaatatccacaagaaaatcaaaaatatcagttctagtcaccgcagccgcgatatcattcttctgcaacgtccttctcttgttctcctcagtatggttccaagaccttaacgtaagctccagaataaacatctcgcaggccctggcgaacacaacaggcgcctcggccgagatcatacgcacatcttcatcagctttcatgattttcttgattcttgccaatggaaggctatggttcttgaaatcagtggttttctcaatctctttgaattgagtctcccagaaagattgaagctgttgagtgagctgttgttgttgttgctggtggatctgatggtaagctggatggtctgaaccggttggtgtagtggtcatggcgttggtttgatatgggtttgaaccatagttcatagctgatgattgtccttgttgatccatttctctaccaaactaagagaaacatttttcaaagtttttaattttaattctatcatcaaaaacactaatgaatttataaatttcatattgaaaacaaaaaaaaaacacaacttaaacacattaacaatggtcagacaagataaaaatcagaa

SEQ ID NO: 22711 - DNA, 472 bp, Arabidopsis thaliana landsberg
tctggaaagttcaatagtgtgttacacaataacggtcaaacatcaaatgattcttcaataacaactatttagacaggcaaaaattttagcgtgagactagacggatcgatagggcataatagcatatatgtatagcccatacattaataaatagacattattacaaaaatttcggtgctaaacaagttttttttaatggacccttttattagattaccttaaataaaccgatgttaaaaatcttgtttacaaaagtaataaaatgcggttggatatgaacatttcgtgctaaataatccgttttaacattttaacttcaaaaaaataaaaacaaatataaaaattaaacacatccttgtcttcatgaatcgcctctaaatacgtagaaaaaattggtcactttgttggaaaagacaccacttttatcaagtctgaggagtctgtaaagaacgttacttcttgtttgtcttga

SEQ ID NO: 22712 - DNA, 1861 bp, Arabidopsis thaliana landsberg
gcgttataatattgcaaatgcgacttaaacttttgaaattgaaaggaaaagtacacagcaatgttgttattgatacagagacagttacagttgaaagaaacaaacttttgtatgtaatgaaagtagatagataacagcattactacgacgaagctttcttttgcttatacctagcagcagagaagaagtaaaccgccatgttcacaaggctaagaccagccaagagccagaagaagtaatcgagatgacctgaattgagattatccgaaatccaaccttcttgcccatttcttgttgtaaaataagtcacgagcgtgaggatcaacgagctcaagtagttaccaagtgcattggtcaaaagagctaaggcactgcacaagcttctcattgcatctggagattggtcgtagaagaactcgagctgaccgatgaagtagaatacttcggctgcaccgagaatgaagtactgtggaatctgccacaagacggatatgggaactggggctcctgactcgactaatccaagatcgttggccatatggagacggatgatttcgacgatagctgcagctgccatacagagaacagagacaaacagaccaattcccattctttgtatctcagtgaatcctttgtctactcctgtgaactttcttgctaagggaacgatgaaccggtcgtagagcggcacccagatgatgacgcttgcagtgtcgaatgtcccgagtgctgcaggaggaagctggaatgatccaattttgcagttcatggctcggccttgttgaacaaacattgtggacatttgtgcgtatacagctgagaaaatgataccagaagcccagattgggaacattcggatcagaatcttaacttcttcgacttgagtcacggtacatagcttccacgggttagggtatgcatctccttctgatatagttgcggctttgtcaagaaacctgtacattgatatcaaaaaccgcttatttaaccgttaatagtctaatgctcaattcaaacaagaaatgagagggaaaaagattttcttgtaaccgtccgtggagtcttcagggaccttgagattcgatttacggtatgcggctacaagaacttggcagacgctagtaatcgggctacctctcggtttctgaaatctataaagcggcgtgccaaagaagaaactcatagtagcaagtcccatgaacacggtaggtatcaagaatcctaattcccatccataattctcttgaatccaaactagaacagtagatgaaacaaaagcaccaatgttgatagtgaagtaaaaccagttaaagaaagaagcttttctgactcgttcgcttggatcggtcttatcaaactgatcagcaccaaaggatgagacacatggtttgattcctccagtgccaagagcgataaggtaaagccctgaaaataaaaccgtagactgaaccattgttgctggtggacatagagagccaatgcattccgctggcttaagacccggaactgaagctgagagtgtcaatgcaaccattcccttaaaacaacatcaaagaacagaacatcaagccaagaacagaacataaagcaaagttatttttcaagaaaatgcttacggtgaaataaatggcagagaaacaagcaatagtccaatatcttccccagtaagcatcagctattaaagctccaataagaggagtgatgtaacatgttccttgccatgtcatgacatgtctagctgcagaaacattagtctcatgcaattcatttgtgaagtaagtgattagattcttggcaatgccataataagccaaccgttcgcagcattcgttagctgcaccaacaaaagcatagatatcag

SEQ ID NO: 22713 - DNA, 3081 bp, Arabidopsis thaliana landsberg
  unsure (1)..(3081): unsure at all n locations
tactactttctagttctcatgtacgttggaaactttttataagtttatatgctatgaggggataatctttgggtttggtgtgtttggggcaggtaacattagctgctatagatgagatgtttcaagctgcacgcgccatcatgcgttggtttggtgaatgtgcgaaggtgtgtagacttttttccagcgtcaattaaatatgcttttggacttttaataatccttaataattttcatgagcagattattgcttcagaaaatgaaacagttcgatggacaaccccattgggtcttcctgttgtacaaccttaccaccaaatgggaacaaaactcgtaagtcttcctaaaagttatcactgacaccattactctcgtctgttgaatctgaatgtgactgttttcactttctatcaaaatgaatgcaggtaaagacatccctccagaccctatcgcttcatcatgaaactgatcaggtctgcttccactttaccttggttttacatagaaacaaaagataagttaggaaacagagtacgatgcagaggcctattcctaaaagagtttcgtgggcttttgtaggtcattgtgaggcgacaaaggacagcttttcctccaaatttattcactccctggatgggtctcatatgatgatgactgcggttgcctgtaaaagagcaggcgtgtgttttgcaggttctgtcctttttttcacaagttaaatcttttggacctccatcttcttcttaaccttggtctttgtgtcaattaacacatggcatgtaaaaattattctaacaggagttcatgactctttttggacgcatgcgtgtgatgtggataaactaaacataatactacgggaaaagtttgttgagctgtattcacaaccgatactagagaatgtaagtgtcatatgttcaaatggttcagtatatatggcatgtagaagactgcttcatgaactgagtttgttttttgttccctttttaacagttgctggagagctttgagcaatcgtttcctcatttagactttcctcctctgccagaacgaggagatttggatttaaaagtggtgttagattcaccttatttcttcaactgataaagaaagtaatgtcttccactaagattctcagacatctctgaagctctcaagaaacaatattctttcagaacatagtatcaaccccaaggcttgagctgtacgtgttagatggacgagaagaaagacaaacttcttgcaagggccagaacaaaagaaaagctgctgggttttgtatacagagacgcagacagagagaaggagtagaagaaatcctttgaatttacttgtgctgacgaagcttaatgaaacctcctgagatgagagttgtagcttctgatctgagagaaatcccggtttgggagtaccggaagttggttagaaactatttgatgtcatgtgtaaacccgtcggtacactgtagaatagcaagaactgtaccacaagccttgactggtgttcactatacgaaatggattactactattaactgagaaactgaattggtggaagccattttttcacagaaaatatagattgaaaatatatatgtaacacgtctgtttttttttttgttttttttcccataagtgtaatatattgtattaaacaaaccaaacatacaaaatggacttcaaaagcccgattacagatgttaacaagatctatcagacccaaaagagaaatgtcgatgcaagaagaaaacttcaatttgactccatccttaagaacgtgtcaacaacataacacgtgttagatgagtaaccaaagtattccgataacatccttcgccgtcagagcaacaattccggtaaaagatcaccaccgataataaaatcggacatgtattttcttggaattttagctggaaaaactaatcgaagctccacaaagaaataacagcttaaggctatggtaataaacgtcggaaaccacttcatttcttcaacacaaattgcaaatctctaaaatcaaaatctgtaatcatcagctcaacggaaacgtaccggctcataagcattaaagcgacaaatcgcttaaaccaattttgccaacacatccacagacttattaaaagaaaatgggttggctgattttcgagccataaactatttcgattctcagttttcaccttcggacttttggatccttaaatttccaccatcaactttcatattcctaaaattacatcatctactttcggattcatgcttaaacatacatttccaattgaaccattcatttaaccgagattaaccacaaatccgcgtttactgtaccgcgattgcgattaacccgactaatactcagacctgttaagaaaacgacgtcgttttcatttcgtttaactcatcaaaaagagaaagaaaacgacgtcgttttcattcttcttcttctgcaaaatcgatttagtcgattagggttcttcattcgacaattttataagaaaatgagcaccaacagctactactcatccgcttccagttcaggatttcgtgtgtgtcctcctggtgtcccctcgaaatggttggtgtggagaagagatcattacattcacatcgaaaacaaaggagaatccataccggagattctaccgttgtgcgatagcaatgaaggtacacctttcgattttgtgatatatttgattgattgaaggagtaaatgattggaaattctgttttatagagagaaaatgaagagcacttgttcaaatgggttgatgaagctctcttgtacgaaattaagatggtaaatgagaagtgtaagtagagttgcagagaatattagtgacctcagaatgaacgtgatggttaatatggagctccttaataaaaacgctaagcagatggaggaagagctgattaagaagatggagggtgaactcttgaccatgaaggagaatgtggaagagctaggtaggacatgttatggcaaagtcagctttgaagactgtaggggttgctgaagtgataaatgcatctattgtatggctttggggaagagtgcaggtgttgttaggtttggagtnaaatgtag

SEQ ID NO: 22714 - DNA, 540 bp, Arabidopsis thaliana landsberg
tatcgtccaatattaggcataatgatgaattagttttatttctctttttccaaatggttatgtgacaccacttgcatttttaactgctgaggagatgatcactgggattccaaatcctaatgccagagcaggttataatcccgggccagcagaaacggttacaacggttatcgtggaggtacggaaaaatgttttgatttttatggttttgctaattgtttatcgaggttactctaacaaatgtctaagggctagtgcaatatgtaatatgtagtgttacttatgtgatatgtagtgttacttatgtgatacatttcgctttagtgttacttatttatacggctttagtcattctaacaattgagtcttcattcttttggtttgcagaaaaaggctattgaagaaagaagccgaagaactcggtcaaaacatatgcatttcaggtctgattattcagatatcttaccgggtaattctgattccatctcaccaaaatgtgagtagtagaacatatgtgacagaggaccaatttctcatttg

SEQ ID NO: 22715 - DNA, 533 bp, Arabidopsis thaliana landsberg
ttacataaaaagctaaataactttctcattacaggtttcatcttggcacatttagccgaagtttgtacgtggaaactcacatacttgagggcctcatattggcatgttgtggttaagatgttagttactgatataagacaatacttataaaccggagctacaggatccaaaactttcttgcttgcctacgaattacacaaatcaagcttttttaagtgtattgagataagtatgaatataaactacaagacaagatttgataagtgttaccagtaaagcagcagcagaaacagctgatgtagtgagacgattacagaaaacaagaaacaaagagtgcttaaagtactcttttttcaatccataaggtactctcatgatcttttcctgcaattacaataacatattctaaaaacccagatcgtttcttcgatcaattttgaacaatgagagacgaattcgaaggtaaaacaaaaggaacccagaaaaggagagacctgaagaagaccatagatgacgagagtgagcatgatccc

SEQ ID NO: 22716 - DNA, 1225 bp, Arabidopsis thaliana landsberg
ttgaccttcagttttttcggttatagaatgtagtatccatttagatattttcaaatttttggtttgattctgttcaacattttttgcttcgattccggtttcgtacattaagttcggtttatttgccaaatccgatttattaataggccgattaatgggcgtaaaaacaaataagggttgggctgttgtattgaatagtactatgtatataaaaaaggagtgggttaagtcgacttcccactttagagacaacttgtttgtgactctcaaatttctccttctcttgctttttaattgtgcgggggaaaaacttacgacaagctaatctaggcgacggcccagttcaatttctggtaagaaaagttcaatttctggtaagaaaagttcaattgtaggtttgtgagatcgcttaaaaatatctgacgttgtatgtatttttgcttgaagcccctgtctttgagttttagtttttagaggagggccatggtgtggtgtaagcattgtgcgaagaatgttcccggaatttgccccttcgccggtggttggtaagtgttttcaagatttttaaactcttgcggttatgattctaccagctccgacttacgaatgatgagcttgtagggcatgtgatttatgtgggaggattttggaaaactttaatttttctaatgatgttaccttcgttaagaatgccgcttgacaggtatgtatactccagagagtttcttcactatgatgctatatctttttttcgtgccctttgaaaatatttcttgtgcctgcagagccaagcgtcagataacatagtgacgagtgttcagagtgggcattcaagctcacgtgataggagaaggagaatatgtatatagagatgactttgctttttttttttcaaatatcattccttttgttcatttggctcatcttttgttttggcagctatagatgagttaaggaatttgaaagattccttgagaattggtgatgagagagataatgtggttgatatggctgttgtattctatgaagtatgtttaatttttttacatatcgtctcagtattaatcaatcagtcaagattcttacaccgtcttagtttctgaaggcggcaatgggccgaaacttcaccaaaggatgaaaagctgaacatgtccagtcttcttgtctctacttgacttgcaggttagaatcttagtaatcatacttacagatttttttgccctcg

SEQ ID NO: 22717 - DNA, 504 bp, Arabidopsis thaliana landsberg
attattccgtataaatctttccgaatcctcggcatcttctttatttagtcaccgataagcctaccccgtaaacatgaacccaaaacttgaagacccaaaggcagattaccggcaagcaatacaacttccgaagcaatctccgaaaaatcatgaggtggagagtctttactgaaagcatatcgacaaaacatctgaagagcttgtatgtttgatgggagtctaacttcataaatacaatcaatcccatgggctcttaaaaaatgttgatcttttgtaaccacaatgattctgctcccaaatccaaaccaatcagtttgacctaccatggcatctaacaccacttgttcattcaaatcatcaataactatgagaactttctggtgatttagcttatcccttacggaacctaagtgatctacatttatgccctctttctttaatattcccgagaggaaaccttccttgcaaaatgcaactttaatggttataaatcattccggggtt

SEQ ID NO: 22718 - DNA, 629 bp, Arabidopsis thaliana landsberg
tcttcttcttctccggtataggtgatgtttatatacacgtcttgtcaacagaaaagttaacatttttcactaaggaacattggaagttttacattttacggcactttcttgatcctcataccatcatatatgtacacatgtatttagtgaatcaaaactattaaactattttaacatttttcttctaaaattaataattaatttctaaatttccttaattattgtacaaaaaattaaaagcaataagtttttaaaatttttaaatttcattaattatatgatgaagagtttatatttttttttctcatttttcatttttttttaattttttaattacaagatatatatagtttctttatgtttaactttttttatatttaatattttcttaattcaaaacaaaaaaaatatattttaatttttagtttatttataagatactaatagtttctttatatttatcgtctttacttttcaatcctttttaatttttaattataaatattttatgataacctaattaaattatgtattggttgttttataaagtctaagtggcaagctattacatgctaacgtattaatctgtgagaaacagttaaacttctttcatatatataatacaacta

SEQ ID NO: 22719 - DNA, 580 bp, Arabidopsis thaliana landsberg
  unsure (1)..(580): unsure at all n locations
gagttaatactaaacactgctttgatcatgtttcaatttaaccagactcattttttaatttacccagggagtaaaactcattaggttttgggcctaactgcctcagtcatggtaatcctgaattaacttcactaagttaccctcatctgttggttcgcacctgaattagctcgctaaattaccttcatctgcagttttttttgcttaccaagaatcgagttcttgaaaattgttataataaagataagcgcagaacacttaacaaaatggggatgtagctcaaatggtagagcgctcgctttgcatgcgagaggcacggggttcgatcccccgcatctccaatctaatttttccaaaaatattaattgcctaattttgaaatcatgtgtcaattgagaatcccatgtttttttttgttttccttcgttaataatgcaaagctcaacagcgtctatctgaaagacggcaaataatttaacattttcatatattaccaacgtatctactttgatgcgtcagaccgtcagtggtttatatcatgttattgtgatgcanacaagctaaaatatatatacatttc

SEQ ID NO: 22720 - DNA, 600 bp, Arabidopsis thaliana landsberg
atattgattgatgtgactcaagctatggagttttcttatgaaagaagtatattgttgttcaggtcttccatcttctgtttcaaccactactcatgctactagttctgttagtacaacacaaccatctcttggtgtcacttcgagtagtgggacagcgattggttctccaaacatgccatctgaaatagctgagataattgtaaaggaggtagagatatttgctctcttttgcatttagcttttatggtatgttttgtataatatggtaatgattctcttttggtgtttgaaggttatcctcgtggaggggaattctgagtcacaagagcataaatggagatccctgaaacaggaaaatgaagtgctcaaaaaaagattgaaggtgatgaaagaagagctagaggataaggattctgagttagaacaacgagaagatttgattaatgccctcttggtgaaagaacgatatgcctatgatgagatacttgaagcacagaaactgttgatcagtgtatgtatagaaatgataagtgtgttcttgactgatttgctttctgtgggtttcacaaactttgttttttgctgcagcaaatgagagat

SEQ ID NO: 22721 - DNA, 427 bp, Arabidopsis thaliana landsberg
  unsure (1)..(427): unsure at all n locations
gggtgatnngnttgaacaacacaaagactaatgttatactttttaatgcaagatctcttctagcttgagagagggattgaatctggtgtcaatgacacaaagacttacttggatatctatttggctgagccaagactagagtgatttttttttctccaaattttgatgttttgaagtattggaaagacaattgcttcaatggcacttgatattctcaacattcctattaccacggtatcattggagtcaacttttagtattggctctagagtatagataccatataggaactgtttacttccacaaaatgttagctcctagctctatacacgtaataggctgcgtggttttgcagaatatgaggatgcataatttaagattacgtgattgttatgacgtataactaagtgattgttacaactaactt

SEQ ID NO: 22722 - DNA, 562 bp, Arabidopsis thaliana landsberg
agcaacattggatctttcttaacgcttctttgagtcaccatcattctttcctctgcgaccagtagtggtggtggggtgtcctctgacacggagaccccagtaatgcctcaaaccacggtggtttctatccatttgtcaaacatgaaagaaacattatcaccatgttttatgcaattgtgaacaaagataagaattatctgttggtttttgtatttacctgatcttcttgagacgttcaagatcatctctcagcttcatgtcaagagcattggagacaacttgagaatacttgccatctttgtaatccttctgcctgttcaagaaccagtctgggatcttgaactgacgtgggtttgcaacgattgtcatgaggttatcaatctcagcagcagataactcaccagccctgtttaacatacatcatataagacatcaatctcccacaaagcaacacaatttgcaaactacgagacacaattatatgtgccgatctatgatctatacattacacagaacaaaggtaaagtgcaacactcaagaacctatctcaaaactattactc

SEQ ID NO: 22723 - DNA, 562 bp, Arabidopsis thaliana landsberg
tcggaagcatctccgccggaagtttattgtttgacatacaggataagcagagtaccaggatgttacgatgcgctgagattagctgcgggaagagattatagatggctatcagtagactgttgcagagcagtatacgcaacacttcctgatacttgcttcttgacacttaagcctgacttggcgttaccaattaatgtcttcagagtcatttgtagtaatacggtccctgcagctgcataaccaattttatgaattttctctatctttcaatgatacgataaaaaaagatacttaaataaaactgttttaattttcttacgtcattcaaactattgtatatacatttcttttttcacttgcccttcttaatctttctatatccaaatcaattcttatatatcttttttttttcagacggtaatactgcatataatctccttaaaaccatcacatattattatataaacaaattgattgtggattctcttaataattatatttctatatgggtcaaacaaataattcattaattttcccaatctttcctgtcaaactttattat

SEQ ID NO: 22724 - DNA, 1620 bp, Arabidopsis thaliana landsberg
  unsure (1)..(1620): unsure at all n locations
aatattcaaagaaagaaggcggacttggtttttgggatcttgcaaaatttaatgatgctcttcttgcaaaataggcttggcggatcatacaacatccaaactctttatttgcgcgtgttatgaaggctagatactttaaagatgactcgatacttgacgctagagcaagaaaacaacagtcttttggatggtcctctcttctttccaagattgccttattaataaaggaacaagatacacgattggtgatggtagttctattcgaatagggatggataatgtggttgattctcatcatccttggcccttgaacacggatgagagatacaaagagatgtcacttgataatttactctactttaatggctccagctattcttgggacgattccaaaattacaaagtttgtggacccaagtgatcatgattatctccggcgtagttacctctgaagaataaggaaacctgataaacttacatggaactataacactactggtaaatacaaggttatattaggatattggcttcagactcatgatcatttggataccacacctataataatcagacctcgttgcttaatttaactaaaaaaaaaagtgtggaacctgccaatcatgccgaaactaanacaagttctctggtgaattcttggtagagctctagtcacaagagaaagattaactaaagaggtatgtgtatagatcccacttgtccatgttgctaatgagataatgaattcatcaatcatgcgctctttacatgtccttttgcaactatggcacggtgactagctaatactcaactccatcgaaattattcattttctaataacattgaggaaaacatctcaatcattctaagtttcattcagaaaaacacgatatcaaattttctgaaactcctacctttttggctactttgaagaatatggaaagcaataaacaacttggtgttcaataatttcagagaaagttcatcaacaacaatactaaaagccaagactgaaacaaaagaatggctaaatgctacacgcatacaaagtcgaaggcctacaccaattcgatccaatcacgcagccaacaagaattggacaagtccaccgctaatgactagtaaatgtaactttgatgctagttttaatgtgcagaacttagaagctacaagaggatggattatcagaaccatgacgggactccacaacattggggttcatggattcttaaacatataagcaccccactgnnnnnnnnnnnnnnnnnnnnnnnnnnnnnnttacaaaaaacatggatacgaagatatagacgagtaattatggaaggagactataaaactttaataactctagttaatggcgaaaaccattaaataaaaaaaaattcgattgggatatggtgggcccgtcgtaaggcgataaggcaattcaaaaggcgattagttctagatctggttctgtcggcgttcgctagccccttgccggccgacgggtgctctccgtccgtcatgaagaagaagaaggccaagtcccggcctccgttgttccttggctcctccaagtttgcgcgtgttcccggcctctcggtgagtccctccatttcctccgtcgcgctgttgtccc

SEQ ID NO: 22725 - DNA, 529 bp, Arabidopsis thaliana landsberg
gggtggtttaaaactaaactattcggttaggtttttatttctctgattttggtcttggaagttggagctatatttgggttgggtgtagtaatgacatagggtaaataatgggcagtagcctttgaccaccgtttactttcaggtatcgacaatatgaatggcgcctttcaacaatcaaccattagggcaaaatgtgacgaaaatgcccctatcattcctaattgtgatatatacatacggacacgtaacttacgatcagacggaagtacaatgtacagttatgctagattaaaaattaatatcatgatatttcattaacattagttgatccagtactttcactctctcctgtgtgagaaacatccacgatgaatgtacttttagttaaaaatcattcttttctattattgaagacccactttcatatactcatttgtattatcagaaagtaatgattgatgaatggtaacattacagatgatctaagatgaacaatatgatgtacatattcgtatgtacatggttacaa

SEQ ID NO: 22726 - DNA, 588 bp, Arabidopsis thaliana landsberg
acaacgtagcatttgaaagtgaattgcatcatttaataccattacacagactttctcttgatgtcattatagggtactctaacctttaaccttccttataagcaagggacggtatcagcatatgtagcaatgcttctcaattagattcttactaccaaagactagcttagggcagccagttccacgtaaaaaatggggtttgtttgtttctattcaagcttttaaaagaggaatagaaccaagattctaaaacaataaaacatgttccgatatttctaggaagagcggaaaatgatcaatccaaagggattgagtgattaacccccaccgtacggtcgagatattgcgtttgtggttttgaataatcaaaggaatcttcagcaattattaacccacaccacacggctggaagaattggcgtttgtggaaattatatagtttttgtggagaattacctcatattgctgtcttcaaaggagacgtgtaagacaagctttaatctcctccacaaatgtaattaagagtcactccaatcatatagagtcaggtactcgattttctgtggaaagcactagtcttcacaggaga

SEQ ID NO: 22727 - DNA, 270 bp, Arabidopsis thaliana landsberg
aattgaacaacaaatctcataaatccttcctcttcgatacctttaaactctattttcttaatattcatcatatattcggttttgatgtcttgttgagcttcaggtgccgttagatgtccggtttcaatgtcttgttgagactgctgacgttgtgatttgtccatgctcggtttgcgttgtttaaaatatgcgtgatgtgatccttttgcttagcaaaagtccgatttattcaataaatccggcgtccggtcaggtaagctcaatgttgtg

SEQ ID NO: 22728 - DNA, 1008 bp, Arabidopsis thaliana landsberg
aatgacagttcatttaaaaaacaaagggtacagacgcagagacaagggaaagatttactgtgacgaactgaaaaataaatatgttaatatttcattttatttgtataaattaaaatatattttgtataatactagtataccgattataattgatccgtgactgtattttttggcaatagaactcttttttattggttattttttaaaatatatattttttaaacaaaatgactaatgaaaacatgtaaaaaatttgtaattcgtaaaaaaatccctttacaaattacaaaagttttaaaatattacaaatatttcagtttgtaattatatgttcctgtcaaataatttgtcattttgttaaataaatatattatttgcatttttaatcgtttcaatatcgtttttatagttaactacttcgtaccgtagtaaactagcaacatttgtcagtcacattcaaaagagttcaacaagtataatttctttgatgaagaaaaaaacacaactataattcatccgtgaccgtcacgagtgtgagaagcttgctgctgggctgaatctgcctggttatttgtatccttattgaattcatgatcaagaacatatatatatactagaagttgtccacgcgatgcgtggattatatattcgggtttacttttgaatatagaataataaatctattaaattatatataaaatttctttataactgttaatatatcgctcaaaataattaataatagtaattttgatgtttacaaagtatgatgtgtttagaaagacatagttgattaaaagttatgcacacaatttgttttttgtgaaaacagtatgttttactattaaaaaaacttaaaatattcagtatttgtttttgtgaaaatgcaaatgcatgtattaccaattgccttggaaaaaaaaatatatgaaccttcttcataggaaaaaagtcagtttatgcgagaaaaaaaagtcatgttaaatatgagaaaggtacaaaaaagga

SEQ ID NO: 22729 - DNA, 465 bp, Arabidopsis thaliana landsberg
atcatatccatatagtacatgatacttaattaggtgtatgggcttgggcaataaacacaaatatatagcccaatatgatgttcccctctatgtggttgagagcatgtgcatgcgctgtggtgaaaatgtatctctccctctatcacacacacacacacttacatagtctctttgagtttcctgatgttggttatgttatatttatccttttttataggcagagttatactcgttgcttgttaagtaatataaagggtctaggaaacatgctagtttctctttagcctttgttccccagtttcagcttttccaattgtgtacttacacatatagctgtaatatcattaattctttctgcaatccaatggttcttgagattgttactgtagtggggatgaaacacaacttattattttagtgatggacaaggaaatttgaggtgaaatatatttatactttgtgggt

SEQ ID NO: 22730 - DNA, 584 bp, Arabidopsis thaliana landsberg
  unsure (1)..(584): unsure at all n locations
aggacacgtccctannnnnnnnnnnnnnnnnnnnnnnnnnnnnnnnnnnnnnnnnnnnnnnnnnnnnnnntggtacccgctcatctattaaggtttgtccattaaaactttgataagtaggttcaaataaaactcgattctatatccatttttaaaactcttacaccagatattttcatatttaacaaaatagatatttagaagatttggttaagatttaaaactatgaatctcctataatctttctttgattttcttaactgttttaaatcatcatagataaatttaaaaacaaatctcaagtgtttttctctacatatttgtaattcaaaatttttaaaacggatatatattactcaattgacgaataannnnnnnnnnnnnnnnnnnnnnnnnnnnnnnnnnnnnnnnnaataattcaaaatcataaataagatcaacatgaataaataaatggatcgttttgcgggatgggttgaatcacattaataaaaaattaaaaaatcattaattcgctgcttcaatacgggtttagttctaaatttactatttttaacaccaccaatattagacatatcaaatca

SEQ ID NO: 22731 - DNA, 1036 bp, Arabidopsis thaliana landsberg
tgcgaagtccgtgaaccgattcatcagcgtcgagtctggctcggaacttatccgacggcggatatggccgcacgtgctcacgacgtggcggttcttgctctgcgcgggagatccggtgtttgaatttctccgattctgcttggaggttgccggtgccggcatccactgatccggacacgatcaggcgcacggcggccgaagcagcggagatgttcaggccgccggagtttagtacaggaattacggttttaccctcagccagtgagtttgacacgtcggatgaaggagtcgctggaatgatgatgaggctcgcggaggagccgttgatgtcgccgccaagatcgtacattgatatgaatacgagtatgtacgtggacgaagaaatgtgttacgaagacttgtcactttggagttactaaaatacgtatgggttaaaaaaaaagaacgtatgtgtatgtatgcataataaatgggcttaatgatgggcttagatatgataggtccagcctatatgttaaatgtgtttttttttttggtttacctagtttcctaggtatttaccaaattgtattagtataagttttattaagaaataatctaaaatgttgttgccatttgagacaatgttatgtcacttcaagatgggcagggcgtggttccggcgaacttggagacagagtcagtgcggagtttgtggaaggatgatagtggctgggatatcagtaggatcagtccgtatgtttcagagagtcgatgtctagagctacgggcagtcgtattgaaccatgtgacaggggcgagagatagaatctcctggaatgagagtcagaatggccagttcagtgtttcgtccgcttataatatgctgagttgggatgatagtccacgccctaatatggagaaattctttaatcggatatggagagttaaggtcccagaacgtgtgagagctttctcctggttagtgggcaatcaagggattatgacagaaacagaacgttatcgaaggcatattggtgagtcggagatttgtcag

SEQ ID NO: 22732 - DNA, 502 bp, Arabidopsis thaliana landsberg
cccacgtactatgacaattaaacaagtgtgttcatgcatgctatcagttacaatttgttttgtcatcattaattagttgtaacagagaacttttaaggacctttagggcatttccatccatgagaaacccacaaagtttctcaaacaaaaaaattattaatattatattataatttaattatttgattaaaaaagtatttttgttaaaaaattgaaccaataataagatgagacttgtcatgatgggttgtagagagtatctcagagtttctcaagtgagaaactttcgacactctctctctttcattttcattatttttatttttttaattgtgagaaactcttatgagatacccatatggtcttagatattgattcctctagagtatgtgcttttctttggtattatttttattttatttttaaatatataaatactgtactttgtaaaagctctgtaaatttagttgtaatattgcttatatataggtcatgtaaaaca

SEQ ID NO: 22733 - DNA, 582 bp, Arabidopsis thaliana landsberg
  unsure (1)..(582): unsure at all n locations
tgattctttattcacactaggnnnnnnnnnnnnnnnnnnnnnnnnnnnnnnngattttttgtattgtttaatttaaatataatttttaattatctaatcattcactcatgtaataagtaattattcttagtattaaaatatattttctaacaacattctcaacaacgcattatacacaaagttcctaaacaatgttcgtcttaaaccaattaaacagagagtaatgttgggattctcgaaacctaaaaatttgatgattaaacttcttacatacttttcaccctcggcgatttattatatagatatatagcaatatgcaaagtattcaaactattaactaatgcatgactattatacactcataattagagttaagattacgaaaaaaaatcttcaagaaaactaataaaataattttattaaaaacatgtaataacaaaataaatttagtattaatacaattaaatatgtaaaattaaataataaatatatcattaatctataaattaaaaattaaagagcttacattaattattcagtggatacatgacanatgctaaagtgatgatgtatcaatcatat

SEQ ID NO: 22734 - DNA, 1316 bp, Arabidopsis thaliana landsberg
attagcatgggcttatacttccctttataagcccttatatcaacactggccatatttaccacgaaaggatatatctcgatgtaacaaacacgcgagtcaatttcaagtcagtaagatcagatcatatcaacggtctaccacgtctgggtcatgatcatattattcgttttggttgagtcatatcataaatataatgataaattgatattgtgtcttgtacgcttttacctagttttggcattgtacttattataggaaactgttcctcgctgcaaagttgtaaatattattcacggggaattattcatagattcccttcacgttttgaaaaataacaaaacttacagatcagccagtcgttgaagttgaagagcccaccacgaaatgttttatctcaaaggtaatttacgtgagtaaaatcaagaccgtaagatcagatatcaacagctctcatacatctggatcatgcagatgacaataatgatactatgaattttacccaactcttgtagtgttataattattaaaggaatctgtttctactgtaacatttttcacaaactgccatagatttaaaacaaaacaaacaaaacaaaacatcgagaatcaaagcgaaaagaacgcggaagtcgtggcgaagatgaacgaagctttgagctcagggaaagtaaaaaacggagagtttttgaaagtttacttgaaggagaagctaccagagagactgcatttttcagagagttatcggattccaccgatcataggaattgtcggagaaggtctaatggtcagacagaacagaacaaatgctcaagtttgctatggagaccatggttatgacaacaagttcttctcaatgaggactatttttgtcgttcatggttctaggtttaggagaggaaagaaagtgccatcgtttgagaatgtgcagatctatagcgtcgttgcagatattcttggactccgaccagctccgaacaatggttcttctttgttccctcggagcattctcttgcctttcagagcaacaagggggttagaatgaagccaaaaatctcttatagctcaagagagcactcagactcagaaatagtaagtagcttgataaatgcgagtgagtgactagctagtgtatgttttctataattctatgtgacattatattttcgatcgcgtacgcatataccttatcattacctaaattgttcctaaatattacaaaatatcaaatttgtatgatggatgtgtagtaactaaaaaccattcagtattcaatactcaactataaaataaagtccactgggtcatattatctataa

SEQ ID NO: 22735 - DNA, 613 bp, Arabidopsis thaliana landsberg
ctctattacacgattctcgtggaaatcatcatcatcttcatcaaccatgtcatcattatattcatctccaaggccagtatcttcagggtcttccacatcagttccagcaagagacataacaccagctccatcttccactaaatctgcatcttcatcatctccttcatcatcctccccttcatcgcccatgtcatcatctacatcatcgtcagctctattttcaacatgaaaactcatttcgatttgatcaccttcaatctcttctcgcatgaaatccatctgaataggttcaggcagtattgtctcatcgccttctatcctcatatcctgaggcatagcctgggtttgactcgaacccctttcacctgcgctttgagaggaaacttgagcctgctcctgtccattacctgctgcatctgttacttgctgtagactgctattattttgattcagctcatcagcttcagtctcagttgaatttccatgactatcatgtctctcatcagagtctctgtttttattctcgtttggtacttctgattttagctgctcggcagcatttgcagcccttgtcagtgtctcgagagacttgagaataagagtgcaagctttg

SEQ ID NO: 22736 - DNA, 473 bp, Arabidopsis thaliana landsberg
gacgaagcagcgagacatttctcgtagataatggtggctgcgattcctcaaggagcagcaatttccaacaccgactctaagaatcctccacctcgagatcggcaagacaaacctcagctcacagctaacaatggcggactacaacgaagacctagagctgctaaaaatgtcccctcacgctacttatccccttctccttcacattccacgacgacgacgacgacgaccactgctacatctacttcgacttcgtcttcttcgtctgtgatactgaggtctagtaagcgatatccttcccctttgctctctcgcacgacgaattctgcttctaatttggtttatacgccttcctcgttacctaaacggtctcaatcggtggaccgtcgtcgtccgtcggcagtttctgacacccgaacggaaatgtcggcggcgacgaagatgcttatcacttctacgaggagtttatgtgtttc

SEQ ID NO: 22737 - DNA, 528 bp, Arabidopsis thaliana landsberg
cgtttattccttttaattcaatgattcaagattgtggtcttctggaatttccataccttggagattggttatcgtgcagggattggcgagacaagaaaccaatacggtgtcggttagatagggccttagcaaattaagaatggcatgatttattttgcaattcttttattgaatatctaacaatgttagcttcagatcattcaccagtaattgcaacaatagcggataagataccacgtggcaaacaaaattttcggtttgataaaagatggattggtaaagaagggttattagaggcaatttcaaatggctggaatttagataccgggtcacgagagggatgttttgttgaaaaaattacaaattgtaggcgggctatatctaaatggcgaaaagatttatctccttacggacgaaaaacaatagaggaactaaagatggaattagatgcggcacaaagggatgatacaagagcacgagaggagattacggaattaacgttgcgattacaagaagcttaccgtgatg

SEQ ID NO: 22738 - DNA, 953 bp, Arabidopsis thaliana landsberg
ccacagttagtagttccgttatcaaaactaacagtcgttaacttgagagcaggaaatatccaacatttaaaagactaagatttttgtagacaatcgaaattaacttatgtatttttcttccaattttaaaagtacaggtattaaacggccaaattaaaaataaaccggttttttccgcttttttcccttttatttagtacgttatacatgtgaagcatggaacaacattattacaatccacgtttatatggaattcgactttcttttagccaagtttctccatctaagagcttggctacagtgaattctgtagcctgtttaggatctttcataactttaaagcctgaccactttacccttctgctagtcacagctcccggacccctattttgatattcgcggtagtggagagttgacagaccagtttctccttcccaaggagtccagccagcgggatcaactaaatcaccgatgaaagattgcagaactgcgactgttgaaaatatcctccaaggccttccaagatacgttttaacggttgtcgtgtctagatccgagcttgcagtaatgttgcatttttgaatcgtgaagcccgagtaaatgtccttaaatgcgcgtgactgagcggttatgacattgctctaccccatcttaggttgtcttgctacaatctggcagaattgaaagaccgccaccgcgttcccacaaatgaaatctacagtgccggtaataaagcactctctataaaactggcggtcactgtgaggatacaaggcatcctgatatccctcgacacgacatctataaatgacggacatatcaccactcacacggagggcaacagctggtccttttgccggcccggccgtgtttcgaaagcccatgtctactccgatgaatccattaccattaaaaaaatcaaatatatttttagaataattagtaatgtcttt

SEQ ID NO: 22739 - DNA, 306 bp, Arabidopsis thaliana landsberg
agcatgtctcgagggcagcatattttttttatcgacgttaagacaacacgctgctgaagaaatgtacaggctataaggcgctcattcagggaatgaacgaacatgctcatattcttcaatctatcttacgtcatgacattgatatgggcgccactcttcataatatgtatgctaaatgctgaactttggaggaagctcgtaacgtgttctatttaatgcaacgaagagattttggtacttggactacttggatttctggttactcgcattatgatttaccttgtgatgcgttacttatttttaatc

SEQ ID NO: 22740 - DNA, 506 bp, Arabidopsis thaliana landsberg
atagagtaaatacttgcattctgaatatttgaagctcgtatacgtcaaccacaggtgttctttaaaacaagccaaaacataccgctccttatcagactttttgataacataactgaaactgttagcaaatgcacctttgtccaccacttcctgcaatgctgccatgcttggaaattcttgtcgtaaagtcaaaccaataccgtcttcccaattctttttttaaactgactagattctacaacagttggaggctcaacatattcatcacccctatcatgagaatcatcacgtgatctaaactcatgatctagagtatcattaatctccacgattgccccatttggttatgttccttgttcctcctattcacccgtcacgatgtcagcattatctgtcatgtcatcctcatttgaatccaattcagcatagtgctgtaccaacagaacttttattgaggagctccacatctcgacagttgctcagacaattctggtgcagtgatgacg

SEQ ID NO: 22741 - DNA, 599 bp, Arabidopsis thaliana landsberg
gacttaaaatttataaataaaacactaaacaccttttttatttttttttttatcaaataatcaaaaacgagtcaatgggctttaatccctaatttcctaatttttgcttttttcactaatggctacatgcattaaaattcttagactaaaaaataggcataactatacaaatattctcattaagtatagaaataaaatactatattacattgaaaaatacaattttaaccaattcaatgtatgttaaataaattattacgttattttaaataaatcattagttattatccatactaatgatttttttaaaaaattaatacatgctagatttatttaattgaccaataacacatgtaaaatcaaattcgttaattttccttttgatgaataaaaatgattatatatgtatatatatatatatatatatatagacataaaaattcgtctatgtgacatcgctcactcttttaggttttttattttgaagagaataaacaaattaaaccctttatgatatatgaaaacatcttatccggagacttgccatatgtcatgaacctgggagtcactaactattaaaaccggctttatttaattag

SEQ ID NO: 22742 - DNA, 549 bp, Arabidopsis thaliana landsberg
agctcatgtaagatagtttcagtaatagatacctatggtgggtaaacctattatcctaaaatcaagttctagttagttactctaaaactagcattaagaacaatctaagatgaagaattctaaatatattatcttaactgggttttcgatctactaattcatccaaatctctaactaagaatccctaaaccaaccaagagaactacttagacatgattatgaaagaacaaaacatgtataaagtagaaatcaaagtaagaaacgataagagaatagagtttagaaagatcttctcaaaagggagtctccacaaggttttggctcccaaaaacaaaagagaaaaggagaatagcctctccaagcttagggtctaaacattgacctaaaaactatatatatatgtcttaaaaacgtgatgggccttgattaaaaataggagatagttctgagccgaatttggaaatcttcaaaatatcaataaatttcgtctttgaaatgccgtcaggtatttggtgtcgctcgaccatgaagacgggattcgcgatatct

SEQ ID NO: 22743 - DNA, 1708 bp, Arabidopsis thaliana landsberg
gtctatcatactacactcaaatgcttcacaattcacaaacaacacatacttttatttaactctcaaaaaaggatgagcataacctgttgtttgaaaatgaggttttccaagtctctcatcctgattaccttatcggctttggtcatttcctttgccgaagcttatgatccaagtccacttcaagacttttgtgtggccattggcgacctcaaaaatggtggttagtataaaactcgaattcttgaactctcaactaattattaatctcctttattatattgtaaattggaagttgtaataagaggtttttttgaatcaatatttctacttgcagtttttgtgaatggtaagttttgcaaggatccaaagcaagcaaaggcagaagatttcttttactcaggcctcaaccaagcaggaaccactaataataaagtcaaatccaacgtgacaacagtcaatgtcgatcagattccagggttaaacactttgggaatatccttggtccgcatagactatgcgccatatggtcaaaacccgcctcacacacaccctcgtgccactgagatccttgttcttgttgagggaacattatatgttggttttgtctcttccaatcaagacaacaaccgtttattcgctaaagggctgaacccgggcgacgtgttcgggttccccataggaatgatccattttcaagtgaatatcgggaagacccctgcagtggcctttgctggactaagtagtcaaaatgctggtgtcatcacgatcgcagatactgtgtttgggtcaacgcctccgattaatccagatattttggctcaggcgtttcagttagacgtcaatgttgttaaagaccttgaggccaagtttaaaaactaaatctagtcaccacaatattgagtgtttatcgttgtagtatctaagtaatatgtaacacggataaaaggtttatgcttaatacaataaaaaggtgttatcacctaatttgatatttaataataagtttactttttctatatagaattctgtcttaccactttttaaaatgtcggggtattaacattttcttggatattccgtcaagtctttaagggttgttaaaatgaacaaaaaaaaaaagacaaaccatcaaagaaaatatatatttaaggttctattaaaaaaatatatatatatatatatttaagacatttgtcaaaaataccacttttagttttggttttccaaaaataccacttaagtcttgattttccaataataccacaaaactaaaatttaacttttaaatttcaaaactaaaccctaaacgctaactctaacactctaaaaactatatcttaaatctaaaatagttaattcaaactttaatttttgtgtttgtgatatgtttggaaaacgaaaactttcggtggtattctaaaaccctaaacgctaactctgacactctaaaaactatatcatgaatctaaaatagttaattcaaacttaaatttttatgtttgtgatatttttggaaaactaaaactttccgtagtattcttaaatcaataaactaagagtaatagtttttgaaacaaaatttgaaaatatggtctttttaagaatttctcttttttcttataagttataaagataaatcatgtgactgatacaaaattgatatacataaatcaaattatcattttgatagaagcatgagttttataaa

SEQ ID NO: 22744 - DNA, 607 bp, Arabidopsis thaliana landsberg
  unsure (1)..(607): unsure at all n locations
gtttagcctcttttatttaattgttgcttttgctaacagttttgagttttatataaaagagaatctcttttatttttggtggtgttgatttgactaatttcatccatatggagaggttcatcttcggtgttccaaaaccgattcgtgacaactcttacactttataacgtcagcttatactggttactggtgactggttagttttagggtttattggcaaattagacatttttttaaaagttgtttgagaagtatgtagttttttagatattagagaaataggtacagtttttgcttttgtgagatagaaaatatgtgagatagaagatagatgactaatatttaattatgtgtgagatagaaaatatttaattagttcacaagaaacaacatcttttatccgaaagtcaataaatagcatattatgcttaattgtgaattaacttcttgagttatttatctttttaatttattattattattagcaattcattggatttgccatttagtatttacattttattacgtttttagttctgcattttttggagaaaatatatacttatttatttttgaaaaanaaaatgtgaatgttagaaaaagcgtc

SEQ ID NO: 22745 - DNA, 1094 bp, Arabidopsis thaliana landsberg
ctggtaaaataagggatgaaggacgcgttactaagggttctttcgatttagcaaataaggaaaataaacagtaaggtgtggctagtgtgtgatttggtttgagaaaccacaacggccttgggtttagggttagcatctcggggctcagactcttcatgtcgaggatttgcactttggccagtcttttcaaccccaaatctagaggagggggatgtaatgactggaggagggggacccatcgagcgaggtgggggagatgatcgaggagaacgatcagttcaggccctcgtcttatctctcttagtagaagaactgctacgggttggtctttctcttttcttgcgaagtaaatccgcgatcggttcgctgctcaacctattccaaaaggaaggccgaggtgagtcatgacgagttgattggtctcttcgaggtgaccagccaccatgaccttcacgatgaggagtaagtatgaaagctccagcagatctggccccttcgccactgccatcatcaaccaactgagtcctgctgtattctttcttatcaatgacagacgtgaggaataatttgtttgcttcgcaagcctcggccatcggcttggccaacgttttgcgccgggaagcaatagcccgggccaaagtcccatgaggtatgggaggaggaggtggaagatgatggagttgtccaggaggactcattctgaggttccggttagcttccataaaccaatcgagggtaaacgagttccaaagggtttcgccttcgataaccactttgaagaatgcaaagaattcttcagtcggaagggtcggagcaattcgagttaggaaaaaatgagtaaatgaacagtgggtaaatatgcttatgccctaatttctaccaggtttcgtggtccactttgatggaagcacttcgaaaaggctctcaatcgaagcaagggtcttctttatttagatccagggatagtgccagttatcatctttgttcgggagatgggagatgaggttcctgttggtatttgggtatgcttagttattaccgattttcttcgatgaacttcttacactaagaagctcagggatcctctagagtcg

SEQ ID NO: 22746 - DNA, 474 bp, Arabidopsis thaliana landsberg
ctacccccagacataccacctccggacatacttccttcacttccagacacacctccttcacttcctgacatgcctcctccacttccggacatgcctcttttctttccgaatttacctccaagacctccgtgtttacctcctccaattttgtgtttacttccactgcccccagacataccacctccggatatacctccttcacttccagacatacctccttcacttcctgacatgcctccggacatacattttttctttcccaatttagctttgagtttactttttctacttttggatttacctcctccacctccggacatacctccttcacttccagacataccttcttcacttcctgacatgcctccggacataccttttttcttcccaatttagctttgagtttactttttttacttttggatttacttcctccacactggacatacctccttcacttccagacataccttc

SEQ ID NO: 22747 - DNA, 1102 bp, Arabidopsis thaliana landsberg
acatcctcgtatcatttcaggtcacttgaatgcaagaagcgatgtgtacagtttcggagttttgcttctagagattttatctggtaagcgagcgttggatcataacagaccggctaaagaagaaaaccttgtggattgggctcgaccgtacctcacaagcaaacgtaaggttctcctaatcgtggacaatcggctagacacacagtacctacctgaagaagccgtgagaatggcaagcgtggcggtgcagtgtctctcatttgaacccaagtcgcgcccgaccatggaccaagtggtccgtgccttacaacaacttcaggacaacttgggaaaaccgagtcagaccaatccggttaaggataccaagaaacttggttttaaaactggtactactaagtcatccgaaaaacggtttacacaaaaaccttttggcaggcaccttgtgtaggtcaagttggtaactgaattccaggatggacatttttccggcggtttacttgaaactgccgatatccgttttcgacggattgaatgcggttctggacaaaccgtgcaggtcaagactaataaaggatacattaaattttccggttacatgtcccatacccaaccttagagaacatgtgtagcctttagcttaggcttccttgtgtgctgttatattgagtatatatgaggtaatttttgcctcttgtgttgtaacacttgtatttttgttcctttaacatttgatgtagagatttttcctatatcttcagttttgaaacccaaatttattgcaagtcaaaatatgaaaattctaatcaatgtgcaatgactaacacaaatccggattgtgctttgttggctgcagacctgcagttaacacaaatcttataaatttgaaatgtcgttcaaactccaaaccacaaaaaggggaagcaaaacgcagccgtttcacgatttttgtctagtttggtccaatttctcaattacggttttgtgaaatgcgtgtcggtctttggttctgcattcgaactgtgtggcgttttgtgtaacttatccacttagtgacaaaactactcgactcgtagtagttgcagagaggttttagcagcagaag

SEQ ID NO: 22748 - DNA, 963 bp, Arabidopsis thaliana landsberg
  unsure (1)..(963): unsure at all n locations
cccccaccgaagttttttctctgaatgtgtgttaatcatattgatattatgataaaaatcatattgtacggtagtcaaaaactcatgattgatttttcgaaatattttttagttagttcaaattttacggtttccttgtttaatatttataatcttaaatcataagcatagcttttgcttccttttttttgtttaccagaggattataaacttgtggattttgtatgaatttactcataaagaaatggacatattcgaccctcgagatggctcaaatagccacgtgcgataaacacatggactcaccgttttcctataaactggcgtacctcaaagcttaagctaagcctacactagttagatcacattttgtcttttggcaaaagagagatagaaaatgggatcccgttttgtttgtaacgaacaaaaaccacacgcagtttgcgtgccttacccagctcaaggccacattaaccctatgatgaaagtggctaaactcctccacatcaaaggcttccacgtcaccttcgtcaacaccgtctacaaccacaaccgtctactccgatcccgtggggccaacgcactcgatggactttcttccttccagttcgagtcaatacctgacggtcttccggagactggcgtggacgccacgcaggacatccctgccctttccgagtccacaacgaaaaactgtctcgttccgttcaagaagcttctccagcggattgtcatgagagaggatgtccctccggtgagctgtattgtatcagatggttcgatgagctttactcttgacgttgcggaagagcttggtgttccggagattcatttttggaccactagtgcttgtggcttcatggcttatctacactttnnnnnnnnnnnnnnnnnnnntatatgtccagtaaaaggtacgttttcttgcatttattattgaattaatcgacgttataaaataaa

SEQ ID NO: 22749 - DNA, 509 bp, Arabidopsis thaliana landsberg
  unsure (1)..(509): unsure at all n locations
taaagaatattttacatagaataatatggagaggattcggaagaaagtgagaaagataataagaaagatgaagatgaagactataacgaagaagcgaacgatgaaagtaatgataacaacggccaaaaaaattgataattatgatgacaagaaggaatatgaaaagtaataaacaatgaagcgtgaagagaaatacgaagacataggtgttgacagccaattgaataagaaaacataaaattgatgtatgattctttttgattatattttattgtttaacactattgattttttataatttttaagatggtgtatttagattaagaattttacaaattataatcaatcgtatgtatatttttacaaaaatatatcaaaaatatctatgtgtagcgtgaatttaaaacctaatctaagtactatatattattaaacttaaagaacagattaaaaacgaagttcaaatcagagatctaccaactaaacaaanaaaagtaaataanacgtgt

SEQ ID NO: 22750 - DNA, 590 bp, Arabidopsis thaliana landsberg
catatctctaagaattgtccaaaactcaagatatttgtccataggtttagaatatagtaaacgttggaaataaattactgatttccacttttcaatcggatgaggatgtgttttttaccttttacatccatctttgattcatctcttaaagccatgttttctctcattgattcatcaagttcagcgaacataattttcctcccacacatgtgtcgctttcacctatgtgacaaatcattattggttgtgtacttgtgttgttatatgaatagaagatgaatggtgttacaatcattgcccattatgtggtgcgagaaacaaaacatccaacctttgctattttcctatgccctaaggttttttcacatgttacttagctattatgtgtttcaaactcacttggaatggatattctatattcttacttttacgaattttgattctttattatgtagaaaacctacagaaaatcacgttgtaaatttcgtttcaaaccataaaggacttcatattcaactattcttaacaagtgaactttatcattatatcacttaatcttatctctatatacttgattcatatagagaacg

SEQ ID NO: 22751 - DNA, 869 bp, Arabidopsis thaliana landsberg
aaaaggccaaccgaacataactatctcccgcggtgtacacggtgttttgaatcttagtttatactggctaagaatgatcgggtttttggctcctgtacgaatatcttggctgaaatatttgtcttacgtaaatcatagaatgattggctaaatgagggtaaatagtgaaataaatctttttttttttggtgcacaaacttaattatattgctcaaatgatgttctggtcatacaaacttagacatagttttgcaacagaatcaaccacaacattagatgaccgaggaataaattggcatattaaagtagaaaaataatcgatacttaatagaatgtcttccaaaataccgtgaacttccaaaagaactgaacaagagttgatggctccgatcaaatgttgacagtcagactcgagtagaagatgatccactcctaagctgactacatctagaattgcagttctacaggctaaactttcagccatgagagttgatgaaacgttctcaaaaatctcagaacacgttgaggtccctcctgatcccggttccttaaaactctagccaagtaccgccaagtcccgccactttgatgtcctctcgccaagccgcatccgttctacacaatacacctcgccataaattatataaaattatataattttttatttcaaatttagttgaggtatagtaaaacgttttcgttacggttatatcccgtctatgcccaaaatttattgtttggaaaatcggtttcatatttatgataccatatgcagtctatgcctaaaatttattccagacggagtttatgtatgattccatttttcgataaaaattaagtattttgtgttatatatgatttttttatta

SEQ ID NO: 22752 - DNA, 807 bp, Arabidopsis thaliana landsberg
catggtcaaccacggaccagccgctctcaccattaagaccaaggaatctcttccctcatatctctttcattcgcatgttaagtgtaaacggctatgttccctttgtgtgtccttaaatacagtgtaaacacacaaaggtaactaaccaattttagtaatatgttttggttattcccatcacaaagctctcttgttcttcatgattctcttactctttccaaactataattccgcatattctttcattaaatactacaattgatctcttatttgagatagaagttttaaaataatttgaaccatatcacatcaccctaaaccagtcacgttttatctacataatatctaatttaactaaccaattcatgttcaattcaatcacaacattttaaaatatcatgatattatttacaaacaaatataggctaattgtctatcaaattaatatggtagataatgaatggtgttctcaattaatattagttgagaaattggtgtaggagagagcccctacactagtcaccactaaattatgatgatgaaacctaccacatctatgctatcttaagatgtagaggaacaagcacgagagagcccctccacttgtctccaggctccatgaaagccaagggatctacttcacggtcgggccctccaaactctcccttaccctctaggcctctactattgtgaccctcccagccaacggttccaatcatactatttgctaagctacttcagatgtagatatgaaaaatgttggttactccaaaccgtcgatgtatgatagctcaaagtttaaacttg

SEQ ID NO: 22753 - DNA, 586 bp, Arabidopsis thaliana landsberg
gtagtgaatatgcttatgtttgcaaaagaggtttaactttgtcttaatttttgacagattttagctggtctggttgatcaatacaagttggctgggaacagtcaagctttaaagatggcaaccgggatggctgattatttctatggccgtgttcgtaatgtgataaggaagtacagtgttgaacgacattggcaatcactaaacgaagagactggtggcatgaatgatgttctttatcagctatacagcatcactgtgggttaaaatctaatcagactcaaaaaggcaaccttagatttctatgtagctctgtgtcattttttagtttattggactctgcagggagattccaagtatttgctgctcgcacatctctttgacaagccttgctttctcggagtcctcgcaattcaggtagtttacttgatgattagcttgaagccttgaagaaatgtgaatgggaaggtcacataacttgacatgtttgtttgcaggccgatgatattagtggattccacgctaatacacatatttccatcgtcgttggatcccaacaacggaatgaaatcactggtgatctactcca

SEQ ID NO: 22754 - DNA, 1548 bp, Arabidopsis thaliana landsberg
ttcttgaccataatgaatcaacaagcattgtgataggagaaacaaacctgtcatgccagtggttaacaatccaaggtactttgtaacagggaaaaggtgagatacactagactgatccaaaagcttgtcctgcccacaaatcattcatcagatccctaattcaaaaccctcacttgaacaaaaaccctaaggagtcaaaagaggactcaccggaactttcttctgcgtaacgacgcatactgaatctttccctcggacaccgatcgatgtgattccagctgctttcacggctttgaaagcatactctacaaaatccgtaaccagtagtatcaatctccgaaggtaaagaaagaaaaaaaaacgatagagaaatagattactgaccgacttggaagagacgaccttccggtgagaaaatagtaatgtgacgatcataaccagcgccgcttcctctactcatcttcttcttcttctcagagaagagaagaactttcttctgaaatcggagttggaatttttgcttctgtgtgatctgtagagaaagatgtattatagaagaaagctttctttgtcttcaagacagaaccaaataaaaaacagtcaatttcctaaaataccctttaaagaataagtttagagtacatttatctttttttttaattaagcaaaccgaaacaaaacaagcaaaagaggaacatgcaaacagcctcaactagtcctacacgttcggttatccattcactttcggttatatccattcgattatcgggtttttcggttttaaagtttagtatccattcgtttattttgaaagttcggttcggtttctgttttttcggttctaaagtttagtatccattcgattattttgaaagttcggttcggtttctgtttttttggttttaaaatttagtgtccattcagatattttgctttaaatatttcagttatttttgaatattttcggatattttttagttattttcgagtatgtttgctattttatatatattctctagtattttttagttatttagtatagaaataactaatacttttgaaaatatatttatattttggatatttttggttacctaaaatatttccgtttgtatctattcggttttggtaatagaatttagggggtgtattgaaagtggaattttaagagatttgtgtagagtttataatcattatgttattcaaacatggattttaaaaagtctcatgaaatttagtattattgaattaacgataatcaatttgaatgaaaagaacaacaaaacaccactaaaaatcattcagattcatatatggaatcatttcaaagttcattatcttcactacaatctaatctatcattaaattcctcgaatttgtccgaatatgcattttccttagatgcatcaatgatgtcttttgtttctctattacatggatcaatgtctataacattttctattataactataggtattgacctcctccttcatctcgggttgagaattatactcaaacttcgccaacgctttctcatgcatcccacgc

SEQ ID NO: 22755 - DNA, 625 bp, Arabidopsis thaliana landsberg
  unsure (1)..(625): unsure at all n locations
gaatgtaaaaaaacaaattgaataaaggaatcatttttgttatcaattaaaagaatattaaattgatanttttttaggagataaatcattagaatcaaacccaatacatatgactataagagtttctttttattttttgaaaaagagtttcattaaaacaataatatgcaaaaaatttgattaaataactttttagtctaaattttgcatagtaattttttaaattcaaaattgaaattttataaaatatttaatcaaataagaagttaatatttttaattgataatataaaaccaattacctattaattaaaaaatatttatcaattaaataattaaattctaaaaacactaacaattaatattatgaatagttcatatcttaaaaaaattactcttaatttagatttgaaattgaaaaaaactaactattatcagattcatgcattaaatatatatatatacaaaatatatttatattagatatagaatgtgtttttgattatataataccaaataaaattatctattttttaatattaaaaataaactaaaaattatttctgaatattttcgctggccaatgtcggttaactagaactagttgactggtgaacttgagattc

SEQ ID NO: 22756 - DNA, 177 bp, Arabidopsis thaliana landsberg
gttcccgaggctctttacaattccttgccagtgggcgatcaatgcttgctgtgctgcggcgtcgccaacaaaatgagatgcccctttacctaaacttgctcttgaggttcttggtgcctattacaggtgaactacctaatgaaggttcatattcagttaagaattgtgcagtttgcc

SEQ ID NO: 22757 - DNA, 1502 bp, Arabidopsis thaliana landsberg
ataagaagaccagatgttcccaagtctccataggatcttggcaaaagatgcaacttgaatcagcttgtctattccacttgagcatccgagctccggttgttactctattttttgcgactaaccaagtgatgaaggagtattttggagtcaagtaggggaaccagattcctttgtaatcctccatcaatgccctagtgttaggtatttgcatccacgtttctttggaattaaaaacgtttcggtgatggtcatttctccctttccatagccagatatcagtctcatcattttgctgtgcaggtttctggcttttgatagcgttttcaaccgtatttaagaggtcctgcctatgtttctttcttcgattcatggacattacctcccccacagttgcagtaactcagattcccaagtcaatacatcctcttatcccaagtttttcatatagacagcctatattactccattcatcaaaccaaaatgaggtggtttctccatttttgacctctactctatagaactgttgtgctatccctctatattccatatccaagaaccgcaagttgtagtgtcttttactgccgagaaggagccttttcttatgaaatatttctttacccattcaacccacaaagaccctttagccgacagtatacgccatatcaactttaatacacttactttgtttgcttcttcaatcgaccgcagccctagtccaccttcattctttggtgtgcagacctcagtccatgccacttttacctttcaagggttcatcgatggtcttgaccacagagaacttgaacacagtttatctatttcttgaaagcatgctttgggcagccggaaaccagctatccaaaaatttgtaataccgaagatcacctaaaatttcttcacatgttgattttcaaatttgcaaaactctatacaattgtttctagcagacaagataaatgtaattttccacgttctatgacttttcagtacctcattgattcacttcaacaaactactgtcattagtcgataacgtcaccatgtgaaattaatttgctcgtgcaacataacatatgttgttgaacaagtatatttattcatccatgatcctcgtccccaagaaagtcatgctatggcactcgtaaatgcatttatcgttacgttcgatgtattttaatcttctcgatgtatttcgaattctacttccatgacatctatgctcgcaataagtcgcaatctaacaagcagcgaaagttgccgaagcagcccaaacaaacacatccttaacatattgatgatgattctccatttagtgttcacggagggaaaacataacggaagcatgattagcattctatgattaacatgtcttattagagcaattttaatttttaatttagattcccggttcattgggttagatccaattctatcccgttttcatgtgagactggattacaattgcaattaacgtaccggatgttatgggccataatgggtcta

SEQ ID NO: 22758 - DNA, 601 bp, Arabidopsis thaliana landsberg
  unsure (1)..(601): unsure at all n locations
ctccggtgaactcacttccacttttgagctcatggcttcgttcaacaaccacgtcgaagcaccttcggctatgaagctggtgctctcgataacaggcggctcaagttcagagtcggctaacaagaaatagaagaaggaagcacagagaagggtacatcatgttggagtacagggacccttcattaagtcaaaatggtctcacatcccaatcaccttctcccaggaggaccttcagctcaaagattaccctcacaatgatgatatggtcatatcttgtgttatcaagggatttctggtccataatgttctggttgatacaggcagtgcaacagatatcatatttgctaaggccttcagacagatgcaagagccagaagacaagattcatgatgctacacaccctctttatggcttcggaggaaggcaaattgtagcgctcggcaaaatcactatgctagtgaccttcggctttgtccataatacaannnnnnnnnnnnnnnnnnnnnnnnnnnnnnnnnnnnnnnnnnnnnnnnnnnnnnnnnnnnnnnnnnnnnnnnnnnnnntttcgaagaaatcttcaccagcatactatgcatgaaga

SEQ ID NO: 22759 - DNA, 589 bp, Arabidopsis thaliana landsberg
aaacaaaattctagttatacataccattaaaaattaaaaaataacattagtaaactttcttgcgtttcaccatcgataacacaaatttctattgcaattctctaaccataattttttgtataacaatacttgacatcattataacctaagataattttccatctaagatatttctaatctacttttcagtttaaaactccagaatttgacttatagttcacaatattagctattatgtcataaacaacataattaacaatcgacaattttctttatataaactacaatatatatgattaaaacattaaaaaaaaactatattgaatgtaaattttattcaacacatttcttacaatataaaattccgcacgaacgtgtgggttagaatctagttctcaattaaattcaatataaaaatttaaggtttgttacaacagcaatcttatagtaaatatgattggtaaaacaaagtaatcttttttttagtaagaatagagaataataaacattattgaaatagtttaaaatcattaaaaatgataaataatggtaaacaaaaattctgagtattatttttggtatcgaatat

SEQ ID NO: 22760 - DNA, 695 bp, Arabidopsis thaliana landsberg
ggcagtgcaggtcagcagttctaatcttatctttgtatatgtttatagaaattcttgtttcattgtaagattattgtctctctgcttatttgctttctttggcgtgatacaggaacctgagtcgacttgtaagtcatttaacttgttagatcccacatcatccaatgttgttggctccattttcctttcttgcgctattgaggtaccatgtcgactagagaaaactctgtgaaaatagaagagcattggtgtctgatctttggttacttaatatttgtaggatcctgttgaaactgagaggcggtttgcaaagcgtatcttgtccatagtggtatgctttaccttaatgttccactcttatgtattctgttctctgtatgacacacttcaatgtttcttgctattcttgaacaaacaaacaatttgatagttaagagttctttgacaatgtgcaggactacaatgaagatggacaactctcgttttcggagttctctgatctaataaaggcttttggaaacttagtggctgcgaacaaggttcggctttaagcatctatgtcattagtggatgcatgagtttttctctcattttcaatcagtgtcagaatgatgttactcacttatttaccagaaagaggagttgtttaaagctgctgacctgaatggggacggtgttgtgacgattgacgagta

SEQ ID NO: 22761 - DNA, 432 bp, Arabidopsis thaliana landsberg
caaccgtgtgggtcgacgacctccacaggcgggtagcgagcacggtagggaggctggatgccggcgcccttacccagcccgtgatgcgtcccgagcgtgggtacgtgtccctggtgagtgtccgctccttctcctatcttgcgccgggttgcctttgattcttaccgtcgggatttccgttcgtctctaggggttggggttttacaagccctccctaccaccggtcccggaggacgcggtggaccgagccgcgcggagggtcgccacggagaagaagaaggagaagaaggacaccgaaaaggcccgggcccgcgagcggatgcgggctcgggaagccttggagaggcgccggcggaagtaggaaagggactggctcccgagggaagccgtcgccgaaacgcctgacgatgttgatgatgacgaagacaatga

SEQ ID NO: 22762 - DNA, 1792 bp, Arabidopsis thaliana landsberg
ctataacagtttaatggcctaaattttcctttacatgatgggttagtcctaagcccatgaaacatctcctgagctataagaatattatctgagattaggcgtccttccacaaaagcagattgtgtttccaaaataaggtttggcaaaaccgtttttaatctttgacaaaggatttttgaaataactttataaccaacattacaaagactaataagccgtaattcggtcatcagagtcggtcgctccgtttttggaataagacatatatttgtcgtattcaaccgtttatcaaacactccgtctttgagaaatgagtttaccaaaaacatcggatcctctttaatggtaccccatgctttttgaaaaaacaaagctgtcataccgtctgggccaggtgctttgccagatgcatcataaatagagtcgttctaacctcaatctctgtcgcgggttttgttagaaatacatttatctgatctgttattgaaatttgaatttctgccaaagaatcctccaccacttgaggatttgttggtgtgaacaaattctcaaaatacgacaccgctatcttttgtatatctttatcctctgtagaccattttccattttcatcatgaagtcccgtgatccgattcctagcccgtctctgttttgttagagcatggaaatattttgagttattatccccaaccttcatccataaactcctacttttctagtaccaatattgttcttcatctatataggcctctttcaaccgtattgttaaatccgttatctcctcacttgttctcgaatcatctttctgtgccgcatctaactcagatttcaattcctcgattgtttttctcccgtaaggaggtaagtctttccgccatttggaaatagcccgtctacaactaattattttttcaataatattaccctctcctgaaccattatcaaggttccaaccattggaaatagcctctagtaaaccttctttaccaatccatctcttatcaaaccgaaagttgtgcttcccacgtggtatcttatccacaatagtagctatcactgatgtatgatctgaagctaacatcggtaaatattcaatgaacaagttgcagaataattcatgccaatcttcattagctaaagctctatccaaccgacaccttattggttttttatccctccatccccgctaagataaccaatccccgagatgaggaaattccaagagtccacaatcttctatcattaacttaaaaggtataaacgaagatgcatgtcttaatttatccctctcttttttcatgattttcggttaattcattaaaatcgcctatcaaaaacccaaggggtatcccgagttgtaccaatccgtgttaaccgttcccagacttgatctctattttttggtactggatctccatatacaaaggtaagattaattattttacttttataaatggcttcaatatcaattaaccggttactttgataaatgattgaaacgttaaaatcattgttataaaaaagagctaacccgccgctaaaaccaatagggtccaccgtttttaagtttttataaccaaaatgaccaacaaatttttccatatactctgtggattgttttgtttccgagagaaataaaaaatctggtcgatgttttttccataaatcccttaaataaccaatggatgccttattccccaaacctttgacaattccaacttaaaatcttcataaattactctattttttctttgagaaactcctccacgtcccaactctgttttaaagaggg

SEQ ID NO: 22763 - DNA, 1142 bp, Arabidopsis thaliana landsberg
tgcagcggaatttctttattacaaaaagttacaagttacaacaaatttacattatatttatcggagtgattacaaaagtgattcaaagaaatatactttgaaatgtaataaattatttataagtttgaaatatatgctagctcaatgacaatcctaaataagatgtatagaagagctacattaacctataagaaggccgagcccaccggcacttagcaccatcaatagcagcacaaatctagtacctgcaacaacatgggtacgaaaaccctaagtacgaagtgtacttttgcaagtcttacccgtctaaggaaaaagactctcaaggatatgctggcttttgggaatcaaggtaaagcatatcaagattcaaagactctttttgtagaaaagcttactatgagtggatccttaagaattcattttacttgtcaggttgagtagttacctgcatctagagtttgttctgttttagagcaaccatgtgacacccctggtgttactagaactaaaacttgagcgtaacatcatgagcattagcattttcatatgcttgacacacctagagtgcattcactaggcaaaaatttcaaacaagttgtattgtttcaagtgtttttgcaaatagcaccctggtttaggaacttaaccctaaatagtggttaaaggggtaaaacttcacttaagttgagaaaacctaaaagctttagggtaaaagtcataaaatgaccccaagaataaagctgaatcacatttatacccctggaatatcagaaaccctaattagaaccctagaaaaccctggaaccaaaccctaggggcttatgtgcaaaattagcccacttttgggctaaagtgcaaaaaaaaccaagccaaataagtatttgaagtcaattggttcacaactatgtggacttgaaagcaaaaccctaagttttggacttaaatgcaaaatggacctcatttgagttctattctaagtctgaaaatcagagaataggctcaactttggggctttgtaactttcaaagtatagggtttttgcctaggtcacacatcaaagttgaagacaattataggtgaatactttgctaagagtgtgactcagttgttaagaaaatttagagataatgaccctgagt

SEQ ID NO: 22764 - DNA, 464 bp, Arabidopsis thaliana landsberg
  unsure (1)..(464): unsure at all n locations
cgctcccttaggannnnnnnnnnnnnnnnnnnnnnnnnnnnnnnnnnnnntgttagaacaattttttgataatacaaaggtccttcatgccaccataaattcgtatgcttcggcaactcaagcctatggaaagggcatatttttattatggtaaaaagacgaaagtgttacaaggaattgaaaaacgataaaagacacttaaacttctcataattgttgcttattaaaaaggtaatactgaatgaaaaaatgcgaaaaaattgctgttgaggtaggatatttatcaataaatgtgctttgactctggcacagtgctattgactgtgcgagcttcagactcctctctgaagtctctctgaaggtgattgttttgactcccttctggctgctgtcctcgctgcgtcggcggtggtggtggagggtgctgccaagatgcttggggttggcttgctgaagcaacagaa

SEQ ID NO: 22765 - DNA, 1086 bp, Arabidopsis thaliana landsberg
ttgcggcggcattccggataacaccgttaccggtaccgcaacttccggcgaatttgctttagacgttgtgtctatccagtccactaacggatccaatccgggcagggtcgttaaaatcccaaatttgatcttcgattgtggagcaacgtttcttcttaaaggactcgctaaaggaaccgttggtatggcgggaatgggacgtcacaacatcggtttaccgtcgcaattcgccgccgcgtttagcttccaccgtaaattcgccgtctgtctaacttccggtaaaggcgtcgccttcttcggcaacggaccttacgttttccttcccggaatccagatctcaagtctccaaacgacgccccttctcatcaatccggtcagcactgcttctgcgttttcacaaggtgagaaatcctcagagtactttatcggcgtgacggcgattcaaatcgtcgagaaaacagttccgatcaatccaacgctattgaagattaacgcaagtaccggtatcggaggaaccaaaatcagctccgtcaatccttacacggtgttggagtcatcgatctacaatgcttttacgtcggagttcgataaacaagcagcggcgaggagcatcaagagagtagcgtcgtgaaaccgttcggcgcgtgtttcagcacgaagaacgtcggcgtgacgcgcctaggatacgccgtgccggagattgagcttgtgcttcatagcaaagacgtcgtttggaggatatttggagccaactcgatggtgagtgtcagtgatgacgtcatctgtttgggtttcgttgacggaggagtcaacgcaagaacctctgttgtgattggagggtttcagttggaggataatttgatcgaatttgatttggcgagtaacaaatttgggtttagttccacgttattgggccgtcaaactaactgcgccaacttcaatttcacttccactgcttgattaaattagttgatccgttttctttttttaaaactgttttttagtggttattatattatgtttgatgtgattaataaagagccaatggaatcattatttggcatttgttatcaactgatttgaata

SEQ ID NO: 22766 - DNA, 1170 bp, Arabidopsis thaliana landsberg
gcacatggcggagcttggagtgaaaccgaatgttgcgattgtgtctatggttggaaaagtgtttgtgaaactagagatgaaggataagtacgagaaactgatgaagaaatatcctccaccacagtgggagtttagatacatcaaaggaagacgtgttaaggtcaaggcaaagcagctgaatgagctaagcgaaggtgaaggtggtttaagcagcgacgaagataagattgacaatgagattgagagtgaagaagaagatggtgaggatctcagtgaagaggaagaagatgaaaaagaacttttgggtggaagtcaaggacagattacttctagagaacccagtcttgatcatttggactcttcatgagcttttgagatcgtatctaccgttgaatcatctataaggaaaatagatagacggccaaggttcttcaaagaagctttctggggctgagcttgggtttctgacgaaaacatgaccagaaaagttttgaactatctgagcttaagagtcaaaacaaggtatagatttgaagagtcaactaaaaagagtattaaactcagcaaaaagattaaatactgtaaaatcttttagtacgactgtgtaagctctgaaaacaaaaattattgtataagttcagacaataatttcagatcaacgttaactactttttgttcttttactcttcatctgatcctgactcttcagaactcgattccttgtttactttcttctttgaccctctcttcttatcttcctcgtcctcactgtattcgctttcgtaatcctcctcttcaatctcatcatcctcttcctctaatccttcttctgcattctcaccctccacatcacgggttcttttcaaaacctcgactttcagtgatgtcttttggtcacaaccgatccaagtatcgcttaggcagaagcaagtcaagttataagtaccttctccaggtgctaagagtctccccattaccaatcttgacccacttttaaccttctcaacagcttctttaactgcatcatttgtttccttgacgcttgctcctaaaggttccattgtttcagtaatagtgtttgatgcagcggctatagcttcagcttcatccatgaatttaaccttctgaaagaaccagacatggttgaatccgcaagaagaaccccaagtt

SEQ ID NO: 22767 - DNA, 510 bp, Arabidopsis thaliana landsberg
ttcttttggctatatgataaggttttttagttctttacgataaatgggtaacattaataattagatacatgttggtttaaggaatggtcttttcagatgttatatatactaaaaaattcaatagacgacattctctccaatatacatctatgcaaatgcaaagagagaaacctaaaaatattgatctaaaatattatctaatgcttgcttggccttttctctgtcatgtgaaatctcttaaagcaaatgagtatagatagttatacatttgttattcaaatcacgtcaatccaatattaaactatgagcctatgattggaatactagattaggaaagaatacatagattgaattctttgcttagaagccatttagataactttcaaaccaaatcagtaaacataattgcataccattgtatcatgtatagataatgtaagtctttcatgattatgaagaatgattagaatatacttgatatttgaatcaaaagtgatctaactctgcaca

SEQ ID NO: 22768 - DNA, 1294 bp, Arabidopsis thaliana landsberg
tgtcatgattctaacgcaatggttacatgaaaatggaaattttttaaagggttttgagtcttgcgatgatttggggatttttttgtgttgttgcaactttgcagatacttcttcttgtagcaaaggaatttcttgaatctgttgagaaaattataacatctcaacgtccttcttggcgagctgatgtagctagtgtggatactaaccgcagttctgtgcttctcatggatgatttgacgcttttcgcccacggtaaatctatttcgtgtaataaaactattgatcaggcttttcctttcattgttctcacttgcaagtaaagtttgatgtgagcttgtgagttgtctcttggttaaagtaaattcaatgatggatttaagcattgcttttggtttatatacatgttgtcgtgttaatgatgatgatctcctctgctttcaggtcatgttgaggataaaccatgcttaagtgttgaaaaaaggtgttcgtcattatcttgtgcttacttacttttatgctagccattgaatgctcttagtggctaatatatgtttgctctgatgaagtagcccaaatgtggattccttccatcttcaagtttcatagcagaagaaaactttattattaagagtataactcggttcgaaatgcaccgggttcttaagcttacggaaaacgaggtaccttttctcctacatctgtcaaagtaacaattaatccaatctttgaacctaacactttaaagctatgtattttgcagatctcagaaatcagtgaatatgatcctttagaccttttctctggatccaaagaaagaatactcgaagctataaaagcgctctacacgactcctcagaacaattttcgtgtgtttttgaatggttctctagtatttggaggcttaggtggtggcatatgcaaaacaacctcaaaggttgaactagcttttgagcatatactcaaagatatcatcaagaccgatgatggtttacgtgcagatcgtttcatagagcttgtagcagaaactgtttacacatccggagttctagatcagcttctagacgtacaaaagctcgatagatataacatcgagggagcgattcacgtgtactatgacttcattgaccagccatgtaaagtgtgcagagagttgaatcaatttagctccatgcactcaattccaatggacgaaaaagtgaatattttgaaggaatttctaatatctgccactgcaaaggattgtagtgtaatgataagttttagatctacggaagctgggctctcaaaatcctct

SEQ ID NO: 22769 - DNA, 1048 bp, Arabidopsis thaliana landsberg
  unsure (1)..(1048): unsure at all n locations
gaaatagctctcgtcgcgatcgagtgtaacactgaaaaaaattccaatatgcaatgcacatgcattctaatgcaaaacctttctaagtatgaaaaacacattaaaatgactactaatgagatgaaatgtgggtgaaacaatgtcaaagcgatgaagaatgaatgcctaaagcatgcaaattatacgcatagagtaaaacctctataaattaataacgttgggaccgtgaaaatttattaatttagaaaagtattaatttatcgattaattaataattattaatatatagagagattattaattcagatacatgtctttaaatgttctctatttctgtaggtgcaatggatcgagaagtacacacaagtggtggaaataacatacactagtggtgaaaatggacagccacaagtggtgaaagtagacaaaacaaagttgaagctagaagacaagtatatacgtctcttgatccaattcatgtcagccacatatgtaacttttctgtaaactaaaagttacgaatcacttttttgtaaaccacaagttacgaatctcttcttctttttgacttgatatataatttgtaatatagtacacaactaatacacaaccttctcttattcttgaaaaccttcttttcttacctcgtcaaaacacaatattgaacgctaaacacattcttctcttgttcttttaaaacttcttacttttctaatacttcatcaaaacaaagtttataccaaaagcccaaatttctcttcaccataattttttattatacttcatcatttcttttaaaccaagatgatgtcttcttctcatgataactttcatgagacttgaacgaagaatttgataatctttttgatgaagcatttgaaaatgaattctattcatatggtgaacaccaagtagcaaccaacccaaagagaaaacaagactatattgaaagagatcgtgaagaaggacacatcaagttatggaacgataaatttagtgaaaatgaaatnttctctactaatcaatttccaccccgtttttgaatgaa

SEQ ID NO: 22770 - DNA, 429 bp, Arabidopsis thaliana landsberg
  unsure (1)..(429): unsure at all n locations
gatgatatgtttgggcctcgacggccgcaaaaaacatacgcatactacagacaaactgatcctgcaggttcagacatcaataggggggcagcagcaccctcggcgtcgactccaccttcggcggaatccggcccggcctcggacggcgacactgtgggaggatgtccacctcnnnnnnnnnnnnnnnnnnnnnncctgggccatcgccgctagggtctcctccaggaacccggcccaagcagacggcttgatcagccgctccgtagcctcagccagctgacccccgaggacatcagcccggctcatggcctcggcagcccgactccagggttggtcccgccaatggacgacctggccaggttccagccaccgctgctacgcctcctcagcctgggaagtccctgctcttgggccgacgaagttttcttc

SEQ ID NO: 22771 - DNA, 441 bp, Arabidopsis thaliana landsberg
gcaaccctccgcgcgggggggtccaccgcgtcctccgggaccggtggccgggaaggcttgtgccaccctacctcctggggacagacggaaagtcttggctgtgagaaccaagggcaatccgacgcaaggagaaagaaggagcggacacacatcagggacacacacccgcggtcgggacgcatcaagggctgggaaagggcgccggcgtctggttttccaaacgcgacggctacccgcccgtggaggtcgtcgacgggaaggggatccaaggacatgcgcgaaccctgcaagtcggcctccggcgtcatctgccaaagcggcaaccgccgctccgtcaagggaagcaccctccggcgatgaatggcggcaatcactcccgcagcggtgagccctgctttgccgaacacctgcagggccttcagaggggctggagattcttct

SEQ ID NO: 22772 - DNA, 999 bp, Arabidopsis thaliana landsberg
gatatcgtaatgatcttccctggctctggccagttgtttccgaagatcttctatttcacgtctctgagcttcagcctgactcttgaacgcaacttcgtcttcctttattttatttaccaatgagtgtaatattttatctttttcgaggccttcgttcctcagttcaattacttcggaacgaaggttgctcagggctatagtacacccttcgtcttcagcatctttttgtgccctgaggcacttactaagtatcaggccctgcaaagaaaagtatgtgtgtttcaataaaacaagcaaaaggtttttttttggtatcaacaaagaatacaaggatcccatttgtcgcacctttaagctattgtaggctaggctgtcggccaaatcgttcttcgacagcaccgagagcccgtcttctaaagttgggaatccgaagctcttgctcatctcccgacagacagaaatctccttgttgtcagggagacaatacaaaaagtcttcttctccactgccattgaatattaacgccccctttggatacttcagtttttgcacgtagcgctgggcctcttgctcttctttttctaatagttttttcccgaagcatgacgaataatataatcacgaactttggaggatgcttcgggggcaatgacactgatttcctcagcaaaagttggctctgttattttttcttcctcggttttcaaggattttatcttcgtgggctctgaggacccagcttcggcttcagtttcttgctctggagccttagtatcagaaatttcagttttcgcttcgggaatggcaacagtcttcttcggaggtgtgctggaagatttaattgtttccacaacatctagcacattgaccattctctttcttttcggagtcactgctggcaccttttgattttttactgtctcaacatttgctgcaggactcaaaacttctgatgcttttgatccctcaggtgggccttttacttcttccattatttct

SEQ ID NO: 22773 - DNA, 316 bp, Arabidopsis thaliana landsberg
  unsure (1)..(316): unsure at all n locations
ctttctctttgccggattttggagttcagtggcttaattcaactacccatcaattcgaagtgatgtcgaaatatgaaggagtggatactgaatttcgaattgctttctaattctctctcaaatctatccatctctttttctttctctttttcgtcttcttcggtttcttcgtttcagtttttttttttgtctttttcaaaaatggatccgcanaaactaaacccgttcccaccggtggtccggttggggtgggcccctttaagaaattttcacagggtattgttggcaatggatggatgggagtgtttcgaaattc

SEQ ID NO: 22774 - DNA, 561 bp, Arabidopsis thaliana landsberg
gcgctcattccatagggattgaacccatctgtggccaacgcaacacgtacattacgagcctcttcggctttctcacggtgaatgtcatcaaagtgtttccatgcttcaccatctgatgcgtgcaccatcttgtcaggattgtatcgttttccatttttggtgccatgtcatctgtttcgcggattcctctgtcatgtaaagacgctggatcctcggtatgaacggaaggtgtcgtaggattgtcaaggggatgtcgagctgcctcttctgtccatcaccagagtctacctccataaacctagacgaattacacttgggacagtactttgcctctgtgtattctttcctaaatagcacgcagcccttcggacaagcatgaatctgctcatacgtcatcttgagtgcacgaagtagtttttgtgcctcgtacatgatctttggcataacgtgatcatccggaagcagactcccaataaccgtcaacaagccatcgaatgcgtctctactcatgctgtactgcgacttgaacgccattacacgcccaatggcatccagttgaga

SEQ ID NO: 22775 - DNA, 495 bp, Arabidopsis thaliana landsberg
tccttcaagaagtccttttgaaagttcttcagccggttcatcagcgagtctatcaggtggtctgtcagtgagtccatcagctgcaatgtcagctctcattcttatatcagacatgattgcaattaagtacaacagtgggtctaaaagagttgtatgtttaagatgtggagacattggtcatgacatgattttgtgcaagtatgagtactctaaggaagatttgaaggtaacttttgttttcctaaattacagtattttgcttatgatttctttcttataacttctgttatttactttgactagaatatacaatgctatatctgtaaaagctttcgccatctctgatgtgtcgaacccgatgatttaatgtcatgggttgtatcttgctacaaatgtggtcaactaggtcatactggactcgtaagttgtagagagtttagtttcgaattatccacactgttgattgagtcgtccctaacagagttgatcactttc

SEQ ID NO: 22776 - DNA, 489 bp, Arabidopsis thaliana landsberg
taaagatatattttctgggtaactctttgccaagtataagccatatactatgcataaagtgttttcttaaaggtagccgagtgtttaatgatataagacctagtctaggtcgctcaacactagaatatcacgagggttgacaagcctaagtggtgttcctagtgggaggagggtcgaatataatttggttaaggaaccggattcatctaaaacctctactaagttttggtcgatcatcttcactgtagcgtaactgggtcgcccgtggcttgtccggccatagggtgattcggaggcgttacaatttttggtatcaaagcatggttatgcgatgctcgtggtcacttgggttttcaatgattttagagagtagatttgagtcgcagaatgcaacattagattccggatgttcgtcttctagatgactatgtgggggataggttacctcgtattgcagatgtcgtctagcaaaggaagcatcactgtcag

SEQ ID NO: 22777 - DNA, 410 bp, Arabidopsis thaliana landsberg
tttgttggggtgggattcccccacaagcaagaccgagtcaaacagtctaagaataacaatcacctcatggttaaacatatgattggcccctagcctagaacaaagcaccttgggaccttattcgatcaaccgtcctggagagacttcgtaaaatggctcgggtgttaatcctatgaacacagcccgagccaatcgtgaaaacggtgcgggaaacatatatatcggctttggagacagccaactgagcttaatggacagtcatcaagcgcgccccgaaccggtacataccgtttgctcgaagccacctctcaaacgaccaccgagccgtgaagaacacctgaggcaaagacttgtaaaaaccattcattctcaaaggatcatttccggtaaaataggatcttttatgggac

SEQ ID NO: 22778 - DNA, 528 bp, Arabidopsis thaliana landsberg
cgtcagaattttaagctagattccgatttggtttagttgtctactcttaatgatccctaataatggcagtctttctatactttgcaaaagaatgatgtatttagataaaagaaaagagtgatatgggaacaaacttagatctcgaacagtggccttgacggtgtagccacggaggagcaaaagcttgacaatccaagacgctatgtaaccggaagctccggtgacgcagaccaactttcctccgccgttcataatctcctttgacctctctttatctgaaaataattgtcttaaatgaagaatcaactcttcaaacgcatgggagtgttcaattagtaaatggtttggtaaattagggcggctcaattagaatatgggccttgtttaaaactggcccttcagttttagaagatatttgtaaacaagaaataaggcctacatgttatatgcataagcaaaaagaaaaaaaaacatccacatgttaagtttttcaacaaatcacgttgccgtaattcattgttcagaata

SEQ ID NO: 22779 - DNA, 524 bp, Arabidopsis thaliana landsberg
taatttctatggcacttttggttgctgaaatctctttcgggttttgtcctaatcctcattagtttgggtttcgtgagtctcgttttataaggtatatttttggctaatttgcttccgaattctgctttgttttagctcaattttgcccttaacattggttgatgaacagaggatgatgtggttgtgtttattgtcttcttgcagaacatgggacaaaagagattgttgttcttgctggcagtttttacttttcttgtttcatcttcatatggtagaggtggtaatgcaacttctataatgattctatgtctgtttcctttattgggacttccagtttttttattctcctgagtctctctgagcttaattaagattttaaactttctgtgtaatgtgaagtgcttgggaaattggaaatttaatctggctacagtgatttttcattaaggcctaattacatgttctatcatgtttggaacaaatcaattcataatccctgtagcatcatcatatgcataaggaac

SEQ ID NO: 22780 - DNA, 890 bp, Arabidopsis thaliana landsberg
cgcgttcaggcatctgaaaatcagggaacggaggaagcttttatattataattctcaaagttaacattaaagttgggtgtttattcagatatcgaacattacttgtaaaacattacctgtatgtgaaattaaccaaaggttgatgacgaggctggacggcaaattgatttcccctaatatggtcaaggcacttggtggtcgccagtaatgtctagtaggggccatttatcgaagatgggtacatttgcctttctcgcagataattctgggcattctgtattatcaactcgaatagaactgaaagtggcgtaaaaatagcaatataaataagacatttgaagtaaaccagataactaggatcgaacctcgcaaatgggaacagacttgagatagtgatagaatgggaaccctcatactctggaacactaaagaggggtggggagatgggttactggcggcatatgtggtgggtcatacaaaataaaaaaaattagacatggcaataagtatatgtaaatcatgtgtgtccaaattatcatatccaaagttatatatctgcatggtatataacatatagacttctagaacatgtattgttacaggcaattcatgtggaactcatttattggggattcgtttctagaattttgtttttgctttggtaaacatgtgaagagactaggttatacatacatagactgaactcattaaacaccaacaacaatgttagattgataagacttaggaaatataaaaatgtagatggaatagcaaacaagaatttcacataacaaagtcagaacagtagacgcagaaatgcaaaagatacaagttttagaaaatataaacatgtagatggacagataatgatggacaacacattacgaaca

SEQ ID NO: 22781 - DNA, 858 bp, Arabidopsis thaliana landsberg
tgatctacacgcatgaatcatgctcactgcgaacaaacttcaagccataaagagggttttttaccaaacataccagatcttttcctggaattcacctcatatccttgaggttgttccatgtagagcacttgatcaagttcaccatgttgaaacgctgttttaacgtccatcggttcaagctccatatttaattactacagctgacatgagcatccttattgaaatatgtttcaccatataagcaaacacttccttatagtcgatttctttcttttgcgtgaaccctctagcaacgagtctagacttcaatctttcagactctactccagggataccaggcttcagcttataaaaccatctgcagcttatactttctacgtcttaggcctatcaactatataccacgtttcattcttggttaaggaatcaatttcttcttttattcctccattccatttttcccactgcttatctttctttgcatcatggtaacagtgaggttcctctgtttcaatttcctcagccataaacaacgtgatcaggatcaaatttatcctagactactctctcaaataagagatcagttgtaggcagagctgggcataatatcctaatccgagcaccccgatctgattccaaatccaaaaactcaaaatacccgaacgagttctatgctttcaaacccgaaaaatcgaacccgaacccgatccgaattaatatccgaacatatccataatttaaatatatagtaataagatattattaatatttatatttgtaataatctaaatatcaaaatatgcaaattttcagatatttaaattttttttgggtatttaataaacttttgagtaaatt

SEQ ID NO: 22782 - DNA, 650 bp, Arabidopsis thaliana landsberg
  unsure (1)..(650): unsure at all n locations
agggcaaatgcacaattctagcgctcataccgaaaaagatgaagctaccttnnnnnnnnnnnnnnnnnnnnnnnnnnnnnnnnnnnnnnnnnnnnnnnnnnnnnnnnnnnnnnnnnnnnnnnnnnnnnnnnnnnnnnnnnnnnnnnnnnnnnnnnnnnnnnnnnnnnnnnnnnnnnnnnnnnnnnnnnnnnnnnnnnnnnnnnnnnnnnnnnnnnnnnnnnnnnnnnnnnnnnnnnnnnnnnnnnnnnnnnnnnnnnnnnnnnnnnnnnnnnnnnnnnnnnnnnnnnnnnnnnnnnnnnnnnnncaattcctgctgaatactttagaggctctaaattttccggaaaaaatccgccattggataaaactttgtatctcgacggccacattttctgtccaagttaatggggaactggcgggtttctttggcaacaagagaggtttgagacaaggttgtgctctctctccgtacctttttgttatctgcatgaatgttctgtctcacatgattgatgaagctgcagttcgcagaaacattggttatcaccctaaatgcgagaagctcagtctaactcanttatgtnttgtcgatgacttaatggtgttcatagatggccagcagagatcgattgaaggagtatcaatatttt

SEQ ID NO: 22783 - DNA, 441 bp, Arabidopsis thaliana landsberg
acacaccctctaacatcggaccataaactggggaatactcacgcacacttttgctgtttttgcccgccacagaaaaccgagggccttgtgtattgtctagtaccctatgctccacacttataaacttatcggtgggtatcagctgcaaaatcaaagcaacatatataagcaaaagacatttaattttttagggatctattattttttggttttccagatgggtactttacctgcaagaaatctccgatgttgactaccagagctccaggaagaggagagacatcgacccaagagtctggatgaagaatttgaagaccaccaaggttggcttgaagaaaaaccgggaggaaagagtggcctgagggcttacctattcctaaaagcaggacaggttggggacaaggggggtaataatgggggatcataagcaaacttttcaaa

SEQ ID NO: 22784 - DNA, 851 bp, Arabidopsis thaliana landsberg
  unsure (1)..(851): unsure at all n locations
ctcaaggtgccagtacaaacggaattccggttctgtccccgtgggtatgaacaacctccacaccggggagcctgcggggcgacaagctccgggcgactcgccagcgacctctgcagcagcagccatggtcccaggacggacgaagccaccggaaggctctcgttcgcgtccccactcaagggacgcgaaccagacattaaagccaaagagccggaggtcggtccgtaggcggcgctgacggcctcgacggtggggaagctttctccagctcccaccacgtcagcactgacggcggcgtcccttntccaccaatgcggaaccagcaaacgcgggccattccaaagcgcaccgacaggtcctcactcccgtcctcgccacgaaagcgaggacagaggacgaaatgttgcatcctagttgggcagcaacagttcgccttccccggcatggctggaggacgcctcctacgcagagctggaggacggttccaccccctgaagctggaagaagaggtggctagccgacccgtgcgagaggtagggctccggctcacctcgctctccgccccagcaaggatgatgaagatccttgaagctgagggtagggcagaggccgcggcccggctcgcttctccccaccatcgaactggtggtcaccgtcttgggtgaccaccggcgaggggatgcagccgggctgcctgatgaaaatccttgaagccgaacgatggctgaaaggtaccaacttccgcgaagttgcgttcctccaacgacagcaagacgaaagcgacgcgagtgttcaccatccgggggatcggaaggtagaaggacgcgatgcatgaggggagtgcgaagaca

SEQ ID NO: 22785 - DNA, 5047 bp, Arabidopsis thaliana landsberg
  unsure (1)..(5047): unsure at all n locations
tgggacagatgctttggatcaagttcttgactctgctaggatttacagaaaatggaaattctggatgtgtcgggcttgttcactgaagttctattatcctaaaaagtttaggagtcatcttgagcaagaacatgccgcaaaatttaaaccttctacgacaaagcatatggcgcagagggtagatgaagtctgggctggtatgatatcggttgcaggttgggaacctgttgatgtagtagctgccgctgaaatgatcaagactcagctcgagtttgtgaaagagtttgtatatgtgaatgggtggtccaaagactggcctttagctgcagatgaagagcgcaggaagttactcaaggaaatccgattgctccttgtgttgttgttggagcgtaaaattctctcttgtagtattcgagactggatgatgcggtttcctgttaagcatcttatcgcacaatttgaagtttccgagaacactattactaccgagtgccgtttagtggaaacacctcagagtatctgctttttggaatgtgatgaacttaatcaaattctagaccttctcaaacgcatcaagtgtgaaagggatgatggtacagaactgatttccatggcaacggacagtttatggcgtcgtactcaagttaaagaaaagattgatattgaccatgagtgttcacttatgcttctggataagagattgctgagaggcaagattgcttcatttgatgatgaagggtcaatagatgtttgtgatcacaatgttcactacgccaagacacatcctcagggccatgatatcataacttggttacttgacgactattctttaatagataagagctttgggttccccagatctattggggcacacaatcttgatataaggatggctgttctgagagccattcacttcacgcgtaggactttggcaaccagatatgcaaagaagtggcagatcctatgttacgacgaatgtcttaatgacgccaggaacttatgtatacaagaagatgaaagtagaatgaatgttccggaagatcaaaggaacatatatgcatctcttctatgcgacagttgtgaagagcagttaacgatagacactgaagatcctctttttacagaattatacttgtgtgcagtacgagatgttctcgaaggagcatcacatccgacatttgatttcactaatgcagaagattgcctggaacttatacatgggcttataaatatcagtgatgatatagtgttgcaggccatagaccttctgaaatcagtggtcacccaaaaggttcgtccatgattttaatattcattaacaacagaataccatgaaattgtccatctaaaagtatctacatgacttgcaggttcttttaatggatacaaagatcttgctgattgataattcaaggataagtttgctaaacaacctcacaaggctttctgcttttgataaccgcacttatatccttcaactgcttaaacctttcttgctggttggtttgaaactgttatatacagaaagattttattttccgtcaaatttttcctttgaattgtttctcatatgttattatgtctcttctcatccagaacgaaattgtgaatatggaatccaaagccaagtcagatgcagcagaagcagatcttttaaacgagttggagaaggagaagctacaatcgaaggagaagccacaatcaaaggagaagccacaatcaaagaagaggagagatagaagcaaaaaggtctttgaagttctaatttctctatttgcttctctgaaaaatattttacataagatatatcggttaaacctaagtgatatcggttttaagttctcggaacaagtcaataacgtcttcctatcttatagggatatcatatcttctatgtagatatcgtttccttacttgtaggattccatggtttgtgtatataatacttatatggttgattgatcttcttgacgcaacagaaaccttcaacgagcatatctagtctccttgataagactgttgaacagtaagtacctcaatggtcagtttcgcatgttataaattgttttcgggttttctctgaccaaaacgttttgtttcatgtacagtaaaccttctgtcaaccttaaaccggagagtacatcttcatcactaagaacgatcgaagaaggttctatggaaccagaagatgctcttgcaagtgagacgggtcaattgaaaatttcatccaaaactgaaattcaagtggaagctactaaagatgaccctggtagttaaaagcttctcgatttgagcaataatttgaattatattcttgtgaggttcataacttcttatttctttcattgaccattttaaagatatgcgaaacatgcctggagaagattcactgtcggaacatttggagtcagtagctggagaagctacaaccagatacaattcagcatttgacatgacgctgaaggtaaagcaattatcaatcaaaacaagattcaatacctgaactctcatcttttgattccttattctttttgagaagttcacaaaaacatgtggtattgcaggccctcttgaacattaaggttctcaaagaagatttgctgaaccaaccatttcaagaccaccaggaagaacaagttcctattgcactacaaaatttatttactgctgttgtttcagaagcgatacaagatgagggagtctacagttgcctcttgagggacttacttacttcccaagaagaagttatttccatggttcgtgtggagaagatatgcttctaagcattattttgttaattgtttgttgtcattaatcttatttaatatcctaaaggtattctatttttttactctttgcagtcaagtgatgctgctaatgtagtagtagccatccttgatttttggcgttgctggaaaaatccagaaagggagagcttggtaactcgcctctttacctcggcggaaaataaaagaatgagttgtataaaatgcagaaggattacaaattatccacagcaaagttgttatggcattgttacggcagcagatacaatcagagaactgaaggtatttatcatttatcatcctcgttgtctttccagcagaaactgcaggtacttccccttatatagttgttttgtgcttaaacacatgcagtgtgctttggggaatagaaattttgtagatatcctaaaggtgatccgcttgagatataaaatggtatgtgacgcanaaggttgcggaaagacgaactctgttcagcacatttcaagtagatgcccgcctatcttcacaatcggtaaggttttgacccccatgattgtgatgttttttttgtactcatatcatatatttatgttggtgttttttggggttttaacattagtgttggaatgggagaagaatgaaactgaaatagaaatatatgaaacaacgaatgctttgcactgggagatagatatcagcaggttatacgaaggcttagaaccaaacactaactaccggcttgtgtcaatggtaaaatctgaaacattgtgacaaatgtttgtgctattgttcttctgtatttctctactacagtctgagaatttgggaatgcagattggttgtgttgaagaaggagaatacatttgcatggcttatgaaaagaaccggtgggtgagccgcagacatgaagcttcagcagaggaggtgagatgaaacagttgcctttgtctttattgccctgaattgtgaactttgttgggttaagacatatattgatgtgtggtgatgccataggttgttggcaactggaagagtgtggtcaaaatttgtggagaaaggaagattcgttcagaggttcttttttatgaagctgttcaatgatagaaatgtattagtatggaactgaagtttgtaatcttttggttcattacttgattttagtaataaagtactaataagataattgcaacaaaatatataaacaattgttaacgacttaaggtttttgctaattcttctcacacaacataaaccaatttcgatcatcccatgaccatctttgatcccgaattcgaaaactttcacacaaattttttgtcttatctgttaattcacacatttctggggtgcttttttctgtttattctggatggtgaaattaaatagaagctgttgtgtaatttactcaaaacaatgaatgcacacaagatgttcgacagaattccccaatggagatatcgaagaagaactgttcgaaaaagaagacacgacgacttgggtttctcttgtcacgtggatttcacgtgataaaagcttcaacaactctgttacgtggatcacacgtgataaatgcttcatctctgttgttattatcatctccctcgcaaacaagtttctatctgaatctcaagaagcttgaagaatcgttcgttactctttccttaacatggcgcctcttcttcctcttttagtcgaagatcctgaggaagcaaaaatccagaaacttgtccacggttacttcgctgaaggagattacatcaaggcattggaagtaatcgaagattcgatttcgactcgtgggaaggaaaaggttccagcaatggttcattacctacaaggttgtttcttttatgaacaagggactaaaacagaaaacagtgacatgaaattcccattcttgttggcttctgtagaatgcttcacggaagattgtggtgtacacgcttactctgcaattgcacttttagaattgggtaaactgattggctcagcatcattttacaagaaagctctgaacattgcaaaagaaggtttatcttttattgcttcttttggtggtttgaacttgagtgaggaaaatactaaaagttctcttgagaatgtagtcctagtggcagagtcaatgatcccaaaacttcaaggaagtgtaaggagtgactcggatacggctgcgacagaggcaatgatcgaagcggcagattcaatggtgttactgcaaaaaatgtctgaaccaaaacttacggagtcaaagaacattctagacagtataaggagtgacc

SEQ ID NO: 22786 - DNA, 640 bp, Arabidopsis thaliana landsberg
atcggaggggcaaataagaattaaagataattaaagataaaatttattaagtattagatgatttaagattacgttttggacgaaggcgtcggctaacagagagagtcacaaagatccgcccacagggagagaagaagaaacgatcaaaaaccggaaaccataaaaccagaaaccagccaatagttttggacatagttgaaagcagtattgttaaaacagattcttttccagaaaaccaggagctaagtgtgggccccagttcttccaaatgctcctcaaatgactcaaatcccatctggatgacttacgtggcgattcgaccaaatttcttactcgcgagcgtggaggccacgtgttcttgtcacagtctctctaaacacatttaaaacagtttaaccaaaatcctacttcatagatactctgaattggtcagatactctaatcaaccgccatattaaatcgttttagaacgaattagattgtataattcagaatttatagactattcactagtagtaaaaaaattgtaataaatggtaactttggtatgtcacgtgtatgacacgcgcattggatagagtggggacaaaaacataacttggggaagaaacacaagaagcaaaaccttgaatcagggtga

SEQ ID NO: 22787 - DNA, 571 bp, Arabidopsis thaliana landsberg
  unsure (1)..(571): unsure at all n locations
tcaccgccttgtcctaattcgataaacttgatatcagagccctccttatnccacagnccacttgaaccatttgatcaaataagacacgggatgttaagccccgtgagacaatcacaaaatttagctcatgagatgggttcatgtggagtctgctcatgtcatcgatgtctccatagagacttgagaaaacctgtacaacaacactaaaaaaagaccaaatcatgagtcttaataccttcttgttcattcacacagagattgattgaagaaaagcacaacaaagagaagataaaacaacaacgatgaaactgactagctagattcttactaagcctctattattctgacacttcaaatttcaatagatattgatgaaaaaaaatattcagtgctacctttcttctaaaaaaaaagaagaagatatatttattgagttttaatttaatttttggcttaatatataaagattttggctttagaactttttaagtatcattaaaagcaccctcaatagaggggttttagataagtttatgtctataaaagataaaaattttagaaaatgatggga

SEQ ID NO: 22788 - DNA, 575 bp, Arabidopsis thaliana landsberg
gagcttgaattacatttaacaattttgaattccataagctctctcatctccttgaacttgatccttccaagtacctttgtcaaaatgtcggccttttgttcatcaccgggaacatgctccacatccacttgctcgttctcaacgcattcacgtcaaatggtatctcttatgtatatgcttgctccctccatgaaataccaggtttttggctaaagccgatccggagtgttacattctcacatgtccttctggtaacttcacctggaagctcttgaagccaaatcgtctgttttgcggctttaacaacactaccgtctcttgcttctttgtataccaagtgattggacaattaccaacatcgaaaatgtgtccggtagtactcttaccatcatctttatctacattgtgactaatatcactatagcctactaatcctcgattagatcctcgagtaaatgagagaccaagagaaagagtgccccgcaggtatctaataacttgttttagtgcgcctctgtgtaactcctttaatttggttcttgcatgtacttactcaacacaccatcacaaaaagc

SEQ ID NO: 22789 - DNA, 550 bp, Arabidopsis thaliana landsberg
  unsure (1)..(550): unsure at all n locations
ggcccaatcttaccataattaccatactttgagctagattctctattaagataaaccatcatcaatatcgtggctgaggaagtttccattgcttgctgtgtccaacaacatgcgaaatttagggagaactcctttatacaaggtacttagtatagactccttagagaaaccatgaggaggacattgaannnnnnnnnnnnnnnnnnnnnnnnnnnnnnnnnnnnnnnnnnnnnnaattgaactcttccaaagcttcaaaaaacctttcattgctcttttgagtgaagatagatatctcatttctcaaccttgtcgttcttgttgtggagaagaactttgagaggaaggctcttttgcattgatcccaagaggtgatggagccttgaggtagattcttctcccaaatacgagctcggtcttcaagagaaaacaggaagagtataagtttgaatgcatcttccaagatcccattgattttcaccgtgctatacaacatatcaaattggtttagatgatccaaaaggtcctctattgataaaccatggaactt

SEQ ID NO: 22790 - DNA, 3355 bp, Arabidopsis thaliana landsberg
catttaaggggaaaaaataaaactgaagcatatgcagtagtatttggtaatcccaacaaacaaaaaaacaatcagaaaaggaggataacgttatcattatgttgtaatccatgatttcacatgccaacagctgcacttatgataatgaacccctctcttattaatcttcaaacctaatcaacaaattattaattgagatatattttttttatatattaacaaattattatatatccccaaatcttcgtcttattatttttgtttttgtttttttgtcgtcttcctcttattaaaaatgaagctctccattatatggattcaatagaattattataatttcttggacgccatttttctcaccccaagttttccttctaataaatacgagtgagcaatgcgtaagtataaaaacccgatttgactatataatattctcaaaagaataatactactaaatctgattttcaaccaaaagccaaattcagcggaggaactgtcgttttcctttcttctttacttcttcacctttctcctatttcatcttaacatataatcatcagaagaaagaaaaattctaaaacaaaagaggaacttgagaattttatgcttgagacaaaatggcagaagatacgtacgaggaagagtgcgactacttgtttaaggcggtgttgatcggagactcagccgtcggaaaatcaaacctcttgtctagattttctaaagacgagttccggtttgactctaaaccaaccatcggagtagagtttgcttaccggaatgttcacgtcggagataaaatcatcaaggctcagatttgggacaccgccggccaagaaaggtacacggacataattttgtgacctcgtgactactctactctgttccttattttgtatgtttctttgagctttaattttgaccaaatcaaaaatattattttacaaaaaaatgaaggaaataaattatgtaatataacaaagaagagtgaactatcaatacttttattaggttaaaaagatacttataaaaatacttgtaacattccttaattattatttgtaatctaatcattgtaatttttatgagtaaagatttcgagcaatcacaagttcgtactaccgtggagcattaggggcattactgatttacgacatcactagacgaacaactttcgacaacatcaagaaatggcttttcgagcttagagacttcgccaatcccgaaaccgtcgttgtcctcgtcggaaacaaatctgatctccgacaatctagagaagttgaagaagacgagggtaagactctagcagaatcagaaggtctctacttcctcgagacttcggctttagagaatgttaacgtcgaagaagcgtttctagtgatgatcggacggatacatgaggttgttactcagaggatagcttcggaaaacaaatccaacggtgctgcgacgcctcacattaacggtaatgggaacggtacggtccttccggttggtaaagaaattgtgaatatacacgaagtcactgctactcaacccttattaagctcatcttccaactgttgttttaagtaaataattaatgtatttttttcgtttattgttttggaatactttgatgatgtttttatttgcctgtgtattcgtgaaaattttgccttggttgagtacatgaatttaaatcatacaattatatccaaataaatatgaaaatcaagatataaagtaaataaataatcaaataatcaaatccgatgtcgtccagcggttaggatatttggctttcacccaggagacccgggttcgattcttggaatgggaactttttttaaccaaaaaacaaaatcacataaaaaaaagaaccaaatacaactgagataatctgtcaagactgtccaatatttcaaacaaattcagtttcttacgggcaattttttacacaaattttatcaaagagtgttgtgaagaacaataactcaaatatgagtatcacaaatcagtcatcttttacttctttctctttgctgttttggagtctaccctaactttcttgcacacatacaacaaagagaagccaaactcatcaaacactaaagtaagatataaaagatgaaactgaaacagaataagcagttactaaacagccacctcttgagggagatttcggctgtaaaatggaaactcgaagagaaagaccgtcttgaaccatcctggtaagttcccatacactcctcttgggaacagaatcagaggactaaagatcgacagaagatagaaacaagttagctatatatacaacacatcttcaaggcttatcaaacggtatctaaagcaagttatcgttaaaccttgttgtcttcttgtaggatctgtaagctcctgagtttccatgttttttgtcagccgatgcctgtttatattcaaatcagccatatgtgattcagaaattgtctaagtagagaggaagagaacaagggagaacctcgagtaatggtatgccgctgacgaatagaagtagcaaagtgagaaagagtggtccgaatatgacaagatactctgcaccttcaagcacaggcgatgcagccacaaagattccccaccacagtaacatctgatgaacatatatagccacaaagatatacagcaatgaacgatcaccaccatttatgccaaagatgaagaactcattatataccgaaatactaacctcaccgaagtagtttggatgtcttgaatacttccagactccaacatcacaccattttcctctgttttcaggagagtttttgaatgatagcttctgttgatcagctgcagcttcaatcaagaaaccgaaaacccacatagtccaaccgataacatctgcgggtttaagagatccaccaccatcacttgcattaacaagtgttaaaggtaagctaaccgtccaaacccacacagcctaccatgaaagaaaacaacaactctagtttgagaaccacaagcatgaattccaaataggctaaaagagagaatagtataaacagttcacctgaagagtccagaaaatgattagtctcactatatttccacgctgttcatcaaagcgacgatcttccccccattgcaagatcctaaaacaacaagagagtaatgctataatgatcaggaaagaaacaaaaaaggaattttgcagtcattggtagagacctcattagaaggaaaatccccaagcgaagaccccataccacaactagcaaagtcaatactatctggatggagaaaagaaaagagtctcaactcagaaacaccaaaacaatgaaaagaacagagagagaaaataagacaaagaagaagagcagagacttaccttgtcgaa

SEQ ID NO: 22791 - DNA, 571 bp, Arabidopsis thaliana landsberg
ggtggcatacaccaatcagaatcagagactatcgggacagcttgcgacggagcttttgtttgcttctcagcaaaaggaaaaacatcttcccgaaaaatgacatcacgagatatgaaaaacctatcttgctcaatatcgaaaactttccatcctttttggccaaatgggtatccgacaaagatgcacaaacgactacgttctccaaatttgtctttatctcgtgcaacacggtgtgtgtagcaagcagatacaaacactcgtaattgatcataacatggtttggccccataaagaacttcataaggtgaacggttattgtgaagagaagtgggagtgcgattaatcaaataagcagctgttaagactgcttcaccccaaaatttaattgggagacttgcttgaaacaacaaggcccgagcaacattaagaatatgtctatgctttctttcaacacgacctttttgttgtggagtcccgacacacgaagtttgatgaacaattccatgttgacgaaaataagatgagagacacatgaattctgttccattatcactacgaaccaccttcacac

SEQ ID NO: 22792 - DNA, 2350 bp, Arabidopsis thaliana landsberg
aatgactcttctaaacacatgttcgtaatacaaaaaaattagcttccaaaacttataaaagctatatagatcttacttaaaagaattaacaaatgcattgagctcttaatcactttctaatgaattcttttgttctacatatatcatgaatcatgacaaataacattcaatacctacatacaacttaacaaaattatatttttttttaaaaaaagcccgcgacttggttcgggtttcgccctagtactaactagagaagaaagagattttcgaagaaaaaatatggaacatgtgaaaagtttagaaggtatgacacatattgcttaaacaaaatcataagaggatggaaagagacactgtaagaaaaaatgaaacaaataaaacgagtgcttgcaaaaagatagggagagtgatagctctttgtaaaaaaattgtgaaggcagaaattcatatacatattgaaaagaatgtgagaaaatatgagttgtttaagtaaagtatggataagcttatgaatataattctatataatatcttatttttataagaggtatactaactaatgcagtgaagataaacgaaaagcaatagtaaatttacgggtaccaaaatgagaaagtcgccgaagttattctccatacaacaatttatttcatacgtaaaaagatgtcgttatcctaaatatttaaagcttttttttttcaacaaagcaatttacgtattaaccaaagtcattacaatagtgttgatgtagccaaataggtagggtaccagaatcagaataaaaacatgttgaaatgcaaccaaattttgccaactcatgtgctaatttgtttcctccccttcgaacaaagctaaactgaatacttgaaaacttcctcgcccaagtccgaatatcatcaagaagattcgccagatagctgtgagataaagatcctgtgactaaattggttagagtttcacaatcaccctccatgatcacccgtcgataacctctaatccatgtttgttttaaggcagccagaagcgcctttgtttctgcctctaacggagtacttgtgttgtccagttgcagtgatccccaatgttgtgcaataccatcgtggtttcggatgatccatccagcagtggagtctaaattttggacattgaaacctgcatcataattacattttatgtgtgtatcggacagagctttccacttcgtattgtgaaccacggttgatcgagtttgaggattcactcatctatgattgtatgttgcattcagccaatctcttgtttcagcttgtgctcttaatgcggtattcgtcggactttctctgaagttgttgaaaactacattgttccctgctttccatattcgccagagtagccaaaatggaaggagtttctgaagatctgtaacatttgttccctggatgaaatccaagctgttggagatgttggtttcgaaattgtcagacacttggagacgttggaaaagtgtattgtctgctaatcgccaagccatgattgcgaaaggacatgtgaaaagagcatgattaattgactcattagttctatgacagcgaggacaagttggattgattcgcattcctcttttagaaaatctttcttttgtagcaagggctttagcgagagcacgccagataaaatgttttaatttaggcatgattggtagtttccagattttgttcttaagttcaatcgatccatggggtctgtctactggaggtgtagtagtcaaaggatcatgagtgaggagccaataacctgatcttaccatgtaatcgcctgtgaagttgtatccccatgtgagtgtatccggtttttgtgtggtggaaaggtagcaacgtcgaataaagtcatggtcgcttggatcgacatattgaagtatttttgagtcatcccaggaagtatatgtgccgttgaaacggaatagggtatcaagatatgcacctttatatctttcggaagtgtgtagcggtctcggagggtaagaatcaacaacattatcaatccctaaacgaatagatttgccatcaccaattgtgtactttgtccccttttttaaaagtgctacccctgatagaatagatgctcacccataggactgttgtttgcgtgcttttgcttcaagtattgaatcctctctataatacctagccttcatgactcgtgcgaacaaggaatctggatgttgtataagtctccatgcctgttttgctaataaggcatcattaaatttagcaaggtccctaaatccaagcccgccttccttttttgaatattggagccgtttccacgctatccatgggattcctctttggttggaagatttctccca

SEQ ID NO: 22793 - DNA, 540 bp, Arabidopsis thaliana landsberg
cagatcaatattttgagttatctgattcatccccggcgcgtaaaagagaaaaaacaattctctcccaagctgaagcacgtctcgtagccgagttcatatcgcaaccaatatcttgagacacaagcacttttaccaacactaaaaaaagccgagtattcacagtttgtcaaaaccctctccaactctccaaatatgtatggttatcattcatttttcctatttccacaacattcatcatcaatttcttcactaatgctgcttttttacctcatagtgaacatcttaccaagtgtggattccttatttccaactcattcttcgtcgatcttgccaaacctcagcaataggtttcaaccctggtatgtagtccactatatttaccctagtacaaattaacctgttaacaagagatactaatgtgtaactgttttattccctagcacatggaggttttggtgtcattactttctcggaggcttacaactacatttgagaatcatcgttctgcttttgttgatccttggttcacaagccatctca

SEQ ID NO: 22794 - DNA, 1340 bp, Arabidopsis thaliana landsberg
  unsure (1)..(1340): unsure at all n locations
ctcctcgtcacattgtgtgacgccatttaccctaagaggaatgtcattggtaaagtttctaaacaatcttttatccttagacgggtttgatgtctctccttcttcaaaattagttgttgtgcatggagaacttaggttggaatttggtatatgatttcctgaatataacaaaacgttagatagtattaaacgacatgagatgtttcaagtttgtaacccatgacttaccaaatggatactgagaatcatttgcatctgaatgtagattatcatcatatgttaaatgccttcgatatgattgaataggacttgaaagatcgattcctgctgcattgttaacatttcataaataaatcttgttaaatgtagttatgttaaaaaagacaacatataaagcttaaatatataatatagatggatctgtaaacttaacttgtttttgatgttaaagatgactccaatgtgccaggcgttgggctaatacttggtgtatgaactctttgatttgtaatatcacttagaactctcttaaaaacataactaactggcattgatttcttcacacttggtgcattgaaagacgggggtgtattttcagaagtttcttcatgtcttaaccgcttatcagttgtgttttgaataacattagacaaatatgaagattgagtttcatgaattttttttctttttgacatagagaacaaagaaaagataccagtaaaaacatgatagctaaacactcaaaactttatgagaaatgacttttctataatatgttaacctagttatgtgctattttctttgttctccggccagaaaagattgatagaatatttgcagtgatgttgtttaattaaattgattaagatatcaactatttatatggaaacaattttaaactttattattttgttttcttaaagagaactttatttaaattttcaaatctatgaagatctttttttttctgtttaacagaactcgagcactaaagaaattttttttgattgggagagtctttattggtaggaattctctcaagtctataagccaatgactacttttttgaaggtaaattcttgtttttttataagaactaaattattaacgtttcgtgcactacaggaaatgtaggtattactagcgggcgttaaacgctattagttttgtataatagcgtttccttaaccgctctgacatcgcccgttatcgtaggtcggacacatttaatagcggattcttgttgtgctatagttatttatataacaatagcgctttctgttctgcaattgttaatatttttaataacatgattcanatgttattaaaactcattaatt

SEQ ID NO: 22795 - DNA, 918 bp, Arabidopsis thaliana landsberg
gatcaacaatagaggttaaagctgagcattgcttttaataagttggtcaaattttattagcagttactaaatgtaagtagatacaaaaccatagtaagaatagaacaaaattaataaataatcccatgcaatgcaaacaacaaattgaatttaagttccataatttaatcatgcgagagtcctgagctgctcatgactgtgagcttagctagtataccagttttacactctgcagtggttgtaccttgtacccacaagtcatgttacccatctgccacggggttgtacgggccccatacacctctaccaaggaagcgaggcatggtaacactacgaggcctttacaaagttccactagcttcggaaaacccgctacagtttctagaaaaagcaatgcaggaatccctcgtctgatcgccatcgcagcaaaatcaacccaagaacctccctacacgcctacacccctactgcccttgcccctttcgggtaaggtagtcttccactagctttcctagttagtcagccaagggcgtcccattccacccttgtggtggcacgtgttttcctgggtggtcgctccatgttccaattaacaatatgatcttatcatgaacaataattaaacaacataattggaacatgatcataataaaacattagttttcccgaaaccaggtagagcaatagcaaatctatccaataatttatctgtttgcaaggtgagggataaacaatgctagggaaacctgttaggtcccatcaaattaacctgagcatgtcacagtgattaatagcgaacattattaggtaaaaggagtgatcaatgacacaacttgactgggactcgagattccaggcaccaggatgatcttcaggttctcgtgacctcacaactattcgtagcaatacaaacaaata

SEQ ID NO: 22796 - DNA, 366 bp, Arabidopsis thaliana landsberg
acggatgactcctttgcttataagacatgaggttgatcatttggacaattcgagatgagatgtgggatcgatctccattctatatgtactccagacctgcttgctaagagagttcagttctcagataccgcccttgtttcacggcatatccaagtacctgaacgagagccaaacaacgtcatagatgattactcacttatccatacctgggtctaagctctcatacattaggacaaagacgggatgaaccttatgaggatctctagtcaggtagagcctcgggacttggcttgtctctgtgaacagctacgagacattatgatagtcattttcaatcgtgatagaggactaacatacccccatact

SEQ ID NO: 22797 - DNA, 1741 bp, Arabidopsis thaliana landsberg
  unsure (1)..(1741): unsure at all n locations
gtaaatttactagtatttgttgaccaaaaaaaaaaaagattttttgaaaaaaaactgttggataattccaattacttaagcagcaagtaatctctctagaagattttagaagagataataagaaaatagaaaatacaaataaaagtcaagttggataagtttgtaagtttttctattcattataagattaggagtagtttaataactataaataagggcttatggagagatgttccataagacacaagagagagattaagaggctttagagagttgttctaaagacctagagagatttagttttgagtgagtttctaaatcatatatatgaaagttagccaatactctccatatgagtgacacattatcatacaagaaaatgacatgtgttattatacattagttaaattaaaaaaactagcaaaaataattgagaaaaaatcaaaagtcttttgttgtgttaaattttccagtaatctcactcttttttgaattttctaaatacattcaataaataaaaaatcataataatataccaaacactattttcattctattctactttttttttttatcagtagtcattaatccataatggctaaaatttaacttgtgttgtagtttagatgtttgttacctaacatcatattaacttagtaattttagttgaatatctttttattattacgttttgtgaatttgatttatcatatgattttctttctgtacatttttgtgcggtctgataactttgtaacatcgatatacaatttcttcacgtaatagtcatccaagaaattagacataccaaaacaacaacaacatgagactctatatgactatatgatagggatgagaattaaagtgttgacttaagttactagcatatcattatgtgattgtcgtctaaatgacgagagaatatatgaaataaaaaattgtttgttacaattaagttaggcaagtttcaaaactctataagtaatataactacatattaatgtatcatgtaatgttgttgtgtgtgttcatgatagtgaaatatttgaataataggtatataaatatttatattataataaaattgatatttcgaattatagataaatttaatcatagaaaattataactatataaaatagatatgaatttattaattacacattaacatacacacacaaatgacatcaaaatcaacaaaagactataatcatatattccgacaattttaaaaacaaaaacccatgcgtagcatgagtgttcatttagaataacgaattaactaataataacaaatacgcaggtaattttataaacattgtatatataaagatcataagtttatatattatctatatgtggngtaatcatatatatgaaagttggcaaactctctttatatgaatgacacatcatcacttagcttttgctacatgtccacttaataattaaggtaagttaatggtttatggtaatttattatttatttgtatattttataaaagtttacataattaattgtatcaaaaataattttctcttattttgtatgtctttttcttaaattaaattatttaattgattctcatactcttggatattttcccctaaagttcctaattttaagtcaaaatatgattaaataattttatagtggattagctaatagttttcgcaagctgatctttttctatataatatattaaaaatggtgatacatgagaaccctagcatcaaattc

SEQ ID NO: 22798 - DNA, 513 bp, Arabidopsis thaliana landsberg
ggcaccaaagtgtttagagtggacttttctccgaaggaaccacattgtttgtctcgagtttgaaatgctttccgactaataccgagtgatagtcaggccgattgcatttctgactactatgtaaaccaattgggctacgcccaacagacagacttcccaaacaaattatcatacaacacgattttaattgacttcttcgaaaatttatatgatgaaatgatatcaaagtatgtacttcgttcaaacatgccaaaacggattttttggccaaataaatggcattgagaatatcactgtacattacccttccctagtggctcttacccaactcttgcagaaatgattgtaggcatgtcatctctctttttcccctcattgttagcaacatactgagtttcacagcttcatatagttacgatattcaacaaccttgaaacctaacaaattgtgttatcaacaacagtgtaaatactaaatatacacgattatgttcgtcatgctatcaacattatt

SEQ ID NO: 22799 - DNA, 1111 bp, Arabidopsis thaliana landsberg
ggagcagcttttccagcgtttgtggtggcttcctggcaaaatactgtgctgacggccctgggaagccccttgatcatagcctcaatgacaatctcattgggcactgttggcgcctgtgccctcaatcgtagaaaccttcggacatatgcctgaaggtattcttcatgatcctgggtgcattggaagagagcctgagcagtgaccggctttgtctgaaacccttgaaagctagttaacaacaagtccttcagcttctgccatgaggtaatcgtccctggtcgaagggaggaataccaggtttgagcaacacttctgacagccataacgaaagatttggccatgactgaagcgttgccaccatacgaagacactgttgcttcgtagctcatcaaaaactgcttcgggtctgagtggccatcaaatacggggagctgaggcggcttgtaggacggaggccaaggtgtagcctgcagctcagcggacagaggagaagcatcatcaaaaacaaaattcccatgatggaaattgtcataccagtcatcttcgttgggaaaccctcctgatgaaggtcttgatgctgaggcttcggtgtttctcatcctgagcaagatgacgaacttcttcagaagcttcgtctatctgcctttgcagttcagctagcctggtcatcttttctttcttcctctgcacctgttgatgaagcatctccatgtctctgatttcttgatctatctcatcctctggtggcgtcgggctaacagccttcctcttctggcttcgggcctcccgaagagagactgtctcctggttatggtccagaggctgcagagctgcagccccagttgctgaagctttcttcggcgccatagcgaagatttatgatcgccgaaggtgttcaaaaactcgaagagtggaagtgagttcaccggaggtgggcgccaatgttggggacttgttctcaaatgctatgagttaagaacaaggcaacaaagaaaatattaatcgataaagtccttcgtccttcgaagcattatctcccttaggatataatgattttaggacgaaggctatggaggacgtaccttcatagacatagtatacgatgacagag

SEQ ID NO: 22800 - DNA, 1006 bp, Arabidopsis thaliana landsberg
acacaatcaactcggttcatgtatttacaattgctaaggtttagtttcattggccaatatatcttataaatagaggatggatctagtaaaactcctttcacattttaaagtacctgtaacagacaaatatttctttaacttccgattgtggacaaagagtttgagatcaacattcacttcccaccctcttggaagagtttctgtctcttctatcctcgcgtaaagtgaaatatgattatttataccgcctttcggattacccttcacgtacaaaactaatctcctgattttgttttccatcaaaattagctcaaaagatagaattaaagttattaaaaaaaaaaaaagagagaaattgaatagagtgtaaattatcttaaccatttgtaaccggcagcctcaaaaatagatgattcatagggttctcctctgtccttaatcacagagaagctcgtgattgtcactatcttacttgatggtcgctcgtctctcaactctcttgtcgtcactcctatatatcaattacaacaacaaaaatacaagaaaatcaataattggttttttgttttaaccaagaaaaaaaaaataagtgtaccaagattcgacgtgagactgtaagagttgttgtactctattcctctgccctgtgtgacctggattttgtttttaatttttaaaaaccatgttttggtaaaaagccaaaagatcgaaaaagtgcttaaaatagaaacctgtttaatgatgagctcagcggaagaggaagtgatgaagaggaaagcaagtaatgtgaaacctagactccatttgtgactatccatattttgagatcttttttgttttgttttgttttgttttgggaagcctccacatttatatagacggattacttactgatcgagtttagttaatactaaaagtggattcttcgtggggaaaaaaatatatttgttacacattcatttttattattttgtttgacttcgaatgtgtaaagtatcagatttcg

SEQ ID NO: 22801 - DNA, 1166 bp, Arabidopsis thaliana landsberg
aaaccagtagagcccaagaacacctaatattagtcatcagcgagaacaacatagaattccccatggactttaagcatgctgacccatgagaagacgaaaacgtagatgcagaggagtgttgaacatgataagaaacagacgaagaatggatagttacgctgcaaaacaaaagcccgtagataacatatcaactcatagatcttactcagttctttgtctaggaagtgagaattaatagtaagacttaccaaggcgatgcactgaccaacccaaggacagtgatgatcaaacctttggacacagttattgcagattgagcagtgaaaggcacgaggaggacgatatagctgacaggtatcgcaaaacttcactttgacagtgaagccattcaccattacatcttttgttcgaggtagtttcacacttcctaatttgctagtcacccattctgtcgattgggtggtaacatcaggaatctctgcctcagacacttgtttgttccttgggataatcccggggtctctcgatgatgtcaagaagagaaaagtgaaagcctagataaaaagtaagacgtaagaagatgcatgaatttggcttaaggtatgacttggcttatgaaagtaagtaaatagcaaagctttatagttataccatgaatgtgagaagaattgcaccaatcaaagtaagagaatgaaagaaagggtgacgatggcttatcaaataagccatcctgatggagaaagcgatagctggccctcctatcatacatgtggtcaaaagaagtgacgatgcatctggaccaaacactagtcttcccccacagtaaaatttctgaaacacgaaaacaaatagagaaactccacttcagatgatgatttcatatagacagaagctaggatcttgcttttgctaaaatcatgtgtgaaacaatacacagaaaaatcttagactatttccattgagagaatcttaaaagctcatgttcttcaaactttagcacagagagaagcagagcatatattagtagcaaaatcaattccgagcatcttgaggtattttcctcattcatgattcttatcttccaaagttaaaatcctataaaaatccacactgccggtttaaaaatgtaaatttgctgtcaatcattaaaagtcttacattttggc

SEQ ID NO: 22802 - DNA, 616 bp, Arabidopsis thaliana landsberg
  unsure (1)..(616): unsure at all n locations
ttctcaaaaaagaaaaatattaatattttattataattggattatataattaaatttatatcatagtgaaaaaattgaaccaatgtaagagagaaaaatgtcatgattggatatagagtatctcaaactcttttaagagttttccaatggaaatggtcttagtatattacaatctgtattgtattctattnnnnnnnnnnnnnnnnnnnnaaaaaaaacatttttaacgctacaattttgtcatctttatttttgttttttgtaacaaaagttatttagatattagatggaagattattttcgtttttttttacttggacctaatatatacatttaccttgaaatagaatgaaaattacgtataaaataaaaacatacgtataaaactataaacaatgacttgtgccttgttcactacaagttttgcttgtctggttatgaagtctttggtttctagttttgagagttcggttgtcatcaggataggagaagggacctccaatgggaggttcttggcaaatttggttggctctcttgaattatagtaattaaaataaagctaaactgataaaaaaaacctgttgtaattctcacatatctaaccactttagttaga

SEQ ID NO: 22803 - DNA, 536 bp, Arabidopsis thaliana landsberg
  unsure (1)..(536): unsure at all n locations
gttgcttagcttaattcttaggaaattttggttacaaatttattgtttttaatcatttatttgttaagagagtctcttatataagagacaaattgaaatattcttagcttttgttttaaaaattttaaaatcaattaataaaaaattctaagaactaaattaagactaacctaagaaactaccattaatgatgctcttaggtaactttaaaaacagcatagaaataaggggttgcttctgaattttcttcaaaagctttttccggataaagaaactttatattttcttgcacctcttaataaattgatccccaagtaaaagagcagtgtttgattgtctttgttctcttctgtcttgaaaagaaaattagggttttaaaacaatgtctcagctcttgtgccgaatctcgaagctttnaacatcccggaacaggatcctctgtttccgacggtccgaattctctacggttacggcggaggcaacgacaccttatcttctcctcggcagcgatcttgtcggaaaatctccttgcgatg

SEQ ID NO: 22804 - DNA, 491 bp, Arabidopsis thaliana landsberg
tcacctaatcaagcccaatgtcaacttaactgagaagcccaacaaatcttcttctatttctcaacggtttagaccacctatgcaagagaacaaagccagagtaacgacagataagaggagcgtctgtcgtacgccttcaatcaacacggagaacaaatttgattgtttgatgatctgctaagcataacaagattgagacatctgtcagtttacaataattgaaattctagcgttgtttagctataaaaggaaacttgtgatgtaacataaaacttaagtgaaataattagaaagtaaagttcacttaaaacattatctaaaatagccgtcttgctcttactttcagaatggtcgtgagttttcaaatagattagaatttaaattgtcaatagaaatttgttaaaaatattttaaaaactagattccttggttttaaaaagaaccattttcacaaaatgtttgaatgggttaaaagtaagtttttcaaaaac

SEQ ID NO: 22805 - DNA, 487 bp, Arabidopsis thaliana landsberg
gtcctaggctgtattgaccagcatcgttctgaaacgtaatgtcaccatgttggacatcactagcacccgtatgctcggccaatatggtttccttgccaaggtaaccaacttaactccaattgatgacaagatactccctttcccgccctcccagctcacactttctatctctgtaggtgttttccacatttgaaaagttgggcatatctgtggatgttgttgcaaccagcgaagttagcatttctttgacattggatccttcaaagatctgtagcagagagttaattcaacacgtaagcttgtgactttgtatctgtgttgtcttctttgagagaactttcaggctacgtaccacttgttcttggagcacagaaaatcaaatcaagactcatcttgtattctgtaattcttggccatgtgacaggagcttgatcaggtggtggaggaacttgagaagattgctgttgtaaatctgcttcacacagat

SEQ ID NO: 22806 - DNA, 589 bp, Arabidopsis thaliana landsberg
ctggtgaggtttctaaaacaaggagcttgccgcgtaatggtatttcttctactaaattctggcaagagactaatggcgggttaaggcggatgcaggatcctggctcacctcaatgttctagcccaagttcgagaatcagtagtatctcatcaaagttcagtcaatcgaaacggttctctagtgatagtccgttgacatcatctcctcgtggtatgacttctccaataaggggtgctactcgccctgcttcaccaagtaagctttgggcaacagctacatcagctccagctaggacatcatctagtccttctcgagtgagaaatggagtttctgaacaaatgaatgcttataaccgcaccttgccttcaattctttgcttctctgctgatattaggagaggtaaaattggggaaggatcgtgttatggatgcccacttgttgaggcttctgtataaccgtgatctgcagtggcggcttgccaatgccagggcagactccactctcatggtacaaagactgagtgcagaggtatcctttctttaaattaccgcattaatgcttaataattgagtttatgactgtgtcatgt

SEQ ID NO: 22807 - DNA, 330 bp, Arabidopsis thaliana landsberg
ctatactcactaatgataataatatatgtatagacatattatgcgtgtctattaagatcgagaaaaaaagaatgttgtgtgttttgaccgttaagtgtttgtaattaatcttcatgatgaaacgaatgtaaatctatgtataccagaaatacagtttaacaaaagaattctggttatcaagcgtcgttagctcaattagtaaagactttaggcgaaacttagaggtcgccggttcgagtgacgcttgggacgaaactaatattacatgatatggtttcgggtttgagggattacgggctatgacgcagaacctcctgatattcaaaaaaa

SEQ ID NO: 22808 - DNA, 497 bp, Arabidopsis thaliana landsberg
ctagatctataatgcaaaatttgtttactttactcaagttagattttatcgataggtgcttctcgaagagaacgatggaagaaattatatctgcacttgtaagtttttcattaatatataggatatgtcgacttccgttcctaagttggttgagtttacctttgacattgcactctgtgttggttaggagagagagaccactcacgaactagatgattggagcttaactacgattcgagctttgaagaagtcttcaccctcaagccttaaaatatctcttagatcggttagttcccaaaatgtgtcatatgcaataatgggacagagctgactatgtgtataaatttcagataagagaaggaagattgcaaggggtaggacactgtcttacccgcgagtatagaatggtgtgtcatgtgatgaagggagatttaagcaaagacttggtggaggttttgacagcttttctgattgtatcttcaacctgaaattttact

SEQ ID NO: 22809 - DNA, 1134 bp, Arabidopsis thaliana landsberg
ctggtaccccgaagacacatttctcaggattgagcttccatctatatcttctcaggctgttgaaaaccagctgtaagtcttcgatgaagttttccggattctccgttttaatcaccacgtcgtctacgtaagcctccacacgcttgccccagtgatcggctaagcatgtttgaatggctctctgataagtcgctccagcgtttttgaggccgaacgacatggaggtataacagaaagcaccaaacggggtgatgaacgccgttttttcctcgtcttcttttgccaaactaatctgatgatacccggaatagcaatctaagaaagacagcacagaacatccagcggtggaatccaccacctgatctatccttgggagcccgaagggatccttcggacagtgtttgttgagatcagtatagtcgacgcacatgcgccaatccactttattctttttgagtacaagaacagggttggccaaccactcggggtgtaatacttctctaataaatccagccgcgaccaagcgagctaactcggcacgaatggcctctctcttgtcgggcgtgaagcgacgtagcttttgccgaattggcctcgcctgggggtagaccttcagtttgtgctcggccagttctcttgggactcccggcatatccgcatgttgccatgcgaatacgtctcggttatcttgcagaaactggacgagcgcgctttcttatttgtcgtccaagctggagctgatgatagtcgtcttgcgctcgtcagcaaaccccaggttgattcttttggtttcttcagtcggccgcatagaggtcgcggcctgagcttcattcgccggtaccgtgaggtcctcctcaggcttagagttcgccggtgtagaaggaaccgtcgacggcttggtggtgagggctgcttgaatggccactcggaaacattctgcggcgccttggaagtcggcacgcacagttatgattcctcgcggtcctggcatcttcagtatcatatatgtgtaatgtggaatggccatgaacttggccaaccccggccttctgatgatggcgttgtacccgcagtcgaagttcgctacttcaaaccttaggaactcggttctgtagttctccggagttccaaagg

SEQ ID NO: 22810 - DNA, 539 bp, Arabidopsis thaliana landsberg
  unsure (1)..(539): unsure at all n locations
ggatgagcattgcttttaattgggttggtccaaattttattagggattactaagtataagtgaataccaacctaattaaataattgatcagaaataaatacccacaatgtatggcgttgtattttgagaagatcatggagatatgattaccttcttgcactactagtatatcaaattgcagatgtatgtatattatttttgtatctagatctttccatgtgaagggcaagcctagtgcgttggtgacagctgtcccacttagtcgccaagttgtaacttattgaccatttccttatttaatattatggtcttagatttatttgttcttaagttgtatttgtttcaagccttgaactagtcacatccattgtaacctcaagtttataacaccgttaatttacaagacatatggataatattatgcaagttgttgcttcttcagcaagtctgatgcgtgtggctttggcatgttgctgatttagtttccatatttagcaatttagggactaaagtggnataaaatggacggactaaaaatt

SEQ ID NO: 22811 - DNA, 125 bp, Arabidopsis thaliana landsberg
tgatccaccggctttgaattctcccgctgatctcgaacaggtgtcgctctccgccgctccggagtacatttccaggtgagaaaccggcgtggcagtctccttcttcttactaatcggaaacgata

SEQ ID NO: 22812 - DNA, 2498 bp, Arabidopsis thaliana landsberg
aatatttggctgagacctattttccacatttcatggagaagttcattcgctgaatctaagtccccttccttacaaagcccatcaattaatgtggtgtatgtaacaacatttggggagcacccagcctgaatcatgtgattgtggaccctaaaagcatctttcatatgccctgctttgcaatatccatttataagttcagtaaaagtaacgctatccggctctaaacccttgcaaaacatttcatgaaatagtttaccagcctctaccatgtcgccaatctgacaaaaccctgatataatagcagtatatgtcaaaacatctggtgtaatatcccgagagtgcatctcataaaaaaacttcgatgcagcccgaatatcccctcgcttgcaaaaaccatcaataagagttgtgtatactacagtgtcaggaagtattccctgccttatcatctctgaaaaagcctcctctgcttcggctagcttacaaattctgcagagcaaaccaattatactaccataaatataagaattcggcttcagccctttccgtttcattacttcaatgagcttccaaaccttgtcaagttccccaaacctacagtatccatttaccactgtactgtaactgattacatcaggtgtgtagcccttcaactccataagcaggagtagatggtgggcttcttttattctcccaagttgacaaacaaaatgaatgacgatgttataagaagcaacattccagcaaacacccacttccggaaactccctgaatactatgattgctgttgcagttttatagcaatctttagaaagacgggtaaggtacacgttgcaagaatcaacagacaaaaccaatccgtagttcaacatcttctcaaatactcttctcgcctcacggagcaatccgaaatcaacaagtacttggaagaaaacatcgaatacacgaggatccgaaccccagtccttgtaagtgtatactaaaagatcaaaaaactgtacaaaggaatcagtaacattcaactttggtctctcccagaaactacttataagagactgagccacttttagatccttagacgccacagccaaatgaataacaatgcaaagagattcaaggttggagtctctgcgggagcgagcccaatcaaagaagtcaagaaccaacctgtaatcacacttaatcttcatcagaacccaaatcaaatgatcagttttgaatttgcattcataaggctttaaactcctcctcaaaggctcagccctacgaagcttaatcacattagtgatttgatgtacaaattcagtgtctctcactgaagctttctttggtgaataatcaggaaaaggtctcgtatcggttaaagttgagaaactgagtccacgagactgaagtgaaaagagttgaatgaaatttctgaagctagaaagagtacctctcttcatcaacaagccagtgaatggcttcttcatcgctctatcataaacatcaaaaactcaccgcgagctaagtaggtagtcgagtcctgtggagaacaatcattcgctgatttttcgaaaacccccaaagtctctgcaccaaaaaaaattgacccgactcaagcgggtgatgggtttcgacgtatgttgcaatgagattgagaacttgaataaaaatacaaactttttgtttctctctttctctgtctctgaagagaaattctgaaaatgaagggcacggcgtgcgattaaagacgacgatcgatttggggattttggttgaaacggcgtcgtatatgcgaacggtcattttaacgaacaaaacgattcgcttttgagctaaaaccacttaaaagcccattaagaatatcacttaggcccatattaaacaacacaatttcaatcattcaacaaaacatagaaacaaactcattgatgttcttatcagaactacctccttcagaaacagcctcttgagccaacactttccatttctcagcattctttctaatctctttaccttgctctccctccataacttcttccacacgtctcacaaactcttctcttctcacgaacccatcactgtctgctttaaccctaactccaactttccacacatcctccatgaacttagcatttgtaggctgatctgcccaatgaggcataccaatcattggaactcccaaactcaatccctctaacgtcgagttccatccacaatgtgtcacgaaacaaccgatcgatttatgtgtaagaacttcaagttgtggactccagctcacggtcagtcctttctcaccaatttcctctatatagttttctggaagttttcttctctccgtctctctcacaacccacaaaaagaaatgtccgctctgtttcagacccgccgctagttctatcagttgatctttttttagaaccaccaagctcccaaatgatacataaacaactgaactaggctgctttgagttgagccactccatgcattcagcgaatttcgcaccgaagaggctg

SEQ ID NO: 22813 - DNA, 804 bp, Arabidopsis thaliana landsberg
gacttttagaaccatcacccatgggtcgagcaggagagaacaagcaagtttcaagatcgaccacagtgaaacaagccaagaggaggaagtgatgcaaaaagaagaaactttcagctctcccgctggaaatactcgatcccgaaggtcgagtaaatcttctgcaagggaattctcgaattacaaggcagacatcactcgaggaaagaagcccgtggggaggaggcttgaactggtagatgaagactccaaaaagaaatggcttcaccagaggaagatgatcaaactgagaaaggaggtggtgatgatttggaatcagagaagtgtgcaactcgaaacgagtactacaagctgctgaagcgcaatgagtttttatgacttcgataccctcatcccgagaccatggagagactcggcatctatgatgatgtagactatatgtttaagtagtgcagcctgaatattcacatgtttcggccaatggaggggtatgaggaagagaccatccagtttctttcatccgtggaattcttcttatatagagagtcagaggacaatgaaatcaggctaggcggaattttgggatacttggagttctgtgagtatgacgtagagtatcggcttccaatcgagcaacttgagctgatgtatggattttcaagcagaaaagacacgagtcatcgttttgacaagaaagagctttagtcattatgggccacgcttgggtctaaacatggggtttcataaaaaaggaccaagagcaacgagataaggagtccggtggttagatactttcataggtcttta

SEQ ID NO: 22814 - DNA, 536 bp, Arabidopsis thaliana landsberg
ggtaactttttcttttcaacatttcattatggtctctttctttcgtgaatcagtgctctaaaatctctggtgggtgtaagctcagctatctccaacaaccgggaagctctcatcagtaccttctgataaggctaaagctgagttatttgacgacattaccacatccttagccttccaaaccatttcaggaagtggccttgatcctactaacatcgctttagaacccgatgattcccaagactatgaagaaagacagctcggcggtttaggagactcgatggcttgttgtgcacctgcagatgatggatacaactggagaaaatatggacaaaagctagttaaaggaagtgagtatccgcggagctattacaagtgcacgcacccgaattgtgaggccaagaagaaggttgaacggtctcgggaaggtcatattatagagatcatatacacaggagatcatatacacagcaaaccttcacctaaccgccggtcagggattggatcatccggtactggccaagacatgcaaatagatg

SEQ ID NO: 22815 - DNA, 512 bp, Arabidopsis thaliana landsberg
tgcctggaatggtatcttctttcatactcagtgatcttcttaagaaggaaggctttagtgcagccgcaaaagacacggtgaaagctaatggaataacagaggaaagtacggagattgatgttttgagtcaagaaaagctagaagaagaaacaatgatggatgtggatacgactacaccagttgctgtagcggccgagaagatcaacggtggtgctaggtgcttttcgaaggagctaagtgggaacatgattgaagaagaaggtggtcactgtggtggttgtggaggttgtggtggatgtggaggtggaggtggatgtggtggtggtggtaggtgcggtgggatgacaaagatagaaggctgcggcggcggatcctgcactggcggttccactggctgcggtaattgcggtggaggatgtggtaatatgatgaagaacaatgctaatggaaatgctccatcagtagaaaacgacgcagttacagcttgattattctaatcaacaaaagtgata

SEQ ID NO: 22816 - DNA, 513 bp, Arabidopsis thaliana landsberg
  unsure (1)..(513): unsure at all n locations
acaggtgtctattgttggtaacacatatcggtttagctgttctgttaggaaaagtctcagactgaaaccgttcgatcgggtggttgcgcccattattcgttctagaatccaaatggtcccaagaaataccatcatagtcactacggagatttacataaccaagattctcatatgcatcccatctgttagtgttttgtgaaggtctgagtaagaannnnnnnnnnnnnnnnnnnnnnnnnnnnnnnnnnnnnnnnnnnnnnnnnnnnnnnnnnnnnnnnnnnnnnnnngcaaccacactcggggctcttgtcccctgtccatcatnnnnnnnnnnnnnnnnnnnnnnnnnnnnnnnnnnnnnnnnnnnnttgttacttgaactctttccaatctcatcaacctcaatctgtacaaaagacaacaacaaacaaagttggttcctctcatccgctaaactaagacgaaagcaacttgacataaacaagggaatagtatgaagacaactcacaagag

SEQ ID NO: 22817 - DNA, 502 bp, Arabidopsis thaliana landsberg
tggcctcaatacttttcaaccagtcgtcatctggctcaacaaatttatctccgtatttaaatgtgtatttcagcctgactagtccaccttcgtcagtttctttaatggtctccttcggcatttcccatttttccacaagtggccatactctgaaggcaatgtgttcttggaccaaatcgcttgtcccaataaaagagcaaacaacactgaaggctctctggcattcttcggctgcttcattcatttccaccttcggcctccgcagccgaagcgttgccagatgggacgcataatgatactttttatatcttcccgtgatttcaagtcattcttcatgtaagaccattccgtcatccagtcgccgggccacctctttcgaaaggttggcacggggcagcttgacccagaccgggagccgaagctgtagcagccaaaattgttgttgttggaacttgctaccaggtgcaaggggatccaacgggggtgagagttgacgtaaata

SEQ ID NO: 22818 - DNA, 624 bp, Arabidopsis thaliana landsberg
  unsure (1)..(624): unsure at all n locations
ttctcagtttccatttttgcctctctcgctccgtacttagtctctgcgttactactcttctttctcatcgagcagctctcttacctcgtcaagaaacgtaacctccctggtcctctctttgtccctccgatcatcggaaacgccatttcactcgtccgtgatcctacttccttctggttcaagcaatccgacacgnnnnnnnnnnnnnnnnnnnnnnnnnnnnnnnnnnnnnnnnnnnnnnnnnnnnnnnnnnnnnnnnnnnnnnnnnnnnnnnnnnnnnnattctccaacgttcgtcttgaagcttttcaccctctaggacatccttttggcaaacaactattcggtgatcatagcctaatctacttgtttggtgaggatcacaaaactgttcgccgtcaccttgctcctaacttcacccccaaggcactctccacttactctgatctccaacaaatagttatgctccgtcatctacgacagtgggaggaaagtttctccggcggaactaagccggtttctatgcgagacattgtccgtgaactcaatcttgagacttctcaaacggttttcgttggaccctacattgacaaggaagctaggaacacgttctgtactgattac

SEQ ID NO: 22819 - DNA, 529 bp, Arabidopsis thaliana landsberg
gagggcagcgacttctgcgtctcttgcggcattattggtgggaccggcgatactgttttggggatgatgctcgatgctttcaaatatgggcctatggactgaagttcggctggcttgcagacgattgatttcgtccattgaatgcgcttgtgcagtggctagggtggcgaatcgtgcttccgttctagcctcctggcgactcaagtgatcgaggatgctctggagtaatcctccgggcccgacacaagttccgtcagtaacgcgccgttcctcctggtccgtattccgacgaactggcgggttctgctcagccagcggagtttgcgagccggaacccggcagcgggggggtttccacgctggcccctgccatttgtccttcaggggtagatgggagtgatggagccgggatggatgttgagatgtggatccctcctggggctggtgccgtcgccctatctcccgagctggagggcgttgcgtcgagcgctcccgaaggtccgcctggtgtcatcttcgtcgtgagttcg

SEQ ID NO: 22820 - DNA, 335 bp, Arabidopsis thaliana landsberg
aaccaatattaaaccgcaaaatttaaatttatggggactgaattcttgacctttcgattgaaggggatacaaaatgtgaactttcattttatgtaaactggaaaagagatgtgaaaactatgtagttgtggtgctatatgaaactttgtagggagaaggtcgttcaccatagatcttattaataaagaagagaaaagaagagatttggtgccttcaaagcttctgatcaaggccgaggatggttgttgcgtctctaggcttctccagcttctttgtcactacacaagaagagactcctaagttagggtttaggaataagtatttataagtcttgg

SEQ ID NO: 22821 - DNA, 582 bp, Arabidopsis thaliana landsberg
gaaaatagaggccaatggtgttatcttcaacacaattatcttttgtctctgcaaatatagacacgtgggtgatgcgctcaacctattcaaagaaatggaaaccaaaggaattagaccaaatgttgttacctacagctcactcataagttgcctttgtagttatggaagatggagtgatgcctctcaactactgagtgatatgattgagaagaaaatcaaccctaatttagtcacgttcaatgcattgatcgatgcgtttgtgaaagaaggaaagtttgtagaggctgagaaattgtacgatgacatgatcaaaaggtctatagatcctgatattttcacttacaattcattgctcaacgggttctgtatgcatgatcgtctagacgaggccaagcagatgtttgagttcatggttagcaaggactgtttcccagatgaagttacatataatactctcataagggattttgcaagtctaagagagtagaagatggtacggaactctttcgcgagatgtctcatagatgattggttggcgatacagtcacttacaccactcttggtcaagggcttttcatgatg

SEQ ID NO: 22822 - DNA, 555 bp, Arabidopsis thaliana landsberg
  unsure (1)..(555): unsure at all n locations
catgtggacgagctcatccttccaacttttctttatattctgccccaaattcattttattggacaggttttttgcctcatctcatataccatgtatatgttatacaattacatatctactatacaacatacttttgtaggtttacttcgtaatagcagaaaataatatattagtatatgtcttaatacttttgaaaagtgatacatcaccaaattaagtgtattccaattttgtaaaatcgagagataaatttaaaatattggaaaataaggccgaaaatagtaactgtaatggctcgactgagcaggcgaattacgaacatggtaccattatgttcgcatgtgccaacgtaaaggatatgacatgtttggtaacggagattacattattatcataaagaaatatcgatctgtctagtttattttatacgtgatattaaagttggaaagaatctgggcttaatatactaaatgcctaaatacttttgaaaagtaatatatcaccaaattcagtgtattccaattntgtaaaatcgaagtttaaaatattggaaaa

SEQ ID NO: 22823 - DNA, 567 bp, Arabidopsis thaliana landsberg
  unsure (1)..(567): unsure at all n locations
aaaccaaccaatgaatatacaaattaatggttataattataatgattttattaattacatttttcaaacaaaaacaataggaaagaaaagatgttatgagcactaagaaacagttttaagagtataaataataataatatgaacttatggtaaaaagagtagtggagtaacttcgatcgtattagtgggcatattaaacgatttaagttactattttagtaaaataattatttatttagaattatacacagttacaactatatttttaaggttttaataatacggttaaccgnnnnnnnnnnnnnnnnnnnnnnnnnnnnnnnnnnnnnnnnnnnnnnnnnnnnnnnnnnnnnnnnnnnnnnnnnnnnnaaccgtaatgaatctattttcacggttaacagttacggttattaaccgttttatacgttgtggatgtcagattcggcacacttcagcccaatccgcattcaatgggcttcaagatgagttaggcccgattcatagcccagtatgggccaggccgcttaacaggtgatccgacattaatacagaaaacggaggatcacg

SEQ ID NO: 22824 - DNA, 560 bp, Arabidopsis thaliana landsberg
acttggagtgcaagtcaagtctctccaagagtttgccctaaagtcaaaaacctcgcactttggggctcccgggtttggactcaaggcatcagcattgtacttgtcaaaattatacaaccacactaatttataatcattggccttcacgaatgctagatgaaagactgacttcatgtctaaccaatctctataagtggccttttgcatcaaaatctgaaacctagctggaggaagttgtcgtaaccaccgtgtagccggatttactacatacatggcttgcgatctcggtgaatggacgcagaaaaggccatcgcagcatccagaaacgtagatatagttggcgaaactttgagggaaattgagaagaataaaggatagaagagaacccgattccaagcagaataacctaaaaccaatgtctgcgtctggacgaggtcgaggcaatagttttaggggatctttttcagtaatcaccataaccctaggatgatgtgcatggaatcgctcggcgatctttaagtgtctctcttcgaagattgagactcgatcgtcgatctcca

SEQ ID NO: 22825 - DNA, 528 bp, Arabidopsis thaliana landsberg
tggggtctgccagttcgaatctggcgtgaccctattctgttccctctcgacgggcaaggctcctcctcgatggccaagggtacctcgggctcgggcgagggtacctcgggctcgggcgagggtacctcgggctgggccgaggcttcctcgggctcggacgtgtcgtcgatcttgacggatggttgatgtaggtctctggagaagacgtccgggggaaccgttgtccgccccaaggctatcttcgccagctcatccgtagtctcgttgtagtgtcgggcgatgtggttgagctccagcccgtagaacttgtcttccaggcgccggacttcgtcgcaataggcttccatccttcggtcgcgacacgggatgttcttcatgacttggtcgatgacaagctgtgagtcgccacgagcatcgaggcaccggacccctagctcggcagcgatgcgcacgccgttaaccagagcctcgtactcggccatgttgtttgatgccggaaaatggaagcgtatgacgtagcgaagatgc

SEQ ID NO: 22826 - DNA, 584 bp, Arabidopsis thaliana landsberg
tttacctaatttaaacataaatttatgattattcttttacttttatttaatcttatatataatttatggggaaggtatgcaaaatatatatagttaataaactattagtttttttttacatgatgtgattcaaaaaatgtaaatggacatatattattcaatcgatgaagaaataatatgtttacaatgtcccatattgcttaaagaatttggacaatagtttagagtcatactataaaaagactaaaatgattctgaatacgaatgaataaaaaaaacttgagttctcagtcgtctaaaagtaaaagtgttctgtttacttcggttctttatatcaaaaaatagaaactcttaaaaagtttcaaaatgttataaatacttaaccttaatacaacgggtggaatcctagaattggcgggtttaagtcgataataatacgggacatatactgcgggtgaaattctagaattaacgatcaaaatataattatataattttaaatactcatttaaaataaaaatgcatctcaattgttttttagaaaagttcaatatgataaatatttaaattctatattacagatg

SEQ ID NO: 22827 - DNA, 535 bp, Arabidopsis thaliana landsberg
tgacacttcacgtctggcacctccttagagaggctctctaggtcggcaatgagggcctcggactcggcgagggcctcggcgtactccatgcactccacgtcgcattcgaacgcgtgtttgtacgtggggccgacggtgatgaccctgttggggcccggcatcttgagcttgaggtaggtgtagttggggacgaccatgaacttcgcgtacatggcctccccaataccgcgtggtaggttcctcggaacccgaccacttcgaacgtcagggtctcccttcggaagttggagggtgttccgaagcagacgggaagatcgagttgtccgaggggctggacgcgcttccggggatgatccatggaaaggcgcacgccgcccggaccgaggacagatcgatacgcagaagcccgagggtctcggcgtagatgatgttgaggctgctgctccgtctatgaggaccttggtgagcctgacgtcgccgatgacggggtcgacgacgagcgggtatttcccgggctcggcacatggtcgggggt

SEQ ID NO: 22828 - DNA, 828 bp, Arabidopsis thaliana landsberg
agtggagaaacttaaataaataaatcaaaacagagccaacaacaaactttaacgtatccaaaacagaggagatggcttcaaaccaagttatgatgggttcttattagtcctaaaagagttattaaagtttttttagaactctaaaaagtttcgggcttcttaaaaataaaacacagaaatgataatgataaagattttctgaccaattgtccctctattaaaatcactatttgcttattctttaactatataatctgaaattaattaaaatcatttgatccaataatcatgataacaaaattgtgtcacttttctaatggagtataaaataaaataatagttgtttctcttctcctaagctactacaactacaaagagaagatctcgtgatgtttccccccccgcgctccccccccccaaaaaaaaaaccaaaaaaatacagagctaatggttctgcttccatgggagctggaggaagatatactgtctcggcttccacctcgatctcttgttcaattcagatcggtttgcaaacgatggaatgctctttttgatgttaaaagtttcaacaaggaccagttcgctcgtgctcgtcctcagttcatcttcattaccgattccaagatttattcgatagagatcatcggtctcgacggcgttgatccaacgattaagttacatgtgctagactcctctggtatcccttaccgtgaatggaaatttgcttacttaaccatcactgcttgcgatggccgatgggttcttgttttgtaactcttggattagtcccaaggggacagctttttggaatccgtggttgaaaccaga

SEQ ID NO: 22829 - DNA, 264 bp, Arabidopsis thaliana landsberg
gtatgatcctatgttgtcatcgttcacaaatgagggttttcttatcgaggcccgttgtgtagtctccttgggcccggacacaaaggcggtaacctaatttataactaattcctttataaaaaagactaaaggtgtggaagtaaaaccctaattactatttattgaaacaatgacgaagatatttcggatcttcctctggatttggcagaggaggtgctctctagggttacggccaggcaaaaacagaagcatgcttcaaactct

SEQ ID NO: 22830 - DNA, 1591 bp, Arabidopsis thaliana landsberg
  unsure (1)..(1591): unsure at all n locations
gtaagtactctctggtaataggctaagcgtccttgtcaccgacatcgtcttcttcatccatatgattgttattgctagaggaagaaggtttttggtgtgtgcagaccaatgagagtaatgccaaagctataagcaaaacaagcaaaaagagaccaccaaagagatatggtactggtgacttccagatttctacttttggtgtcggcctcattatgatttttagtagtctcttttttcttgtgttgtaagtgcagctatggaattttagttatgggcattaaggaatttatagtagaaggtttgtacaaaattgatatataatttttaaattaattgattactaagaagtgtaggcgtattttagtttaaagtgaagtaggaagattccttgtgcgttcagatattcttttcttttattaactatatctgttgttgtttattgttcatgtgtcatgtcatgacgacattacattagttcttcttacttattttttccgacacttggaaatggaaacaatggtgtgcatgaaccaagatataaaaacggtatacatgcatgcaaatgttattttttcgttattataaattaacataaatatgtgaaagttcatttaggtatatatgaatgttttgagtttaaaacattatgaaaaataattatttccaatatcttaaagtaaagcttagcattagttctaaatatataaaaaaaacttgtaaatgttaaaggtatttagcgaaaaaaacattattacttctacactatttagttgtagtgccaaaaaataaaattagataataaataataaagtatctttatcaaaaaagaatttccaaaaaaactttcccgccaaaatgttttcggggaaattttttttgtcaaactttttccaccaaaagaaaaaaattcatgatttacaaaattaggaaagattctaagcaattaaggaagggtttcacaatattcataatatttatttttgtgtagccttttctgaattttctaaaatctttcctgaattttgtagaatctttcctaaattttgtgaaatccttcccgaatttcgtagttaccttcctaaattttttggtgagaaaatttgacaattttttttttgcgggggaaatattttcttttatttatttattttaattaaattagttattttatatttaatatttaattaaagttaatagtgctctttgtggaagttttcaaaagatattctatttctgaaagaaaaacttgttcattgctatttttgtcaattcccctaaaatatttgatgtcgtttttatcttaacgactaattttaaaaaatagatttcttaactttttaaattatgtgtatacataagtctatataacagatgttagtcaaccgttaattcatatgattcaacggaaccaaacgacattatgtttggtagtttgagtaaaaacagaaaacatgcaatgtcgtctttataacttttgggatttagggactttgatttcatttagttatgttcattttttaagcgggacatagaagcatcgagtanatttcatatttgcttttgtcacaaaagggaagtcgtgaatgggact

SEQ ID NO: 22831 - DNA, 583 bp, Arabidopsis thaliana landsberg
tttcatgttgtatcattcccatgttcaacttttccattacttgacatagggtggtgtcagaggtccttactgtaagacaatgacaggaagctttgtgactcagtgcatctgccaccacattagcttttctaggtgttagtggatttccaaatcataatctttaatcagctcaagtcatctcctctgcctcatgttcagttctgactgggtaaaaatatatttcagacttttatgatctgtatataaatggcaagtatttcccagcaaataaggacgccatatcttaagggcatgaacaactatagctaattccaaatcatgagttggatagagcaactcatgccggcgcagttgtcttgaagcataggctatgactcggccctcttgcattaggacacatccaagtccacttcctgatgcgtcacaatacacatcaaaaggcttctctatgtccggttgagccaataccagagcagtggtcaataacaccttcagctgctcgaaagcgtcattgcatttcgaggaccaatcaaacttggtgtcattcttcaataaacctgtaataggtttacaatcttggaga

SEQ ID NO: 22832 - DNA, 623 bp, Arabidopsis thaliana landsberg
  unsure (1)..(623): unsure at all n locations
ctctaaacatatcaaaatgtatatctaaacaagataaacaactttaatcaaagaactaaatgcataaacgaaatagattaagagtaattaaggtttcaagattctaaaacacaaagaaaaactacagaataaatgatttgttccttggaaaaaccccaaagtgacatatttatactaaaatctcgaaaacaattcactagaagacaagagacttgaggcggtttggatgaatactcgaccttggggatcaagtatcagggtgctacaaagactacacctttgcctctatgctcagagtgatcaattggtcgagtagttgcttcttcctcttctcttcttatgcccagctgtctggttgagtggggaaatgaggagaatctgaatgcgcnnnnnnnnnnnnnnnnnnnnnnnnnnntccgttcgccttgatcgagtgaaatgtcgagtagagggtcgagtgattgtctgctgcttcctctggttccctccgaggcaatagaataactgcttctcctctggttccctctggggctatgaataaattgtcgagtagctgctctgttgcttccctatgtgcaatagaatctctggttccctctgggcaatgaatactggttgagact

SEQ ID NO: 22833 - DNA, 434 bp, Arabidopsis thaliana landsberg
  unsure (1)..(434): unsure at all n locations
gaaagagacgcgcggcagccaaaaactacacatggaggcaccatagcgggcccgccagtantcacgttctatgaaccaaaggacnaggagccgaagtccacctagaacaagcaaacgccccgacaacgggacagaggaagagcgaggcacaaggccacncctcgcggaacacgagagagcagacaaccaaaacagagaanccagcgcggcctagggaggcagaaccnagcagactcgaagtgcctgccccgaaaactgaattagacgcgatgcaaaaccgaagcaggagaaacaccgggacaagcggcaggagctaggaggcgacacaacaagaagaaaccagcgggagacgctaccttgcccactagcccccgcagccaagaacgagagcctgaatcaagaaacaaatggaagtccgatcacaaagcacaaag

SEQ ID NO: 22834 - DNA, 512 bp, Arabidopsis thaliana landsberg
atcatgattgttactctagggtgagataagcaaagtggttagaataagataagataagataagataagataagataagataagataagataagataagataagatagattttttttaagataagaatggatctatgaggctagatatattttaatggggataatctaggttgtttagttatgaattttatttatgtctatatgtatatgcatatgtaattgtggacattactccacaactcatcacactcaatcaaagatccaaatcagacaaatatcataagaacaagcattcaagtctatagataactataaaaatagttttgtttttgttcctaagagtaggtctcctattcctaaagtcactttaggcacaggatttcaaagtgtgaaatccacatttgtatttagaatgaaaaggtaagaataatcagagtaaagcggaaatagatgagaaaagattaagacaattttagaaaagaatcagagtagcaaaggtaagtcagtattggt

SEQ ID NO: 22835 - DNA, 580 bp, Arabidopsis thaliana landsberg
caacccgaatctaaaaatagttttgtaaaaatcttgagaaaaacgatgagattcgggttcagattttttcaaaaatagttttattcgtgaaagatttaaattcgaacggagattgtttaccggccattttaaaatattttttattttctctaaataattttaaaataaataattataataaaaatgaaaatttgaaatttttagacaccataaactaatatgttaataaaattattttatccaaaattagaaaattaatgtcatataatctaaaaaattaatagttaattgagatgataagagtaaaattgaaattttatttttgttgtcagatcgtgagtatgaaaataacaatatttaattgtttgaatatttaaattgcacaattttattatttcatgtatttttcttcttagaaaaaacaattgggtattaaacgtttaaataaaaattagttgaagttttttttgggtttttacccattagaaaactcttccttttcatttatttttacttctagtagtagaagtaatttttcttttttgattaacaaagtcgtgaggtttgttagtagagacta

SEQ ID NO: 22836 - DNA, 635 bp, Arabidopsis thaliana landsberg
  unsure (1)..(635): unsure at all n locations
gcattaagcatttgcatatttatcatggagcaaataatgaattaagattgccattgtgatgctcaccgttattggatcttcaataccaagcatccccacattgttaaccaacagatcaccatattccccaatgcaccataccgccactcggacaagggtctcctggttatcatctcaacgaaaccatattagaaagggttacaactgattgaggactgagcacaatctaacattagaaaatagctacctgttccgaataagtcaagactgctttgtacaaggccctaactgtatatccatgaagctctgatgcattgcttatgacaacaataagtgcatgccacacatcatctttcacaaactttccagcctactaacatggaatagatgacaataggttatgacagatacaaacaatgcatttgaaattagcttaagcagatacaaactctcaaacgatttcaaagagtgcaattaactggtaacacgttacagagcatattctcgcgtttgaatccatacctcacacagaaccttgagcatctgatcaatgtaccatagtttttctggagaaaacctacattatcaaaaaaattaanaagtcaacaaaaacttcaatcaactagacattcaca

SEQ ID NO: 22837 - DNA, 611 bp, Arabidopsis thaliana landsberg
  unsure (1)..(611): unsure at all n locations
taccaacacaaatcaagttcttaaccgttcacatcactcacaaggattttaacaacgaactcctccaataccaggcagggaaagttatgtctaaacttaaaacgaattaaattgaaacaagtctcccccataaacagtgaacactactcaactagtaattagtcaacaatactcatcaaatgatcagtcaactatgaacattactaagtaatcagcagttagtcaaactcccccacaatcaagcattctataaacaagactcatctccccctgcttgagtgcacaactaagttaaaaacaactagttacagaagatctacatcaagataagtagttagaaacacttacctgatattaatgtatcgngaaaacactttgatgaccaaccacttctcagactactgcagccaaaaccgggtttgatttcaccagccgtgtgactcaactaaaagttatataaacggttagcttgaatttccgaaaaactgactaaaactcaaatcattcaaaatgtaaagtctaatacacccctataagtcttctaaaactcaatgagattttaatacagtgtatctactgaaaaaggactaaanaaaaaaaaaatttaaaag

SEQ ID NO: 22838 - DNA, 561 bp, Arabidopsis thaliana landsberg
  unsure (1)..(561): unsure at all n locations
tattactcatatgactcacatttttagtatatctttctagttattaaacctaaaatatgggtctggctagggggtttccctaataagaatagttaattaggtttttgccgtcaatatttttctttcaatcttcttcttccacttcttcttcttcgtcgatatacccaaaaccacgatctcgaaatcaacttctctgacaacaacaacggtggcaatatcatcaggatttggcgatttctctttgcccttggtgagtgatttgtttcttctcttatttttccctttgcatgtctcttattcttcttctattttctatcggattgaatgaattgaatgtttggcacttggaaagtcattcgatggattgtgtgatagaaacatacaagccctggggatcaaactcggtgcggagatgtttgatgaactaggagagtttgttgggannnnnnnnnnnnnnnnnnnnnnnnnnnaatttcagatttctctgtggtttgagcgtttactttctccttcacctcaacacaaagccgagcagtttttttttcatttgccccaaaaagc

SEQ ID NO: 22839 - DNA, 671 bp, Arabidopsis thaliana landsberg
ttcttttgactcttttgcttcattgtaatcccaaggcttttcatttaacatcatcaagagatactcactttcaatattagcgagcaagacgtagatagataggcggtttctactaaaatgactgttgatttagtattattagatatgatatttgtgtgagttttgtgatttatggatcgcatgggcaataaagattgccatcatagaatattttgttgttcacgtttccgaaaaatcgtggcagatgaggatatcattttgttgctcacatttcttcttttctaaagttatgatatcaatttggattttgttttctttctaaagtagcaagaccatgttaatctactaatatggcatttgctaaaacaacatagtcacaggtctttttttttctttttttggtaaaaggttaagttttataccatttttgatttttgacagaattacagagattacatgaaacagattaaagcaatctacagaaaataaatacaacattactactcaaattgtttcggatcgcttctaagcgttcaagaccaagttacgagatgaaacacctgattccgaactcgcgaaactcggaaatttgcgtggttgccacagaaccaaagcactggaatcctcatcttagttgccacgagctaaactactcgaggcccatccacaaa

SEQ ID NO: 22840 - DNA, 515 bp, Arabidopsis thaliana landsberg
  unsure (1)..(515): unsure at all n locations
gacttccgggggccctgggcacgcgcggaccgttcggccgtcaggcaggaaaccctggccctatcccaggtcacggaccgtccggcccctggtcgcggaccatccgcgcctatgcagagagcaccgccgccggttctcacgtagtgattggcgcccaaaaaaggcaccaacacacttttggcgactccgctgggaagaacacatatagactcgtcaaatcggccctcaatggccggttcaagggatagctctgacatctccccagcaatattatagagccgacttgggagaccttgccggctgacgaacaactcaagttcgaggagcagctgatccaagaagcgaaggcaaaattcctagccaacttcaatgtgaacaggaacaacaaggtctttcggcaacgggcgactgatccgacttcgctccgatccacaccagattttcncaatgtaagtaacaccaacaagctccaatctcttaaagcttacatagatgaagaacaaatgcaacatatc

SEQ ID NO: 22841 - DNA, 538 bp, Arabidopsis thaliana landsberg
  unsure (1)..(538): unsure at all n locations
taatagcatcatgagtacatttgttgtttggcgagagttttctttcataaggtacgggcaatcaagtgaaactgtagaagacctgaggtggtaaactccaaagtttattttatcagatcttgaaatcaagcaacacagaatttccataaagtcctcttgccatgtaatgactcgtgtactcagtgacggtagtgtctctatacttgggaaggttttgctcagacaaaagttcttttatcggtccataaactcgtaaactcggtaaaggatgcacaaagaaagatgctactgagatccgcggcttttcacctttattagccagaactctatgctctacgctcacaaactgatcattggtcataagctacaannnnnnnnnnnnnnnnnnnnnnnnnnnnnnnnnnnnnnnnnnnnttgtatcatgtcacaataacaacttgcctgtaaaagatctccgaggttaacgagaagagctcccggaacaggaggaacatcaacccaataaccattctgacgaacttgagcccaccatgtgatc

SEQ ID NO: 22842 - DNA, 561 bp, Arabidopsis thaliana landsberg
tattatactagattttaatctaccgtacaccgcaggactattttaataaaaaaagattaaacatttatttttttaagtagattaaaaatatatatgctttatgttttgtattttctaaatatacaactcttctgtttatatatttttagtgtaaaattactatgtttgatttttactgtttaaaaatgtaggaacaataacatacagtacattaaattaaaatctaaattataaaaataatttaaatttaataatattttttaatattgggtcttttgtttagggtttaagataatatactctaattttgattattatttctagtatttcactcgcgatataccgccttatattacttactatctacccaaatccgtcctaccatctaatctcaaaaaatagtagttactacttaccagcgaacattcaaaaaaaaaaagaaaacagagcatgacttgttttaaagtctctaagaagaaaagaaggaaaaaattcatataattggacagcgcgttaaggtcacgattagaatacgttgtttgggaagatgacaaattcata

SEQ ID NO: 22843 - DNA, 5322 bp, Arabidopsis thaliana landsberg
taaaaccttaaaaagtggatatgcttcagaagcaattgttataatatttgttcaattcatggtgataaaatgttcatttaattaaagtcatttttcaagtgcaagaatggtaatgttagcataatgcatccgattgatcaaattaataagaatagtggtccaaacttgctttagaaaataaaatattacagccaatgtatatcatctttgcggataaagagttggtggatataaacatagaaatcgtatgaatcaatcacaatctttctttttgatgaaattgataattcagtgagctatatcgtaagaatttggctcaacacttactttcgagctaaattaaaattgtaaactgatcgaatcgaatgcagaaagtctaataattagtatgtatcagcatgtattaagtctgattagatgcgagactaaactattgttcaaaagtagataatgaataacgcttacgataaccatccacgatttctaattgataaattaaatgtccacataaatatataacatgttatgaaaatattcatcacgttatataaattgcaattagatcaaggtaaaatggtccaaaatatattttaacccatttcattcattagactaagaaatctattgtcatttatataaatattcattcttagactgcaaatactccattttaaaaaatgttatcaatttcaatatttttcagtctaaatcttttgccatatatatatatatatatatatatatgtattattgaaataacaagaaatataataactgaaccaaaatatattacagtattgattaatatctttattgtcacttatcttttgtctcctctaaaaacaaatttgtctctaaccaataaaacaattgtatggtaccactaaaatattccaaaatattaattggacccaacgtgtgtatcgaaaataatttaaaagagaaaatgttctagaatctagtggaagaaaataactcaccagaaataaggaagaagaaacaagagatatagatacattgaacctagacataaaacccacccaaaccccagtctcaaagacgcctattaataaggaacgttcaagaaccaaaacaaaacacacaaaaaaaactcaaagtgaccaaaataaccaaaaggagaaatcttgagaaaacctttaaaaattcttaaaaatggggaaaggaggaaactatgtgacggtggcggcttccgaagtggacgagctacgacggaaaaatggagagatggagaaagctgtggaggagatgaggaaagagatgttgcagttgtggaggaggacacaggtggctgaggaggctgaggagcatctttgctctcagcttgccgagcttgaagccgaatctttagaccaggctcgtgattaccacactcgcatcatctttctaacaaaccagctctctcgtttctcctccgactctgcctctccctagaatagatatttgtgtaaaggataggttcttagattgttggatcatatatgtatcctcaaattggtttatatcattgccaaatatgtagaggtttttatttttgtctaaatggggaatttctccttggaaaatttcaatataaacaaaaaaaaatcattgttgttactggctcatcttgggattagtcgggcgcttcaacaaaatccaaatatcacgtagtaaatctttaaaaacaatcgatcttgttgaaaataaagcaaaagatattcgatttttggttagtaataactcaaattttgtttaaaagacaactaaattccttttatattttgaaagcaattaataaaaaaaatatgtttctcttcttttcatatcccatttgttgaataatctagagtaattgaaataacgattagtttgatcgtttatttacaaataaagattttagtgttcctagattatttagggaccatttcatccatgcgtcttccgttgaatcgttgacttctctgcccatgcaacattggttttcagtctttgtagagtttgatgacgtttaaataaaacaaaatatatgcattttattttgaaataattctaaattttctaaagaaggagcttgacatcgagctggaagcttgtttcttatcaaaagattcggcgacctataaggagctaatgtgatctttaccagaaaaaaattcgaaaggtaaaacccaaatagaaagttgtatatatgcaattaggctccttctccttgctttttttttttacaaatcccaaaacatttactagattttttttcttcttctttaccctactttacctagagtcttttaccttttcttatcaatgaatccaccctttttttttcttttagacacatcccaacccaaagtataagcgtccacctagtcctatctagtccggataatgcgatctagaactacatgagacactatctctgtcgttacgaacctaacactttctaccaagcttaatcggaataagacctcacaaacactcacaagtgatataggcttgaaagaaagtttaggtttgggttcgggttaactgctctaataaggagagtcagctacttggattaacaagagtgatcaaaatgaataagaaaatccaagtattttagggtatccatgagttcaaatttgatgcagacatgataattaaagatcagattcaggttcaaattgatagggaatggtatcagatcacgacagtgtggtcgagtaaatcaatctaggcatggtttagttttatttcaaattcattgactacgcaacagacaattagcaacgagggcactgagtttatccggtgaatcaaaatgctttcaaggctatctcatcattatcccctatgcaaatgcaacaatcctaaatgcaagcacactatatacaatcctaaatgtgatgcaatctacatgaacactcttttttttttatgaaatcattttctgaaattttttacaattttttttggttttttctatgccttagatgaatgcagactcaaaattatacacaatgcaacacacacttcctgagccctcccccaaacttaaatcacacagtccactgtgtgaataaacttggaagagagtactcaggacaaatccaatcacagaaacaaaaaatgaagaaacaaatcacaacatacggtataatacaatggtgaagtgaggcgcttacctcagtcgaagaatgaacgtagttgctcgtcaatggctgcctgcgattgctcccaggccatagacgaacctccttgttctgtatcagctccagcaggtgggtactcgacctcatcagctctgtggcggccagcaccgctctgaggaaactcgacctctctccttctgctgcggccagcaccgcggttgcgtaaactacgagactgcagaagtcgtccgctcctgctgctagatcgagtgagtgtggtcctcctcttcctcccagattcacgaggctcgaatgatgaatgcctcgcagggacatgcggaatctcctgctctctaggctcaggcctgcgccgacttggctcgggcgcgtcatatctcctcgaaggcatgtcatgagggagatgtccctgcggaatagctgtagtggaagaggagcagatgatcttgtccttcagaaacttgatagccctgaagcacttggcgagtaacttgtcctgtttcatgcaccacttctgcagcttgctgttgttcctgtgagcttcgcttaaactcctgctttccctcgcaggaggtatatgctcactgaaatgatacatgctcgtgtcaaattccgcctcatctatatcattcgtctcatcaatatcttctgttgtagctccttaggtatgactgatctcctcagttggcggactacccgggaaataaagttcttcaagcgaaagcttgaagccaatgttcctgccctcaagaatcctagtagcgtcaatgcaggagagaagaatgttggcgattttaatcgatgaatgctcgaacctgtagcggtgaaagtcgccagccatgtcaaactccaagaactcacatctgcgcaaatgatccaagtccatcatcctcggtgctaaacctggttccttgagcggtactccacaagcttacagaattggcgtcacaacgccacccacgcatagtgctcctctcaccttcttctttccgttcgtcaacgcgcacttgctgcatccacacagatggatcaacagaggcattactggtggtgcgttgttgagatcgccgctcaagacattctttcccttcgtccggcggagaatccctgtaagcgcataatctatcatctccatgtccgtgttagacacggtgcctgtagactccctggagtaaaaaacgttggcgaccgatcgctggaagtagcggatcacaggacttcggatttggttgctcttggaccgcgccgagtttagcggtagattgttccctatagtggcccataaatccttaagctcctctctgtcaaatctgggtttggttccctttccactagggaaaccaaacagtccttctaacttcttgatcgaaagctgataccgctgttcattcactgagaacgtcaagaagcctaatcccatggtatccagctcaaagtctgtgagtgcttcatacatctccacttgcagcgtggaaagaaactcgattgtctcccccttataggcatggtaagggtaagacatcagcgtctccagatgacacttctcgaacacatgctgcacgtcctccaataactccagctgggccaaagtctgataacaggggtacctcgttccccagaagtagttcaccccgaaaagtttgatgtactcctccactgtaacttcatcaggcctgttcaacagcttcgtctctctgtgccatgacttaggctcatactcgacgtcaatatcttcgtcgatcaactcctatctgctggtcattgctctctttcctctagcaatctcagttgtcctctcattgcgtcgagctactgagcgttgggtctcagctctgaagctctcataagcctgtcgctctctctctggtccagttgaccaaaattcagctacatcgacgttgtaatccgcatccatggaggattcgccactgtagttactcatattgatttcctgaaaaagaatgtaactcaaagccaaatatcaatatgttagtctaaataaaacgcaaacactaaaccggtcaagtacgcggtcgagtaatacggtcgagtacagtgaaattgtggcttcggtcttttgttcctagaaggactatggtcgagtgtttgcggtgcgtctggcgaggtcgagtaaacttctccgggaaacagtggcggtttgaagagcggtcga

SEQ ID NO: 22844 - DNA, 404 bp, Arabidopsis thaliana landsberg
ttttttccttggagtgggagctggggagcgagtgtgtgccgtctgctgctgctgacgtggcctcatcacccatctgcctgcctgctgctggaatcccctgctctagttgtgagaaacaatcctgaacctctgggcctgagcagatggtgctgccattggtgcctttctcttcttctctacccggtgagctacaatacagtcctcctgggaaatggctaggttgaccaactcattgaagctatgggcccggacagtgttgagacgttcccgcagcttggtgttgagacccctgcggaagcggtctctcttcttctcatcggaatcagcatgatagcctgcatactggcacatgttattgaaggccttagcatactgcaataccgcgtgggttccttgactgagtg

SEQ ID NO: 22845 - DNA, 498 bp, Arabidopsis thaliana landsberg
atagtttcatctagggctgagaatatagataactcatttggattcgggttttagatatcttactatatcatttaatgtagttattttgttaatttataataaatttaattatatttgaatattttttacaaaattttgacaaataggataaataatttttatatagtttagttgctttgggtatttaggtttaaaattaattgagagatttagatttataattataagtttagatattagattatcagtagcacaaatataatttaatcccttgtatatttactatcctctgtttgcgttactggttttcctatacgccttggtcttttccctcctatgctctcttccctttgcatcacacttatcctctttacctctcttacttcttcccttctccctatttaattataccccctcctcctccttccaatttcttctccctacctatcacttgctctcttcctccttatctttacttttttttccattccctcctat

SEQ ID NO: 22846 - DNA, 662 bp, Arabidopsis thaliana landsberg
gaatcttctcgagatcatccttgagctggtcgggaaatggtaccagaaactttggatagcaattttaaacaaaaaaacacactagttaaaacaaaaaaaaaaacagaagcatctcaacaataaggcaaaagtaacgagctcaagctaacgggtgaaagtgtcaactctgaacagattgggatctagggattctcaacactcctctgaaaccctaacaaagaaataaccgccaaatcaatcgtaggttttgctcttaccctcatccacttgtctcggggtcgtacctttagagaaacgcatgacaaatctgttgtcgcgtcttccacacgcgtggactccagacgcgcacgcctaagaggtttggtccttgtcagtctccacgcaccacgtaaccgtcgaacttcaagcaaaatcctaattcacgcgagcgggaaactgttaggggaagaattgggtgttaaagttcgctcttaacaaaaattacttataaaaaacgatagataaatatttattttatttattctataactaatagtctaaactataaacacagtttcttctttgttaacttttagacacactttttattaacaatccaaatattaatttcttatcaaatgaatttggcgatgttcgatgaaatatcaatacaagatgtatta

SEQ ID NO: 22847 - DNA, 469 bp, Arabidopsis thaliana landsberg
  unsure (1)..(469): unsure at all n locations
gtctccggcgtgnnnnnnnnnnnnnnnnnnnnnnnnnnnnnnnnnnnnnnnnnnnnnnnncgtcgtcaaggctgtggccatcgtcagagtcgccggagaggcagtggtcacatgtggacatgaagtcttgcatggctctgggatcacagagtttggagaaatcccaactgaagtcggggtcgtcctcttcctcggaacccgcgggtccggaggcagaggcgaccgtcagtaggtcccaagttgaccacatatggtaccccggaaggtcaggatatgcccttgcgaaagtgctcgccgaagtggggttgcctggcagatcgaagctgaatctaaaaggaacaggatggaaaaccgatggtacctcctggttggtggatggtggagacgttgcagtggagatggaacgtgtcgctatctcaagcgcgagactaatgcccgacaagtccctcgcacgggtgctggcgtcatc

SEQ ID NO: 22848 - DNA, 1233 bp, Arabidopsis thaliana landsberg
agagcacaattattttagtacttttttgtaaataactctaaaaataaaaacattttggttaaaagtggtaaaattgaccaaatttctttaataatattggattaaataatattttacataataataaaagttaatttaaaaatacgaaaataactatgtttataatggtccatttcatactcatagtcattgataaaaaactgaagaaacaaaataaacttaaaactaaatttcactgaattcgaaaaatagatatatatatatatatatatatatatatatatatatttctacgcaaaatataaagaaagagcccgttaaagcccaatttcctaagcccaattagtgaatctctcaaaaaccctaaaaggttcctttagtctctcttctctacttctcacttctcattttgcgccactcaaaccctagaaggcaacaaaggtaaaaacaatcttcgatctctttcacacaattcctctcttcaatcctcaccgatttctgattctccggtttcatttctctcaatcttatcagtaaaatccgacgaagatggttgcagtgaagaagacggtatgattctctccgatctaatttcacaatccatgaaatttttggtgtactgatttttgttgaatccatgtcttgcagaagaagtctcatgaaggaatcaacagcagattggctttggtgatgaagagtggtaaatacactcttggttacaaatctgttctcaaatctctttgcagttccaaaggtattagaaaaaaacttttaagttagcttattcataatctattggtgctttattgatctctttgattgtgttgtaggtaagctgatattgatatctagcaattgcccaccattgagaaggtcagagactgaatactatgcgatgcttgctaaagttggagttcatcgctacaatggcaacaatgttgatttgggtactgcttgtggtaaatacttccgagtttcttgcctcagcatcgttgatcctggtgattccgacatcatcaagacactttctggagatcagtgattctgattttgatgattctgcccagctgtcctatatgcttgattatgctttgtgttcttcaaagacttaatggtagaatttcttcggtttcccgacttcctcttaatggttataattaattactacatttttcgtctttgttgatatgattcccttacccctaaaaaaggcattgacttaccctttttatt

SEQ ID NO: 22849 - DNA, 317 bp, Arabidopsis thaliana landsberg
gaacctcagttggatgttgatgatcaatctcaatgtggcattttcggggcacgtgacttgtccggttatagagcgtcttgggggcgttacagaccctgtaagtgttcctcaagaaacaattctcaacacataatggtcaataattatcatataacaaggtcccagttccctactggttttgactcaataaaacattactcgataaataagaaaaactttttgttttgttagaacatatcagtgtaaaaagtggaaaaaagtttcaaatcaccaaaatagagagtagcacaagtagtaatggattcattaaccccccc

SEQ ID NO: 22850 - DNA, 484 bp, Arabidopsis thaliana landsberg
ctttgcgctatgacgaaggacgatcttgcagataggcttgcgtataatagcctgaaggtatgagaactgcgtgtttggaaattttataatttgcaaatcattcttttattcttataccaactctttttacatatagggtttaatactaagcaacgcgttgagagcgcaaaagaatgccgaagacgagagctatgatattgctttcaacaacctacgatcagaggttattaagctgagaaacgaagctctggaaaaggataaaattctgcttacattggtggacaagataaaagaggacgaagctacctctaaggctcaagctgaagcccaaaaacgcgaaattaaagatcttcagaaacagctagctagagctaaggaggagcgtattcttgaagagacaaaacgagagcttagtgatcaatgggccaatcatttagaaataaatgttaaagagcttcgtgcatcccagagaagatgctatgat

SEQ ID NO: 22851 - DNA, 2955 bp, Arabidopsis thaliana landsberg
  unsure (1)..(2955): unsure at all n locations
tcatcaaattagtcctacgtaaaaaggaaaagttttgttggtgaccttaagagttgggttanatttagtgcactaagggcatttcaaaatgataaagagacatatcaacatggggttgtcaactgtaactcacatatcaacttcattgaaagttgtcagcaacgcaaaagtgttctgagagtctttcaacctagttgccacccgtttgcgaagtcttgtcataggaacctgcatcgatgttagatgatatcatcaaatcttgtgaacgtaaaatgcttttctttcatagagaaaacacacggagcattatataagtaaagaataaatgacatagttttcatacccgtctttccctatccttaggtggaagctgcggttctttagctgactgtttggatggcggtggcggtggcggtggcggtgatggtgccttgggtttctctgcaactttggtactttcaactttgggcttctcagcaggaggagaaggcttgggagcaggtttctctggtgccttttctgagggtgccacatgagacacagcatccgcagatgtagaaattcttgcaaccttgtttcctggttcaacagtatctccttccttgactagaaactgcaaaaaagaaaaaagtaattgggcataggaacacaagagaagaacgacaggaacattaaagtacacaaatagtttacctcttggatcacaccacttgctgggctagcaatatctattgtaacctaaagcacatagatgaatcaaacactagtattaggaaagctacacaagatactgaccaacatctattggaatggagataataagataagtaattgtttgataccttgtcagtttcaatttgtgcaatagcctcatcagcttctactctatcgccaggttctgcaagaacaataagcacatacaatgaaaatattagatacataaatgcaccggaaagaaacgagcaagaagataatgtaaagaaaagcatactcttcagaaaggcggctagggtgccatcagtgattgattcacccatgtgtggcacaacagcttccacgacatccccttcaatcacatatacaaaaaagtgtgagtcaaaaagcctagaaatacaagttacaataacagtaaagagcaaatccaattaacccacacggatcataagactaagctctggtgttccaaaacatgggacagaaaaaccaaaataacttgacataaagggaaaagtttcagctagagcaatcataccactatcagatgaaaagggcctgacccatctttgcagggctgtgccttggtaaccgttgataatagtcctacacacatgaatataacactttcagcgaaaatggtaagagaattgagtcttatacatgaacaaaaggactgagttaccaaccttgaacagtctggacaccctgcaaataagagaacaattgtcaagttaaagatcttaacctagcaaaacaacaaaaacaacaaaaaaaggtagtaataataacctggacaagaacggtgatggaagctatgagcatggtttccacgaggcaccaacgtctgtacaattcgtaatgacagttaaataacttgttcatggaagaagcatatagaatcaactagttaaacacatcctaagatgattgaatttataaatagctgtccacagaaccaaaatcaagcatgaatcattgaacaaaaaaagtacctctgttgctgaaacagaatgaaattgagcagacactgcaacacgagaggattgcaatgattttcccaatccctgaaacagagagagagatcaattagataaaaaaaactatgacatcggagaaaaatcacatcaaaatggtaacgaatcaaacactaaccgaagcagacgaagagcctgtaatggaagctctgctaaaaacagcacgcatcatcatcgcaccaaatctctgtaacaacaagatgtcggtgagattcaacactcgtaatcataaacgcaacacaatcaatcaaaaatcgtcggaaaatggaatctgttcatcctcaacactactttctcaaaatcagaaacctaaatcctgctattatggctttcaaaacataaaaactgctcagattcgtgactttcagcaacaagacgaaaatgaaaacaagagaaaaccgaggaattgaaatctcaccgaagaggtggagagaaacttgagcgccgaatgagaaagttagggtttgcagaaattattgaaggaggagagagatagacagagagaggaactggagaaaagtatatgacctttctctgctttgagcaagtcacgaaagaatatggaaaattcagaggattttacacgtgtcttatttccttgtgtaaaacgaataatatgaacattattattataagatctctgattattattacgcttctaaatttggattcagtaatatgaactctcgaaaacgtctgcgttttagtaacatcaaatagtccataggcccaacggcccatgttattttctttgagaaatgtttttttttctttttttttgccatcactttgagaaatgttataatgaaacaatttacttacagttaccaaggaattgatcaaacaacaacctaaacattaggaaaagtttattgtgggaaagtaaccaactctagagagttttgatttttcttatgtatatcttgtgtagaaaccttaaggtgcaaatggttgcatatggatgaaaaatttgagttgaaaaaagaaatgaataaaattcagttcatttctctgcaaaataggagatgaacaagttgagaaaaaattctttataattaattcattttttcaactttttaggttgaatcatttttccaacttatttatcttaaatggtaaaatattggtttgaatgttcattcaactctttcaacttcttaattttatgcaaccatctaaaacagcatctcagaaatctaataat

SEQ ID NO: 22852 - DNA, 755 bp, Arabidopsis thaliana landsberg
  unsure (1)..(755): unsure at all n locations
aatctgacaacatattgaagcaagatgtatataaatttagttattagtatatattaaataatttatattagtctcacaattttgattatactatcataatgttataattgaccaatcgcgattagtcgtatcattaattgatacttttgacatcaagttagttaatgtttttaaattataatattatatatattaagaaaaaaattatatatgtaaagagcagaaatctacaattttgaaaacaacatatgaataataaaaatacagaaataaaaaagaaatgtaaatttttgaaaagcaatatgtgaataaaataaacttatattcttgttaatcttcttattttccaacaaaaaatatattcgattaagcataaatattttcaatataaataataacctcatccatctaattctattttatttttttaacattgtaaattttgagtcgctagtaacaattatagttggttactacttttaacggcgtctctttttatttttttaatcattttggccattgtgagcacttatctctttgtcgggatatttctgctttatatcttttgatgagtcctaaaacatgtgtntttgtatgatgttataaatgatttgatgttgtttgcgtaaaattttgtgctctttctggttataaattgtaagaccttaattaaagatattttttgggcttaaagaagaagggtcgacaaaaaaaacacatgtttattagcttatactctgaagtaatttcaattt

SEQ ID NO: 22853 - DNA, 536 bp, Arabidopsis thaliana landsberg
aaagctggctcaacagaaatgtgagacaaggaaccagaaggaatcacttcaatttgcatcttgctcaactcatcacacaaggtgttaatgcgagaatccatcagaatgcaattgcattgcaacttccgactcaaggcatctgctaccacattagcttttcctgggtgataatgtacctccaggtcataatccttgatcagctctagccatcttctctgcctcatgttgagatcaacctgagtaaagatgtacttaaggctcttatgatcagtgaagatgttgcagtgggttcccattagatagtgcctccacatttttaatgcatgaaccactgctgccaactcgaggtcatgagtgggatagttttgctcatgaggcctgagtgctcttgaggcataagcgatgactcggttgtcttgcatcaagacacaacctagcccggtgccagaggatcgcaatatacatcaaaaggcttgctgttgtcgggttgcgcgaatactggtgctgtggtcagatgctgccttaatgcatggaag

SEQ ID NO: 22854 - DNA, 552 bp, Arabidopsis thaliana landsberg
tcattaacgaacctactgctgctgctattgcctatggtcttgataagaagggtggcgagaagagtatccttgtatttgatcttggtggtggtacttttgatgtcagtgtcttgaccattgataacggagtgtttgaggttctctccacaaatggtgacactcacttgggaggtaatgtacttgtgactaggaattaattgttttgaattgcattgtgttcaataacaaatgattgatgtgccaatggagtcgtcaatattggtgctaaaattttgttggttatgatgttggtgctaaaattttgttgttatgatctgcgcaggtgaggactttgaccacagggtcatggagtacttcatcaagttgattaagaagaagcaccagaaggacatcagcaaggacaacaaggctcttggtaagctccgaagggaatgtgagagggcaaagagagctctaagtagtcagcaccaagtccgtgtagagattgagtcactctttgatggtgttgatttttctgagccactcaccaaagctcgtttcgaggagcttaac

SEQ ID NO: 22855 - DNA, 2004 bp, Arabidopsis thaliana landsberg
tcggcaattttagcatctagttttgctatatgatcattttgttgtttaattaaagccatatgatcgtgaatagcattaacatcaacatctctacatctagtgcaaatagtggcatgctcaatggtagatgtagatggtttgcaagaattaagttcaacaatcttagcacgaagtatatcattcttatctctaagatcggaaattgtaactttgcaaacatcaaaatctttagccttagcaattaaattttcattctctaatctaaggctagcaagagatacattcaattcatcaatcttagcaagcaaatcaacattatcatctctaagattgggaattgaaacatcacaaacatgtgaatcaaccttagcatttaaactagcattttcatttctaaggttgtcaataatctcacggcaagtgcttagctcactagacaatttttcacatttttcaacttgtagagcgtaacgatttttaaccttaacatgtttcttattctccttgattaggaagtcctcttgggagtccaagagatcatccttttcatggatggcactaattagttcatttaatttttccttttgttccatgttaaggttagcaaaaagaatgcgcaagttatcctcctcatttttgtcatcatcctcatcactagatgtttcatatttagtggaggacctcgtttttaccttctttttgccgtccttggccatgagacacttgtggccgacgttggggaagagaaggcccttggtgacggcgatgttggcggcgtcctcgtcgtcggaggagtcgcttgagctttcgtcggagtccaattcccgacaaacatgggcatcgccgcccttcttcttgtagtatttcttcttctcctttcttcttcccttcttgtcgtcgcccctgtcactgtcactagacataggacattttgcaatgaagtgaccgggcttaccacacttgtagcaaaccttcttggaacggggtttgtagtccttccccttccgttgcttgagaatttgccgaaagcttttgatgattagggccatctcctcgttgtcgagcttggaggcgtcaattggttgtctacttggtgtagactcctccttcttctcctccgttgccttgaaggccaccggttgcgcctcggaggtggaaggctcgtcaagctcgttgatcttcttggagcccttaatcatgcattcaaaactcacaaaattcccgataacttcctcgggggtcattagtggatatctaggattcccacgaattaattgtacttgagtggggttaaggaaaataagagctcttagaataaccttaaccacttcgtggtcatcccattttgtgctcccgaggttgcgcacttggttcaccaaggtcttgagccggttgtacatttcttgtggctcctccccttggcgaagacgcgaagcgaccaagctccccctcgatcgtctcccgcttggtgatcttggtcacctcgtctccttcatacgcggtcttgagcacgtcccaaatctccttggcgctttttaacccttgcaccttgttatactcctctcgacttaaagaggcaaggagtatagtggtggcttgggagttgaagtgtcggattttggcgacctcgtctgaatcatagtcttcatcccctggtgatggtacatgtactccaatatcaacaacatcccaaatgctagtgtggagtgaggttagatgatgcctcattttatcactccacatattataatcttcaccatcaaacataggtggtttgcctaatgggacggaaagtaatggagtacgtttggaaatgcgagggtagcgtaggggaatcttactaaacttcttgcgctcatggccgttagaagttacggacggcgtgtcggagctggaggtggatggcgacgaagagtcggtctcgtagtagcccacttcctcatcttcttcttcttgtcaccgctcgacgcgacttgtcgtgtgaaggggatcattcaccttgtt

SEQ ID NO: 22856 - DNA, 612 bp, Arabidopsis thaliana landsberg
caggtcgactctagaggatccacctatttatatagcgcgctgtaaccgatttggtgtaaacgatactccgagccgtcgctcattgtataaagaaagagtataaaatggacttttatttatgccgaagagaaaacttacaggataaataaaaatgggagtatggatatacggacccactccccccttttttaatgaggggggtagttgaactcgtccgaagacgagctgcctacgtacccttttcaggtatcaaaccacttcgtagttcaagtttgtgcctctcagatttagttgtagtatttcctgaggtgcatggcattccaggatcgtggaatgattttgccacttaaatcggcgagttcatagacgtcgggtcggacaactttcgagactaagtatggtcctttcctgtttgccccgagcttcccattgtttcgctcggcagtgttctgaaatactttgcggagaacccgatctcattcttgaaatctttgctgccgaacgttcgagttgtagtatcaagccgtatcattctggtaattttgtattcgcactaaggctgaatctcttcgttcattgatcagatctaactcgtcgagcatgctttaagta

SEQ ID NO: 22857 - DNA, 590 bp, Arabidopsis thaliana landsberg
taattatattttacaatgtattcttggtagatccaactgagcgcgttccaccagaaagtttcgagcggtcaatagtgctctataatgaaaactacacttatgatagcgtgagaggaagggaatacgaaaatccgacagtagcggaagaccagggctgatactgattatatgtggactagctagcttctcttcgtactcgtggatatgcgggtaggcgtcacagagatctacggattttataacactcagttttattttagtctctctctacttgctaatttttaattttattacttcattcatgttcacttgtattttttggtccgacaaatttcatgagccaagagatcggcttgtgccatatatataatcagtatcagcactaaatcatacaattaacattttattgtaccaatgatagaaaaattaaagtgaacgactaaagtaaagatgagtctaactcaagagttctatgcccacttagccatcaaagacattccccgcgcacctatgaaggtagcaacataaccgatgacatgaagtttcatattcccttgattctatggtcgtataattcatgagcccagaga

SEQ ID NO: 22858 - DNA, 1173 bp, Arabidopsis thaliana landsberg
tggcacctcaggtctcaggttggatctgacaggtttagttttagatgatctggctcgaaagagggcagtgaattgaggtctggatctttctaggcaaggtagtcgaagtacacatcaaagctagtgatcttctccgcttggtttgcaattagagcttctgcggcagccagcttttgagagagttcaatcgaatcttctcgaggaacagaagaaccaatgtgagctgatgaggcttctagctgcaatgaaccagccccatatatcctccctttcttctttggagccacctaagagaaactcaaaaccaaaaacacaacataattgatatggttcaacttgccttaaactctctctctgaaataagatatcgattgcagtatttaagggtcggagtccacaaagttcctttgttcacacaatgagctaagtgtcaagattaaggtagaagtgtgtaagaaaaatgaaaagaatgtaaagtaagcaaaaagcaggttggttggttgagaaacaagatattaaaacgtcaggtctagaataatctcaggaaataattattagtagatccagatatacctaggttgttaccgaaccgttcttaaacttaaactctaatatcagaataaccggtgatgttccgtaaaactcactatgcctagagttatgattctcggtgatgtgccgtcgaatcctatacttaaagatgcatgctaatcgagtttgataagttcacctaattagatagaccaattattatgacacatctaaaaacctcgctcatcaaatagtagttctagtaatagacaaccttccagaatttacctactacctgagatcaaattctagttagctaccctagaactagcattaagaacaaccaaagatgaagaatcctatcgatatcctaacaagtgggtgatctactaaatcatctataaccctaatgagaaaccgtaaacctaacaagcagactactcaaacatgatcatagaaacaaattatatgtttgaataaaaaatcataaaaaatatcaaaagaagaaaagagtttagaaaatatctcttcactgcgaggtattgatatctctgatgacactgtgaaaacagagatttctaatatatgaattgcttataacacagctttggagatagaaaaactgataggtttaaacaatga

SEQ ID NO: 22859 - DNA, 569 bp, Arabidopsis thaliana landsberg
cctatctaggtatgtaggcagttccctccgcgaacgcaactaccatctcaacccttccgtttgtaagatgaaacttcaacaaggaaaacaaacatcacatcttccatcaacgaaggtcagctgctcacctgacagttcaaccacccctcgataccgagcaggtctctgctagatgaccaaacgccagatcgtcgcttactttacctcatttgtaattaacaatttcgagataagaataaaagaaaattttgatactcaatatcatgtttcgcaaaacaatcgtttacactatgatttaaaactcattcgtaatcttacgatacccaaatcccaacacccgaatgttggcggatccattttgtgatctcccttccaaaaagccgatagtgaacctcatctataaaaacgcatcacttcgacttcatcggagctcacctactacaaccatatctaactccttcctttactatcaacacataacatactaaaaaaaagaagaaacgaaggtttcattcgcgatatggcgagccacaagccagcttccaaatctggcaggtcccttgtgtgac

SEQ ID NO: 22860 - DNA, 603 bp, Arabidopsis thaliana landsberg
tgagttcagtcacattcaacctaaccatgtttttttaattagaaacctaaaacaagagcgtcgaccataagtatagctgtcaaatggtccgtccaaggaccattgggcgtgtccgtacggacagttttttttatgagccaagttggacggtccatagtggacaatggtctgaaaaatgtccatgcccaataaagaccatgtccatatgggcaagcccatggttagcccattttattattgataaatcaaaaatcatgattttaaagaattgtgtttttgcattttgcatttttccgacaaaacggtaaaattgtgtttttcttaccaatacaataacatcacgatattggcggaaaaattatgaaattgttttttccagccaaaacggtagaatcgtaaaattgttttttccgccaaaacggagaattgtgttttctcccaaaactttaaaattgtgtttttcgcaatataataaaatcacgattttggcagaaaaattgcgttttccgccaaaaccgtaaaatcggagaattgcgtttcccgtcgaaaccgtaaaattgtgtctcgccaaaataataaacgcgttttggaggaaattgcgga

SEQ ID NO: 22861 - DNA, 578 bp, Arabidopsis thaliana landsberg
tcaagacccaacatttaagatattatgagacatattgttactcaaactcatagaatcatcaatattcttactcaccacaacctcccaaacataagccttaaagcataagaatttaaacgatctaatatgcggcttagtaccatcacaccattaatcaatactcatataattcatgaaataaatcaatgaatgcaagagtatatgatcatgcaaccaaacaagcaatcaatcacccaaacaaacactcaaacctatcatgtgccatatcacacgcttcgagactcacagagattcggttgaaggtttaaggttagcttcaacgattctcggacattccatggcttcccaatcttgatcccagctaaatttaactctcctcatcttgatctaacacctcttgatagaagcagccttgattcatgaagctttactccgaataaacatttatgggacgggtcctcggaaggttcttgatcggacaggatacagcatggatttctcgctcatgggcaggagttctcgatcacggacatgattcttccctcacggtcaaagaacttagtcacgggcagagtttt

SEQ ID NO: 22862 - DNA, 517 bp, Arabidopsis thaliana landsberg
aagagtatatctctaaatggtcagctgaggatatgaaagcacagttatcggtcttgagaacaaaattctttgtcagttaacgagaaatttagtacctgtatcggcgtatatgagtatgaggatgtgagctcagtattatcctcagtgacagaagtatcttcagggctccagtttttgagaacgaaactggtagagtgagggacggaaaaagacaagggcgggaccgaagcttgtcttgtggagcttgagaacagaggaaccataaaggtagaaactttgcttatcgcaaaccatttcttagaaagttatccggttcaaggaataaactcacctaattcacaacaatgtcactgcaggaatacaggtaaagcacaaagatcggattgtggccataacgtcgagaagaaggatcaggattcataagcttttgaacaggggattttcaatgctctttgtggcaatttgacacatgagtgatctccaggaaggatcacgagaattttaactaacaggaagc

SEQ ID NO: 22863 - DNA, 1070 bp, Arabidopsis thaliana landsberg
ataagtaattgtaacagtcaaacagatgcattaacttcttctttattgctcttctttctcacaaactcagaagatcttccattttttttttcaaaatccaactaaaggcaatatatgttttattttgccaaaatattttgatatatgatgtaaattggcatttattttgtttcagcatagcaggggcggccataatcttagtatatgcatataattgaggctgctcttaaattttagcgtatttatattgtagtgaattctttgtcttgtataatattttggatgtaggacctgaatgttggtacatgaagacaatctaatatttttaaagcagttatcattaagcatttaagcaagtaatgaaacacaacaacacggtagaaatctgaggaacggagattgataaatagagtcgagaactttgatgatctctctccttaactcaaaacatctttacagtattgttgtgtttcattatttgttctatgttaattgctttacaaatattacactgtgtccttgtacaaatatttaggtctaatgctaaaactaatttttcttttgattcgcaacactcaaaataaaaaactgatcgaaagctaaccttatgttatactctctgagttctgacacaaacaagagaagaaaagagaggaaagtgatttagatgctttgatcgatgatagaatgagaagacaaaagcttaactttatagctaaagatcaacgtctatgccataaagtcaagcataattcacacaatatataagttgaacatgctatcaaaataagcttactacattggtgaaattatgcatgtgtggatatctcaagaaatatgcatgagatgcattactcttcttttacgctttgtgatttaagataatgtatgccaaatctatgtgttgccaacattgatttctataccaattggttgatacaatgactggaatttatcctttgatttgccacattgattctataaaagttaacaaactcatataaaaggagaaatatttattcaaaatgtcaatattaatttcgataaaatttatatggtaatgtttggat

SEQ ID NO: 22864 - DNA, 566 bp, Arabidopsis thaliana landsberg
caggtcgactgtcgactctacccatctcttgatgcatttccagttgtttctgacgcatctcctggcgttcttgcctcagttgagcttgcatttcgttcatcgtgtttgccatccgttgtagcatctgcatctgagcggcaaccactagatctgtaccagccggtggaggattcggaggatttatttctggtcgtggttggttaaccatcctcttgatgtggtggttggcaggtagatcgattccgcctcccctccgggtattaaccatctgggttagagacatatggtaagacagttttgcaagggaaacaatttagcaggcagaacaaataggctagtagctggtcataaactaaaggttcttaggcagggatttgatatgttgttttatgtcaatattggataactaggagtataaggtgaatgtccaaaggtaggatagaatctgtcaagatgagatagatatgtgatactagatgtattctaatggagagataatataagttgtctaactattttataaacattttttatgcctatgtgtaggggtgtaacggtacgaatat

SEQ ID NO: 22865 - DNA, 578 bp, Arabidopsis thaliana landsberg
cacttttctggaactcttaatcccaacagtagcctctttgagttgcacaacctcgcttaccttgatctcggtttcaacggctggacctcctctacactcccgtatgaatttggcaatctcaacaaactacaggccttgtttcttacctctaatagcttctatggtcaagttcctcccacaattagtaacctaacccagttaaccgagttgaagcttctctcgaacgacttcactggtagtctcccacttgtacaaaatctaaccaagctctccattctaggactttctgataatcacttctctggaaccatcccttcttctctcttcactatgcctttcttatcctatcttgatttaggtggaaacaatctcagtggttctattgaagttcttaactcttcattttcaaggctagagagtttgtacctaggtaaaaaccattttgaaggaaaaatcctaaagcctatctcaaagttcatcaaactcaaagagctcgacctttcttttctaaacacaagctacccaattgacttaagtctcttctcctctctcaaatctttggtgctcctcgatttttc

SEQ ID NO: 22866 - DNA, 418 bp, Arabidopsis thaliana landsberg
  unsure (1)..(418): unsure at all n locations
ttcgttgattttagtccataacttcacatcctcccttactctttgaagcatacnnnnnnnnnnnnnnnnnnnnnnnntctgcaatataacaaatattctttattttctagccatattttttatatcagaatctttaattgtccttttacatgattttgcggttgatccatcctccatactcatcttccagagactgaggaagatcataatggtaaagtgtaacctgtggttcaattcctgttaaaaggtttaccaatatgtctatcagaacccaaaagctatgaattggttttagttgcgataaagtaaaagacaaaaacctcaccatggcttcgtcgctctttgatgagattcttgtaaaacaatagaccttttgggttaatgcgtcctcttccatctgaaacatgacacagacaaa

SEQ ID NO: 22867 - DNA, 487 bp, Arabidopsis thaliana landsberg
tgagataaaatggttaacttcctaaccttctaagagtgtccgaggattcattcgcattctaattgggcccaggtcaaggcccaggaccaggccctagtggggtaaaattttgcacgcgtcggtgctttgttttggatgacttggcgagaggtgatagggtagtgtcacgttggcgagcgatattcattggaagataacaatcaaaatgacgttcgtaggtctaagaaatacgaggactaaagagtaaagaatatctctctctctctgatctacttagtacttacttagttacttctctgtcttatttgattttgagtctctgttttgtctcttctcttgagattgcgataatgagagaacggattattacattcgtttcgctgcttcttgtagctttgctttcgtttcccagtgttagctactgtgacgaccaaacggtgattggtcacttccttgaaaaagttcctattttaaagatttgttcatc

SEQ ID NO: 22868 - DNA, 521 bp, Arabidopsis thaliana landsberg
  unsure (1)..(521): unsure at all n locations
gctggtttcctgtcagtnnnnnnnnnnnnnnnnnnnnnnnnnnnnnnnnnnnnnnntttcagtttctgtcagaatggtcttgtgtacttaacactggtgtttctcagaaaattgcattggcatggatgtttcagaaggaaactaatagtttgcactgtatgggagggatattagctgatgatcaggttacttttaatcgtagttattttccgcttaactatctatgatcttactaggtttccctcaaattccatttggtctactgcacagggccttggtaagacagtctcgactattgcgcttatcctaaagcaaatgcacgaggcaaaattaaagtccaagaattcaagcaatcaagaggctgaagcattggatctggatgctgatgatgagtcagaaaatgcatttgagaaaccagagtctaaggcttcaaatggtagtggtgtgaatggtgattcangcataaagaaagccataggagaagaagcgagttcttcaacacgcaaattcacaagaagaga

SEQ ID NO: 22869 - DNA, 577 bp, Arabidopsis thaliana landsberg
tgtgtagttctcttcgtcttcacgagttagtgataagaaacagagaagagaattagggcttagttatttttagtcgggtttgatcttttgggtagattagatcaagtaagaatcgagatagtacttgtaaaacagttttactatcaataagaataagtgtttaagcaactctctgtgttgtgttggtctctataccctcttatgttgttctaatctaatctacttatattagtgccatgatctgactgacgaagggcttgcgtgctgggctgaaccaagtttagttcccgaatgtctattatcgagtcttaaaaatctcgattgggaacaatatgatggtacgaaagttgaggaagaagtagcagcatcttaaatattaaagcagatgtcgaaaggcctcacgttcgctctcagaaaatgaactgacggatttgtcctccccccaccaaaggattttaaggacaaattagtcttcttactaattaatcaaataacttattaatttctttccatgttttaatgtgtagaaaataaaaaaaggtttaattccttattaaccctaaatttcgtatttttt

SEQ ID NO: 22870 - DNA, 386 bp, Arabidopsis thaliana landsberg
ttacaggaaaccttacgtgggaaccatctagagggatgctctggacgtagaaagccggtatagagttggttgctttttgcaaaacttaatgattttgatttttttgttggatttgagcgtgtatgctcaagggcccattgttaaaacgttttggatacttggtggtaaagaagatttatacggtataaactattttttccctataaagagttggtatcattcgatattagtcttgtccggacaaacaaaacctcatgatcatggcaagggttgaaaagcctaaaccgcgttcgttaagggatggttcatttggaaccccaattgggttgtctgtgtgagctatcatcgtagcatttccgggttgcccttgttcttttccggccata

SEQ ID NO: 22871 - DNA, 508 bp, Arabidopsis thaliana landsberg
  unsure (1)..(508): unsure at all n locations
tcgcgataactttataattggtatgataatgtttatattaccactgataatatttatgccaaaaaatgtgatatatagataatatttatattaacgtgtataacgatgttaacatgataacaataacaaaaacatgctttatttttattcttttcaccaacaaggtaaatctagaaaacaacataattatgttttttcgctgccactgtctaatcttcaatcattaactctttccatctccatctctatcggacgtaattttccgacccaacgccaccactgcttgtgaaatcatcgatgttggtatcatcattaccaccaccaatccaccattccattaccgtctacatnnnnnnnnnnnnnnnnnnnaacaccaccactgcttttgaaatcatctatgttgggattataatcaccaccaccagtccaccacaacggacatgaaatcatcattgacagttgtactgttggctcctcatttttcacaatcatcatcgatagttttcta

SEQ ID NO: 22872 - DNA, 441 bp, Arabidopsis thaliana landsberg
caacaatccatcatatagtggagtagggtattacgctccagcggcccaaaccactctaaatcctcgcgtgttcatgtgctcggtgatcgcttagcaagacaggcaaaacgcttaagccccttcctcatcttaggatttagggcaggtgcattccgccacccggccagagaattccctctccgacatttggcgcgccaggtaggggcagggcattaggtttttgcttgtttcctcgctcagcatgatggtgcaaatcgttgagcatcgcgccaagacttcaacggatttcctggtggaggaagaagttgtttcttccatgccacaagttcccaaccgcccagtgccaggcactgctactgtgcatgctgcacggcagcatacatcccagactccatcaagtgcggctccgggagcattgttagcagccagggagttgttgca

SEQ ID NO: 22873 - DNA, 557 bp, Arabidopsis thaliana landsberg
  unsure (1)..(557): unsure at all n locations
catttttttgaatgatcccttgatgagttagcgtaatgccaacagtcgttgtctatagacattgcattaccaagcattctccacagaaaacatgtctcttacataatttagtgtagaaaatatatatacaaacttttcactcatttgctataagtagttaatttattttgtcctaccacatacaaatctacattacgctaccaaaaaatgctaaatctttttatcaatataagaagtttaatttttaataatnnnnnnnnnnnnnnnnnnnnnnnnnnnnnnnnnnnnnnnnnnnnnnnnnnnnnnnnnnnnnnnnnnnnnnnnnnnnnnnnnnnnnnnnnnnnnnnnnnnnnnnnnnnnnnnnnnnnnnnnnnnnnnnnnnnnnnnnnnnnnnnnnnnnnnnnnnnnnnnnnnnnnnnnnnnnnnnnnnnnnnnnnnnnnnnnnnnnnnnnnnnnnnnnnnnnnnnnnnnnnnnnnnnnnnnnnnnnnnnnnnnnnnnnnnnnnnnnnnnnnnnnnnnnnnnnnnnnnnnnnnnnnnnnnnnnnnnnnnnnnnatc

SEQ ID NO: 22874 - DNA, 1972 bp, Arabidopsis thaliana landsberg
tccgaaacataagatggcggaggaagacgaactattttattcttcctaaaacgttttttgttacgccgatatggatgatgcaggagaagaaaccaacggtgacaatcaaaccaacatggttttctgcctttctttagttgaaacgcatctgtacgatccatacagtagggacaagataatcttccatgcgttgtccaccccgataacattccatatgccgggaagtcactaatcgtccacattagcactgcccgcatattgaaattttgtttgctcgagtaatcaaacgtatgaacaccttcataccacaacttcttgagttcatgaattagcggttgcaagaagacatcaagcgctcgtttcggatgctttggcccaggcactaaaatacttaagaacaaaaattcgctttgcatacacatatctggaggaagattgtatggggtcaagataacaggccaaagagaatattgtcgcccagacaaaccgaatggactaaatccatctgtgcataagccaagatacacattcctacactcgttagcaaagtcaggatataccgtttgaaagtgtttccacgcctttgcattgatgggtgcgttatttctccttctgcagttgtatgttgagcatgccatctcattttcgccgcagttctttctgattgatataagcgtttcaatctatcagttattgacaagtaccacatccgtttatatggcactcgcgtgcttccgccagtagtctgatatctcggcttcccgcaaaaccgacattcctgcagatttacatcatctgcccagaaaatcatgcaatagtcaatgcatacatcaatcatttctgatggacacccaagactagaaaccaacttttgtattttatagtaactcagccgatatattatttggaggcaaatattacttaattaattatgtccataaatccatgcaattttcacttaaggtattatcagctttaatttacatcatcctagatactagactaaatacacccctctaataaactttaaatattaacttgtcctaaacgttttacataaatataactatacttaattctcattcatcttcgatactaatgattttttccattataatctttatttatggatctgactatttataagttttgttgacatctataatttagagttatcttgacaaagcaaaaggaaaaaagacaaaaaaaaatcgacaaaatacaaaaaaaaaaacatatttgaacaagttcctacttttttgggtatatccaacaaaactaacaaaaaccaaacaacccaattatatgttaatttatcaaatagattttgacatatatcaaaaacttttaatctatttagtatatatattaaccaataaaaaatgagtgttgaagtttataaaaaaaaatctaagttattaaacattaatttaattggataaagtttttatttacggttgcattgtaattttattcgtaagtgaaaaaaaaaaacaagaaaaaacaaagagcttaaatgaatgaatttaagattacttatgatcttagtatattttcttaatatgttctactttatatagaaaatattttaaataattttggtttccaaaaacaaatttggactaatcataattgcaataaaattaatttgcatgatgagaacaaactcggtagcgagttgaactaaatttcatatgtcaatggcctagggtcgagcataagctggcgtgcggcttgccaccatcaataaaaatgtgaggaaaattattgatatatacatatttgtattaccattagcattcatacacatatcaaatgcattcataatcaaaattctcatattaaccaaaacaatctctctcggcaactcaaatggattcagattcggagtccaagctcatatcactccttactgaattattgtctctcaacaacattatggcttcggtgattgattcggatttggaaacgg

SEQ ID NO: 22875 - DNA, 556 bp, Arabidopsis thaliana landsberg
ttttttatttcttatggtttgttgaatcacacagatcatagaggaaggtccaattttcgtagctccgcaagaaaccatcaagaaagttgaacaagcagctagaaggttagctaagagtgttaactatgtgggagctgctactgttgagtatctctatagtacggacactggggagtactacttcttagagcttaaccctcgcttacaggtttctttccatacacaccatagctacctttccttttcgaatgaaagattttggtcttgaaaatcgaatgttcgatgtcaggttgagcatcctgtaaccgagtggatcgctgaggttaatcttcctgctgctcaagttgctgttgggatgggaattcctctctggcaaatccctggtatggtcttgcatcctggggcagtggtttttttttctaggctatatgcttatgtaatgtactggttcgcttttgtttgatagagataagacggttttacggtatggaacatggtggaggatatgattcttggaggaaaacatcggttggagcctttccttttgattttgatg

SEQ ID NO: 22876 - DNA, 559 bp, Arabidopsis thaliana landsberg
aaaacttaagtaactttgagatcgtgatagaatgggaaccgttatacttgtcacattgaagaaggtgaggtgtggtggtgagatgggttagtggcgacgttgtgggtcctacaaaattaaaaaaagttagacatgtgaataagttttcttatgtccaaaataaatcattgtgtgtccaatttatgttgtccaaagagatacatctttatggtatataaaatatagacgtggatgtctggtaacatgcaatccaacggggactcatttttaggggaataggttctccataatcaatcagataatacatacatagactgtaatcattaaaaaccaaccacaaaataagatggatgagccttagcaaatatagaaatgaagattgaatagcaaacgagaatataacattaaaaagtcagactagtagaagcttaaaaacaaaaaaaacaagttttagaaaaatctaaacatgtagatagacagataatgatggataacacagtattaaaacattatctttcaatatttgggagaattagctcttttgtgtgcctgagattta

SEQ ID NO: 22877 - DNA, 942 bp, Arabidopsis thaliana landsberg
ccaatcacaatcaccctcgtctcatcctagtgatctttctgtcatatacttaacacttcaccattataactgctttcaaaaacagatcattcacattttcaccaccatataactaaaccatcataaacaaagtaatcacatcatgtagactatcaatttaacatctcctctacatatccacaattacgttggtgtcaagtctcaaacatatgttgacagtgaaacaatttatctctctcatgtttagtcactcacggtcacgaaattgaattagagtggatacatgtcataaattcaataatattatcattacacacatgctatttataataaattgcattaactttgggaattaaattgtccactaacaaaaaaaagatacattaaattttttgaatttttgaataaaattataatcttaaatgtgagtgtatcatgttattatctagacgttacagacgaaatctaataatactaaatcaacagtcattttagtagaaactgcctatctatctatttgacacataagaaataccccaaacttttgcatgtttagaattttctcaattaattaattaaaaaaatgtttcgaaagtttatttctccatctcctccacccacaatcccacgttctcttaattaggattcgctgacaatacttttgttttcatcccgtaaacacataaataattaattagtttctttttcttcttcttttgagatactatttgctgttcttttgagatactatttgctgaaatttggatcaaaattatacttaaactggattagcgattgaaggtaattaaacatgcatacaaatgcagatatattcaacgacaaaatctcttccagatatttcttattgatttttttggtctatctctttgacagacttttatttataagtgattcaaaatttctagagttcacatgtttatt

SEQ ID NO: 22878 - DNA, 484 bp, Arabidopsis thaliana landsberg
agtctgatgtttttgatctggtaattgcttcttacttttttttctgtaacagttgatttcgaattcagtatgtgggggcgtatacagattctgggcattgctttatgttaaaatttgtgtttgatctgttggtttttaagataaaatgtgaccctgttgctgcttattcacttctcattaacattacaacggattggtgacacataataattggttttaggcttatgcttatgctcttttgtttgctcatttacttgatattatcagctgagataactttgttccggtttggtgttggtcatgttaagttccaggttctctctctcgtgtatctctaagtggttttagtcgttgtaattgacgttccatgtttgagtatagtgatggtctgataagatgagaatggagtatgaaagttcaatgcactgcggatagaacaacattagcattcgtttaacattgcacagattcaatttacagtgtc

SEQ ID NO: 22879 - DNA, 1028 bp, Arabidopsis thaliana landsberg
ccattttcttttgtttttattttctattttcttttatctacaattcttttgaatccaaattttgaatgtaatctcaagtgcaaatttaaactcatttgaactatgcatattggtcataccaaattatgagcatgttatttaattattatattattttatattggatattatttccccctttcctctaatcttcttctcctcattattattttatctttgttcatatcattattattttaaacgcacaaacaaaaatccaagattatgccacagtttatttttgtcttagtggagttttactcatttttaatcatgatcacgcacatgtgatgatagatagagatgcacacacatacataaacgaatgtaatttctcctttttgattttcttaagaagtgagtattacaaatcctacccccttaaaaataatctcgtcctcgagatttaagaaggtctagagaacatatgaggaaagtctatgcgaacgtcttcttctcttttccaagttgcttcatcttcaccgtggtgactccattgaactttgcacatctttataaccttattcctcgtgactcgagtcaaaatatctaaaatcttgatggggtactcagcataagtcaaatcttcttgaacactaaggtcctccattggcaaccgctcttcaggtaccctgagacatttcttcagctgagatacatgaaatacatcatgaacatcctcaagatgatctggtaactccaattggtatgccacttctcccactcgctttaagattaagaagggtccaataaagcgaggggacaactttcctttgactgtgaatcttctcataccccgaagtggtgacaccttcaaatagacataatctccctctttaaactctagcagtcttctccgggtatcagcatagcttttctgcctagactatgcagttctcaaattctcccttatttgctgaacttgttcttctgcttcttgtataactcaggccaaacaactgcctttcacagtttgatccaatataatg

SEQ ID NO: 22880 - DNA, 663 bp, Arabidopsis thaliana landsberg
gataattttactttgaccattttttaatttattacattaatattaaggtatctaatactaacttaccatcattttactttgaccattttttaatttttggtattcaacttctatataaatacagtaatatatacatattcaacttttaaaaattatattccttagtttaacaattttccaaccagcgtacagcttatattagtatatatatacaacagtaatcaataaacatcaaacacaaaccacaacaaaaaatctcgagacaaagatacaatggcgagccgaaacagagcactcttctctgtttccactcttttcctctgtttcatcgtctgcatctccgagcaatcgaacaatcagtcttctccagtcttcgcctgtgacgtcaccggaaacccttctcttgccgggcttagattctgcaacgcggggttgagtatcaaagcccgagtcaccgatcttgtcggaagattgacgttggaggagaaaatcgggtttttgaccagcaaagctatcggcgttagccgccttgggattccgtcttacaaatggtggtcggaggcacttcatggcgtctctaacgtcggaggtggtagtcggttcaccggtcaagtccctggcgccactagcttcccacaagttatactcacggccgcttctttc

SEQ ID NO: 22881 - DNA, 584 bp, Arabidopsis thaliana landsberg
ccaaaaattcttttggcagaacattgtttgccgcttcggagtaccgtccgagctaacagttgacaacggcaagcagtttgatagtcaagatttcaaggatttttgtttttccatcggcaccaagcttgccttcgcatcagtctatcatccgcagtccaacggggtcgtggagcgtgccaatgggaaaatcttcacagctgtcaagaaaatgctcctcgatgaaaaaaaaggcagatggaccgacttgttaccggaagcagtctgggcgctaaacacaaccgagtgcagggcgaccgggttcactcccttccgccttctatacggatcggaagcaatgaccccgcaagaaataaagcatgggtctccgcgcacagctccgtcagccgcccctgacgtggatgagccaacctccaaagacctcattgacggagaccgggtcttcgccctgcaggccttaaacaaataccaagcccagaccaaagcatggcgcgaccgcgagtcattccaagggagttcacgcgggggactcgtactcatccgaacagctcggacggagtcaagggcaagttggagctaagtgggag

SEQ ID NO: 22882 - DNA, 819 bp, Arabidopsis thaliana landsberg
  unsure (1)..(819): unsure at all n locations
ctctagtttagggattgtttggcgtgtggctctttctttgatcagcccaaaaccgctaatataaccgccatctctatcttccaccctcagcttactccagtttattccacgagtgctagctttctcttcgttatggagggttgtctttaccggtgtctggctcaattgatgtccgtctcatccacgcatggggtacaatttcacaaattttctcttttatggagattgatcccattttttctctttacgcagatatcattctcgcaaaatttctcctttatggagagatcattcccaaaaatttcctcttatgaagagctcaattcatttttttatgaagatattaaattcgtctatagcttcctttcatgtccaacctcttttatgcaatctatgttcaatttcgcaatcatctctccagttttaatttcgccatctattaattgcccttaacatcattgaaccactctcatttgtaacaatnnnnnnnnnnnnnnnnnnnnnnnnnnnnnnnnnnnnnnnnnnnnnnnnnnnnnnaacatctttttgtttccatgagttcttcaaatgttgtaagtgcatttcgatgatttttcattccttttgaagaagcccagtcttcaatgcattatattaagagggaacatatcctagaatgtttgatgttcgcatgtaacgcctcgaccgcccctaccagtggacccccacgttctctgggtccacctctatctgatggtcagtacgccacgtctgggagaggtttaaaagaattgatttggccacctatatcaccaaagtgcacttatcttttcggtcaaa

SEQ ID NO: 22883 - DNA, 770 bp, Arabidopsis thaliana landsberg
caatcgaagaaaatcatatccgggtttaagtatagaaccggtttttcaacctgattacatgtccgatccatagccgaggctagaaaactccctaacgatatcgggatattcgaggttgtctcagcaccttcagggaggttatccacaaaagcgatggtaagaatgtgaaaggagaatgcagtctgggaagagattgagaggttcaagttgcttcagagctttcttggggagcaagaaagttattttgtgccctttctcagccaaatgcaaaaatgcagtcatgtgaccaaaatcgaaccattgaaccataaaagcatgaaagtttgaccccatatttgttcttatgttcatttgtttttgttctgatcttgttctcagagtttttatgtttctgtttatgagcatacagtttcagatgacctgaagtttaggagactatgggtataaattgaatgattcaagtttgttacgaatatataaattctttaattttgattaatatttgtttaagttttttataatcagtgcgtatttttgttaattaagtcccgaaaattactccctaatctatggtaacattatacataagctattccccaacttataggaaatagcaaagataatggcaagcacaactgcaaataattgattaaattatgtaatatccttcttctttttttgtcaacggttatatttgacactttctcaatttgttggggggtgggggggaaggactctccctatattttctcacatcctataaaatctcc

SEQ ID NO: 22884 - DNA, 2108 bp, Arabidopsis thaliana landsberg
  unsure (1)..(2108): unsure at all n locations
gctgcttcttcgcctaaaacatgggacaaaaccctgagtacgaaatgtactttcgcaagtcttacccgtcaaaataaaagactctcaaggatatgttggcctttaggagtcaaggtatggcttatgaattatcaaagactctatttgcggaaatgcttactaatagtggatccttaaaaatccagttttacttgttaggttaagtaaagttacctgcctctagagttctttctaccctagttcaatcacttgacctatactagccaatttcttaacaacccttcttattcactagaatgctacgtgtaggtgagtgaccaagtcttcatgtctgtgaagttacggcgatccgaattggttatactcagctgaggatctccaatcacacgacatatgtagcacttaacccttgcatatgtcaacccgccaccggggttcttaagaccagatcaggttcacgcaaaccgagagcacagatacaccaccgtccagcctcttgccacggagggtacacgctactctcgccaccgctccacgcccatttcgtgttatcttattctggccttagtctgcccgaggcaaggcttacccatgacgaggcatgtgaccagttaaagggtcctcggtcagcacgcctacatacgcattaatccttaaccaacctgggtagaacatcacctgttcctaacccaagtctcaatttaagtatttctatccttaggattgtttctgttccttaggatgaaagagcatcacagggaactttgcagtaagatcccactattgctccaaatgaaaatattcttgcaggtagaagctatcctctcccgggttagaatgaggacaacctctatccacaagatctaagcaaggctaagcatttttgtaaatcataattttgatacttcacagaagtatctataaaggtatggatatcaaggaaagcaatgcatcaaagggtttcaagtaactcctatgaacctaatgcacatttcactagacttaagtgtgcaaaaagtatttaaaacacaaggaaaaggggttgcatgcaccggggcttgccttcgttcacaggtgaatcaggctcggatccgcagatatcaaagtagaaacaattcccggcctgagatttcgaaggtggtggtgtcctgtcttcggtgacttctatctcttcttcacgttctaatcataaccatacataggtataagaatggatgccatgggatgctcatgaggatgcaaagataatataaacttcttatttatgtcttgagtacaacttgccttcacggagttccgggaacttagggtttccggagtcggtaaaggagttcatagggcagggggggtgttttggggtttggtgatcaaacaaggtccaaatcaatttaaactctaccctaggcttctaaatattgtataatatccatataaaaattttgggcattttaggacttaccaattattttctaaaaatctataaccaagacttttaactactttaaataccctaaaatttcttactttcactaaaaatcaccaacttatttttattaaatactatggaaaataacaaacctaggaaaattagttttacaattttatcatttttctacatttttctacacatttttaaagctctgctggaaaaagaaaaagaaaaaggttaaggggaactgggccggattcagcccagcggcccaagantaccctgaaacatcgcgcggctccgcgcccgcgaggcgagtttgcgcagaggccctcggcgttttggctaactggagataggttcggttactgtttttctaagtcactgacacttcacaaaaagaccctctggtttctatctattctgtgtttcaagtccccgacggcctcggcaccgccgcgctccggtgagctagcagaccggccgattggggcagtgaccggcgctcccgagcgacatacacaggattaaacccctaaggagtatttcccctaacctaattgcacgaacgaccgactacagagctctggccacggtgaccgagagcattgcgaacggatgagcgtgttcccgatgattggaggtatctacattcaaattgatggcttggcgagcatca

SEQ ID NO: 22885 - DNA, 3683 bp, Arabidopsis thaliana landsberg
  unsure (1)..(3683): unsure at all n locations
actaaattgataaaaatgatctgtagatgaaatttcttggttcacaagtttattaacttgattatttaagaaggacaaaaaatttcaatgattcaaagtttgaattcttttaccgaaagtaaaaatgcaaacaattgaccaattctttgaccaagtttattatagcttattattgattagtttgacagttacacatcatattttcatctctacttcatcatcataattcttagttcatccgcggtggcggtggcgacaaacgaataacacggtttattgtctgatcgtggcttgggtttgggtatgttttcggataacccatcatccgcggtggcggtggcgacaaacgaataacacggtttgttgtctgaccgcggcttgggtttgggtatgctttcggataatccatcatccgtggtggcggtggcgacaaacgaataacacggtttattgtctgatcgtggcttgggtttgggtcttttttcggataatccatcatccgcgatggcggtggcttcgtaggacgaccccaaccgtttgttgtctgatcgtggcttgggtttgtgcctgtttccatcattttcggaatactctcttcaacctacattatttttttggtttggtgaaaaaattcacgatggttatcatatacagatctattttgaagtgagtgaaaatgttgattattaatcagagagaaaattaaaatctatgacaaatgtgaaatgtacattttggttaatgatactgcttaccatatttagtgaatattggtcggtgtgaggaactccatcttcatggctctctccaaaccctaaaagcgaaaatggaattcaataaacaaccatattaatagattataattgtgaaaatggtaataatcagaatagatctttgatattaaaaatgtaagactatctaattagatgatataaaacattctcaaattacttgaagaacacaatggaagaaggagcaagaacgacatgagaaccaccagctgcatctttgaaaacatgtttttttttccgagaaaaaatatatattttggttttgttgtttggaagaagaacgcatgtttctctatatatagtagacatagttcgtaggccaatgaacgcatactggcagatgcggacgtacagcatggggaaagtaggcacgtgcctactgttttttgttctccctcgaatagctatataaattaagaccatctccatcaatctaatactgtgtgggtttctcaacaatattattttaatcaatttataataattaagttatttatttaaattttaaactataaaaaaaaagaattggaccaataatataaagacacgtggaaagacattatctctaagtttctcaaactagaaatgtctctgactctctttcctaatttttttattattttatattttttttcctcaaatactcctgatagagatgctctaacaaaacaattcaagtaaaatcaagaagtgccttagtccaattttttattcatttcacaaccatataaattttattttttatccaaaattttataaagcccaatagaccattgaaacgatgattggcctaccatcatcgaccttatttttatagaaacaaaatttctttctcattgattcatcgtaatactatttagtatttatttttaatatatgtagctatataattgtactctggattaaaaaaacatattctggatcttccactgtctactggtgggaaaatggctaagtaaagtaactatgcactacacatttactacaattcaaactaaatgttttggtccaagattttcgtctctgagaattaacatattaatagtggaacatgtcatctcaagtttttaatgtcacggtattataccaccaaacgacgagcataaacaacttggaaggaggctgatcgaggagttagtttggtaaaaagacaattccataatccataaaagaaaaccttgatgtcctgtttctcatggttaactcaaagaacgctcacatctctttatagtgagaacaagtgtagttgcggaatggaagagtccgtgagtatgggaactaggcagccccatcttgacgtgaatctgtggccaacgagaccacgagatagtgatgaccaaacttgagaggagtatgaccaggaaaaaaaagatggtcccttgtctctacttgttcactacaaaatccacaattactactcgctcccacattccactttagctaggccattatgattagtaattttgaaatagagcttagatgtgaagttagggaaccatacatccttgtaccaatcaaaaattggatttacttgctgaaatcaaatgctgtgtgtcttgcgaagcaaacttacaagtgaatgagtcattttttccttctccaaagaggttgatccttgccggttggtaacttgtttcttctccatggaaaaaaatgtccgtaagttattactattgaaactaggtccgtcttaatctatgggacgatcttaggcaaaaccagtaaaatgttaaagtttcttactaatttttttttatccaaacattggacatttttactctaacaaaaattttgaaattgtttttgaacttatggcaaaagcgaaggtggtttagggctacgatcaattgaggaggcaaataaagtctgcatattgaagctaatatggagaattctttcagcgagaagttcattatgggttgattgggttaaaaaacacctcataagagacggctcattttgggcagtgaaagataacacaactagcgggtcatggatgtggaggaagatgctgaagtatcgggaacaagcaaagatgttccacaaggtggaagtgaagaatggggccacaacttccttttggtatgattcatggagctcaatgggtgtcatctatgaaaagttaggagatagaggctgcatagatatgggaattccaaaaaacagtatgcttagtgaagcgataagtaaaccccgaacaagaaaccatcgacaaagcttcgtgaacctcattgaagttgaactgcaaaacctgcgaacaaataggcgagaaacagaacatgatataccactatggagaggaaaaaatgactgctacagaaagaattttgtatccaaggagacgtggctgcagattcgttcaacaaggccggagatgcaaggccacaaagagatatggttctcggatgctactccaaagtatgcttttgtcaaaaggttggtggtgaagaataggattgcaacaggggagcgaatgctgaaatggggcaaaaacgtggatactagttgtgttttatgcaacttccccttggagacacgagagcacttattttttcattgcccatattcgagtaaggtgtggagggatttggcgggtggactgctaaaaaacagacacacggaaaaatggcaagatatcatgaaggagcttnnnnnnnnnnnnnnnnnnnnnnnnnnnnnnnnnnnnnnnnnnnnnnnnnttcaaaacacgatacactcaatctggagagaaagaaatgataggagacatgaagagaagccctcgatgacggagaagattgtcaagctaatagacaaaaacataagatatcgactaagcacactaagggtgagaggtgaagagaagtatgcacaaggaacctcagtgtggtttgcttcaggcaatatcacaac

SEQ ID NO: 22886 - DNA, 437 bp, Arabidopsis thaliana landsberg
aatttattattatctgaaacgtgtggacgcatactctctctttcatccgccatggaagtatattacatcttttttcgcaaccccacacttttttctttttggctaagcatcaaacaattgaaaaggccgagtcgattctaattcagatataaaagaattctccgttttgcttcttttttttcacacgaagcaaatcgactagaggctggtaaattttcttctgtaattcatttataaaaaaatgttcttttgcctatccatgggggaataattataaaggtcgttactttccacatgggttttttttttggtggatatagcgaaacatttatattgcccactaccacttgaatgcgttgattagattgtacctacgaggcactgctatcggtctttcaattactgtgacgcgcaatctgggttgcatctactaacta

SEQ ID NO: 22887 - DNA, 568 bp, Arabidopsis thaliana landsberg
  unsure (1)..(568): unsure at all n locations
taacatcaaaggaacccaaatcagcctttctagatttctttgtaacaatttccagcaattggcaaacaacatacgctcttaacccaatgtttcgcccagacttaaaagaagttttactaccctccttcaacccaccaatagagtcagggttgacatagacaaaatcctcaacagaatactcaatcccattgatgaaaaagcctgtctttgaaacatttagtttaattgtagacctcttctcttcatcctcccttatcttacatgaagtgcagaacccagaactgcgaccaatatcacttagtggaagactaaagaatccccctctctcaggtgagtacaagcttttgcagtaatactctgttggcaaatcttttacttttctttctaatgctctagcccagtcaagcttatccgcagtgatgttctttttcctatactgatgcccccatggccttgatcgaatctcaaaactggctactcctttaatgtccttgagctgtgtagtcatgcattcattagtcaggaatagntccctctcgttagcagcattccccagaacagtcataga

SEQ ID NO: 22888 - DNA, 601 bp, Arabidopsis thaliana landsberg
  unsure (1)..(601): unsure at all n locations
acagtacttttatggcaatatcatctgagtgtgtcggtatcggagaacttacgaaaattaggtattctttgtgacaagggttatgtcaagtgtggtgctccaaaggaaacaatcaatcacacactttttcaatgctatcctgcaaagcagatttgggccctttctcaaattccatcggcatcaggaatttttcctacaaattcaatttttacgaatttggatcatttcttttggagaattccttcaggcatcgattcggttctttatccatggataatttggtatatctcgaaagcaagaaatgaaaaagtatttgaaaatgtggataaagatccgaaggagattttgcttttannnnnnnnnnnnnnnnnnnnnnnnnnnnnggctcaagttgagtttcatactgaaagtcatggttctttgaatttagaaactccaattcgggttagggatttatcacaagattcacctttttctggattttggtgttttattgatagatcttggaaagcaagtgatcagttcttaggaacaggatggttctgtctatcatctcttggagagtcgccaacaatgggagccactaacgttcgtagaagtc

SEQ ID NO: 22889 - DNA, 481 bp, Arabidopsis thaliana landsberg
agcaacccatccttccggctcctggtcagcagggaagtcggtgtcgtggctcgagctgtcgtcgccacctccgtcgtctgggtctcctccagcagctactccagaagctggggcgcccggtggtggtgcagggggcgcctctaggggaagcacaggggagcagctcctcacggactctatctcctgctggagcgagaaggaagagccctgctgctcctgtcgtcggtgttcctgctcctcatgcaggcgatggtgcagtctctccaagtggctggactgtccggccacggggcggcgaacggacgctcagcaaggcgggagggtaagaaggggatgacggactttcgtgcagtgtgtctaagtcgagccatctacaaaagacatcacaagcaaaagggtgagaacagaatgaatatgaccagcaaataatgaatcataaataaatgaaggattagaataaaacacaactttcagcaaggta

SEQ ID NO: 22890 - DNA, 511 bp, Arabidopsis thaliana landsberg
  unsure (1)..(511): unsure at all n locations
gcacgacatgtaaacaagctaaggctaagtcacaaccccacggtttgtatactcctcttcctattcctttgcacccttggaatgatatttctatggactttgtagtaggtttgccaaggactaggacaggtaaagattccattttcgtggtggtggatagattttctaaaatagcacacttcattccatgtcataaaagtgatgatgccatnnnnnnnnnnnnnnnnnnnnnnnnnnnnnnnnnnnnnnnnnnnnnnnnnnntaaaaccatagtatcagatagagacactaagttccttagttacttttggaaaacgctttggtctaagttaggaactannnnnnnnnnnnnnnnnnnnnnnnnnnnnnnnnnnnnnnnnnnnnnnnnnnnagttaataggactttgtctacactcctgcgtgcattgataaaagagaatttaaagacttgggaggactgtttacctcatgttgagtttgcatataatcattctgtgcattctgctactaa

SEQ ID NO: 22891 - DNA, 517 bp, Arabidopsis thaliana landsberg
  unsure (1)..(517): unsure at all n locations
ccgtgaaactgtttttggagattttaaagtcttattgatgttttcattttgtttaggagggggagatgagtggggttggcgtttctgaggtggatcaaaaagtggaggtagagtgggagacgtgactgtagtgcctggagtatcagcagtgaactcattccaaaaactagctctaacaaagaactccggctcagcctgtgtggggtgtcgattgacaaaggtggtggtgtcgatcgacactatcgctgtacatccattctcaacaattagatcgtgacttgcattttgtagctgccagcttgtaccatgaaccttatctatctcaacaccagtgtctatggagtgctctacagagagtgnnnnnnnnnnnnnnnnnnnnnnnnnnnnnnnnnnnnnnnnnnnnnnnnnnnnnnnnnnnnnnntctcattcaaagcactcggactcattgtacatacagaactatcgagtacatccttcagtatcgagcccactcgattttgctgcgtcaaacgctga

SEQ ID NO: 22892 - DNA, 476 bp, Arabidopsis thaliana landsberg
tcgaggtgccgattgctagcgtaaagagagtgggtattcaaaactacttggtcgtcccgttggatgattccttttaaagcttttgtaaatcgaatgaagtcgcatattacaaaagagatccagataacgcgatagatgtggttgggaaaagcaaaaggagttctgatgtatctggactgaaattccgcgtcttaagggagttcttgcagcttggttatggcgttcttctatcggatgtggacattgtattcttgcagaacccttttggtcatctgtccatagactctgatgtggagtccatgagcgatggtcatgacaataacacagccttatggcttcaacgatgtgtttgatgacccaaccatgacacggtcttgagactggctacacaaacaggatatgggttttcaattccgggtttttctatctaaaaccaactcttccttcaattcgagcttctagatcgggtgacagat

SEQ ID NO: 22893 - DNA, 594 bp, Arabidopsis thaliana landsberg
  unsure (1)..(594): unsure at all n locations
ttcccgatccaattttatctctagcttccagttcatgaaatctagctgataaatggctttgaaatctgagaatccatacttagttttgatcagtgattcacttatcttgaatgttcgttgattagcttgtttagtccctgaggtttcggttttaagctgtgttttggctgatcacatgaataacaaaagatagtgaacttgtggatctagtagcagccatgttttccctgtttctgtatgtgatagtctatgttaagagcttgtattgcaatggaatcgattgtttaaactaatttcttgtatagggattctttaatttcacagcacggaggccgcaacatctcttggaaattttggagttaggttacaatgttatgtacaacgatgttgatatggtttggttgcaagatccgtttcagtatttggaaggaaagcacgatgcgtacttcatggatgatatgactgcagtatgtatattntttctcagacatcttcttcattgatggtanttggatagtgtatttattatttgcctgatgggngcagattagcccttgatcactctatgattaccacctcggtaaaaaggaagac

SEQ ID NO: 22894 - DNA, 565 bp, Arabidopsis thaliana landsberg
  unsure (1)..(565): unsure at all n locations
attttgacgatttgattgggatggaagctcatatggaaaaaattaaatcgttgttgagcctacactctaatgaagggaagatgattgggatttggggtccttctgggattgggaagaccaccattgcaagagtcttatataaccgtttttctggcgattttggattgagtgtctttatggacaatattaaagagttgatgcatacaaggccagtgggttctgacgattacagtgcaaagttgcacttacagaaacagttaatgtccgagataaccaaccataaggataccaagattactcatttaggagttgtacctgataggttgaaggacaagaaagtgcttattgtccttgatagcattgatcaatcaatacaactagatgctatcgcaaaagaaactcaatggttcggtcctgggagtcggattatcatcacaacgcangaccaaaaacttctgaaggcacatgacatcaacaatatttacaaggtggagtatccatcaaaatatgaagcttttcaaatcttttgtacgtatgcttttggtcaaacattccctaaagatgg

SEQ ID NO: 22895 - DNA, 561 bp, Arabidopsis thaliana landsberg
  unsure (1)..(561): unsure at all n locations
acaacaaatctgttattatgtgacgttttctcttaacacctttttacaccngccaacactgagcgnattgaaagatttctctagaaaatacgcctgncaaaccacatgaaagtctgtggttgaataaactaaaaatctgtcaatcaaattaaatctgctataatttataaatctgttatcactatcttctaagaagtctgtcaaccaaaaaagtctgcaataaaaaaactatcgcagttaaaaaagtctgcggaataagaataaatctgcctataactaaacgatagacttttgtaaaattgctgaaattttttttaaatgatattttcgtatttgttttatttttaacacatgagaaaagggtattttagacaatcaatttaactctaatattttataagacattctaataattaatctcactatttgggttaacctaattttttttcctaaaaaaaattagcccaaaaaaaaaaacagaaacgaagaagattagtgacattatgatgattaagtttcttcacaaacttaacaaaaaaaagtttcttccaaaaaattcac

SEQ ID NO: 22896 - DNA, 753 bp, Arabidopsis thaliana landsberg
gttttgagaagtggttattttagtggagggcagaattaattttttaagggagacaatctgttaaattcttagaagtgtataaggaaattagaaaatttgggggtcacaagttctccctacttgccatacgtagatccgcccttgcattcatcaatcacacaaacctatactaataagttatactaattattttctagttttctttatacactatatcaatatcctaacaaaaatttcaaatatttgtatatacttcagatttttcttcttccgattcgtgaaggttttccggattttattcgtcatggttttcttcttccacttctttttcctcttcctcttcttcacagctttcttcttccactatttttttcctcttccacttcttctcggttcacatcagcttcacggatcgtgtcatcacggatcctctcatcttcactctcactcgaattcgaaggatagactaactttgcacaaaccataattcccttgcataacaacaatcaaattttggttaacaaagaaattagggtcacattcaaaaccagacaccgatatggagctacaaccaatacgagaaatcaggctatggagacttggacgccagcggaaaacgacggatctaagggcgatgataatgcgactggctgagagaagagagagagaatcagcgatagagatcagagagtcagcgacggagggagattcacgcgagaaagtttcgacgacatgccgcgagagataggagcg

SEQ ID NO: 22897 - DNA, 1071 bp, Arabidopsis thaliana landsberg
ctttgcctcccttttttttgccaagtcgtcataaaaaaatgggtgcacaattcaccttttataccgtcattatcaacgttactgctacccttacaatcaatgtcatcgctatcatcaccactaccaccatcgctattgtcaacatcaccgctatggtttatctcggttgcttgggttgtcaattttgtatcttagggtatagatttttttggatcatatcggtttaactcgatcatttggatcacttaagatataacgttctttattcgtcatacatttagtttagtattttgtgttctctaccgctattatagtatataataagacattacagtgttttatactattttaaaagacatgatttgggtttgaatttacagtgttaatttaaatataatttataaaaaatttatatattacaacatttattcttatatgatcctatatagtataagatcatatagtataacatatgtttttttttgttacaaacacttaaccacgtaaatgtttatatccatttgaaaaattcaatcactacatcaattcacgtttctcactcatttacgcgtacgtccacaattccaaatgcagctacgagtgtatcattctcctttcacacgtgcgtttgcatcccttacaagatggaaaagagtttttcgtctttctatcctccacatgtgttactttcttcatttaccttattatggtgctatatatttaataattttagctgaaatgaaatggttacttacctaattcacccatttatttattttaagtttatctttttctttttcctttaaattcaaacttttcttttcttcttcttcggaaatcgacgtcgagtttcacaggtttagttagcgggccaatctcgattcgtattgagctaattggagagtgtacaacctatttccaacaaattatatattttagatatcatttgaatttagacttgccaaattcttagaaactaaaattacctatattaacaacattaaaaagtgaaattcacctaaacaagtgaaaaactactatactataaaaatacaaccccaaaaaaaaaaa

SEQ ID NO: 22898 - DNA, 851 bp, Arabidopsis thaliana landsberg
gaaatatcaagaatagaggtacaatatcattaaattaaactttatttaattatcaagcagcggtataaagagggggtttgcatagacgcattgtgggtctgctatggctttaggttactaatctaaaccaaaaataccaaataagcaaataaaccacagagcagaataaaagcaaccaattgtataagtaaattgaacacatcctttgacgacagtccctctccgccacaacatttgacatgtcgtttggcccaatagaaactcgccactagagccatgatgaggaggagaccaacaagcacggtggctataataatgtaaccaatattcttcatattgctcttcgaattcactgcaccaaaaatttcttctttttaactttgttttgtgtcttcttcttctccggtataggtgatgtttatatacacgtcttgtcaacagaaaagttaacatttttcactaaggaacattggaagttttacattttacggcactttcttgatcctcataccatcatatatgtacacatgtatttagtgaatcaaaactattaaactattttaacatttttcttctaaaattaataattaatttctaaatttccttaattattgtacaaaaaattaaaagcaataagtttttaaatttcattaattatatgatgaagagtttatatttttttttctcatttttcatttttttttaattttttaattacaagatatatatagtttctttatgtttaattttttttatatttaatattttcttaattcaaaactaaaataattatatttcaatttttagtttatttatttatttataagatactaatagtttctttatattta

SEQ ID NO: 22899 - DNA, 459 bp, Arabidopsis thaliana landsberg
ttattctacatacaaactgtgcctacaggatcagacgttaggagggggagcagcaccaccctcggtatcgactccaccctcggtggaatccaacccgacctcgaacaagcaacatggtcggaggatctccaccttgaaggaagatgtcagtaccgtgcctgggccatcgtcgccagggtgtcctacacgaacccagtccaagcagacgggtggaccggccgctccatagcctcagccagctggctctgaggacaccagcccggcttatggactccgcagcccgactccagggttggtcccgccagcggacgacctggccaggtcccagccgccactgcgacgcctcggcggactgagaagtcccctactccagggccgacgaagtttattatacaggcaactctgcctatgtccatgctgacgttgctgcctacggcttcggcttatcatagagcagcc

SEQ ID NO: 22900 - DNA, 669 bp, Arabidopsis thaliana landsberg
atttcagtttttatagcaatgaatgatcagatccgagactgcaaaatataaattaatttaatttttaccataccacgtgaatgatctgtgttttcttgtttgatattgttctttctctttccattttaatgttagctcgtatcttatagctataactatgacctatccgttacaaataatactttatgatgatctctctttcaccccatgttaaattgaacataatactcgtatagtcttaagatttctgtcttatctttttcaagtgtatgttccaaccaggtatcgtggtctcgtggtaaacaaacctcgactgaggcgcccggtacccgggttcgatttctggccaccagggaattaacatgcgcacttgctctggcgcctcagaccaccagttccaggaagccattaaatagatgtttaaaaatccctggtcgcgggcttaaacccagtggactagtcagatcactgtgtggtttggacattaagttgttaaaaaaaaaaaaaaaaaagatgtatgttccattgctaattagagaggtacaactttgaaaagtgtaaggtttcatacatgtaactcttatactttttattggccacaccattttttttgtatttcatcattttaataatatttcagaattctccaactaatccatgtttaagtaa

SEQ ID NO: 22901 - DNA, 452 bp, Arabidopsis thaliana landsberg
tgaagtataagaggttttaaaggtagtgactaaatccattacctatcaagctgctaagtcctctggggccgcatctgacgaagctttttcagaagaaacaagaaccttcggctacaaagaaggcagatgggctgaagaagggaaggattggtagcgtgatgcaagctattgaaaagacgcctccttcggcctcggtatctaagatagcacctactgcaagtactgaggccgctgccgaagctgcagctgccaccgaagctaccaacctatctgccaaagctgcaactgccaccgaagctaccaacctggatgctaccttgtttgggaatcattaattggtattggatatgggcacagaagaaatagttgcagctgcggaacatgtcatggcccagtgcatgacaaaggaaagaaaactgctggagctacttcggctgaatgaggttttgagc

SEQ ID NO: 22902 - DNA, 602 bp, Arabidopsis thaliana landsberg
tatccagcataactacttagatgcaatgcgtacctgtaaacatttcggttttcccgacctgtttataaccttcacatgtactcctaagtggccagagatcacaagatttgttaaagagcggaagttgaatgctgaggacaggccgaatatcatttgcaggatttataaaatgaaactcgacaacttgatggatgatctaacaaagaatcatatctttagcaacaccaaatcaggtactacatgatttcatatttttatacatatatttcatgaattttaatttacaagtgtcattaactcataattgatatgttcaaacagatatttatacagtagaatttcaaaaaagaggtcttccacatgctcacataattgtttggatggatcctagatacaagtttcctacagctgatcatgttgacaagattatttttgccgaaattccagataaagaaattgatccagagctatttcaaactgtctcggaatgtatgattcatggaccatgcagattggttaatcctaattcgccatgcatggaaaatgtaaatgttccaagtattatccaaaagaccatgttgagaacacgtctcttgacaatg

SEQ ID NO: 22903 - DNA, 590 bp, Arabidopsis thaliana landsberg
gtatatttttggcagaaatataaagaattgcttttttttttgcggaaaacatgttttagacgggaaaatcattgaacacattttggcggaagatgcgaaatcatgtttttgacagagatacaaaatacggaaacacgtttttgacggagaagcaaaataaaagccatcaatataaaacatagaacaaaatgcttagatgacattcgggttgagaggcaacgagaaacccttgtacatttttgatggaactcatcatattataagccacacccccttataaggccaaatcacaaccaccaccgggaatccacccctgatgccaaggacatcccaatagccatgggatacatgcaaattcacatcacaactaaatggaaaggggaacatgcccttggaaatttctccaaatatcgacaatatatacttatagaaccccggtttataaggaatccttataaacttatagaggaagcgaaaagaaaaatctaacatgagatgtaccatagatcccatatgaaaggtctgatcacggtgtaagtattaaaactgtattatatactcaacttatatatgaataaagcatatgttga

SEQ ID NO: 22904 - DNA, 3789 bp, Arabidopsis thaliana landsberg
  unsure (1)..(3789): unsure at all n locations
atttttattaaagtgcaaaccttctcgttgtgatatttaattggactggcaaagaatatatttaatacactcaattcaacttcatttttatggcttgatcggcatatgttgtgatggaaacatctcccttgaaaannnnnnnnnnnnnnnnnnnnnnnnnnnnnnnnnnnnnnaactgaagattcttctcttgtttcttactccccgttgccagttttcgtgttccataggtaaatgttagagagaggaaagggcttcagataccttgcttctggcccaagataatgtctttttggtctaaagacatatgattatttttttttttttttggatttttcttcgaaaacaagacaagtttttataccattaggttatgaacccacgctacgcgtggatctatttgtaaaaattttaaaatttttgtctgtgattaaatttttttattgaaaattttaaaagatatgtttttatatgtctacttgttgttaatattataaaatctttgaattttaaaattaccatgacaaatagttacaatttaaatacataactaaaaataactttaatacaacttttaggttttacaacatttatcaaaaaacattttcttggttcataactctctctttagctttcgatatttaggataataacgtctttttacgtatgaaataaattattgtatggggaataacttcaacgactttctccattttggtactcgcaaatttactattgttttttgtttatcttcgctgcattatttagtatacacctcttctaaaaataagatactatatagaaatatattcataagcttatttacactttcttttaataacttatatttttctcacattcttttcaatatgtatacaaaatttatatcttcacatttttttacggagagctatcactctccatatctttttgcaagcactcgttttatttgttatattctttcttacgatatctcttttcatcctcttattattttctctaagcaatatgtgtcataccttctaaacttttcacatgcttcatatttcttcttcgaaaatctcttccttttcttgttagtatatgcatttttcaagctcgtcaagatatactctgtttgttttctgttattctaagaaaacattttagcttctaaattggtacttaactttattacttgtaacaacccgctcagtgggacccgcacacgtccactgtctgcgggtcttacggggcgggttgttacattacttctctcttttgatgtagtttacatcctctttcgcttcatgctttacagacagaaaaacctcaacttatatccactaggacttgattcaaattgatacgaataaaaacaccaccatcaaaccacgttcttgttacgtttctttaacgcttaaagaccaaacacaccttaatctctcttcacttcaccttcttgtgaacaaatcttttacatacttcttatctacaatgtctatttttgttttcttatcattttgtctaagctctgcataccctaccttccaaacttttcacatgctctatatcttttttttgaaaatcccttttttcttgttagtaagtcgataggtagctgagtcaagtcaataaactctttgtttgaactctcaagaataaaattccggttttgctttgttttgtttttttattattctaacaaaatgttttatcttctaaattagttttaaactctattagttttctactttgatgttgcagtttagattatcttcacttttatgcttcccaggttaaaagacctcaacttatatgactaacattatagctaaaaacgctaactaatgacatgtctaaccgcgattcgttgtttcaaatccaataaggacatcctaagaagcaaataacatcgacttataatgtggctgctctggattagttaggtaaaatcctatacaggtttgggtttaatattacataattaaaattactgaaattccttttctaacagtttaaatttaatatttgttattttccaaatttattattttaaaatagaaagtaattactattttcaaaaatattaattaattagcggctaaatatgttaatttttgatgtggcaactcccgattcgttgttttaaatcctacgtgaacgcctttagaaagcaaatagcttcaacttttatatagtatagactaggttatcaacccacgctacccgttggtctattcgtaaaacttttaataaatttttgtgtgactaaaattttttattgaaaatattgaaatatatgtttttatatgtctacatgttgttaatattataaactctttgaattttaaaattaccatgacaaatatttacaatttaaatacataactaaaagtaactttaatacaacttttaggtttacaacatttatcaaatgaacatttttttggttcatgactctctctttatctttagatgtttaggaaaatgacgtcgttttacgtatgaaattaataatcgtatggaaaataactacgacgactttctcattttggtacccgtaaataggggtggcagacgggcgtgtccgacgccgtttggaccgactgcgacgtacccgcttttcttctgatccgtgacggacctgcccggcgacgaccgcgggttacaaaactcagtcctaacccgccccgcaaagcccaacggtttgcttatgctcttgcgcagaaatattcagaagtgagctatagctgctaaatggtcttgagtttgtttattctcttgtttcacatcagagaatttaggatctttgaattttggtttatgtaacatttcatagcttgataattaatatgtcagtcttagctatgtttatgtctgtgtgtatattttctggagtttatccacaagacccttgtttcaatttcctttagtgatttcgtttttacatttaaaaagtttgacttattcccattgcaatcaattttcatgatgcgtaattctgtgcatttgtatcaaatttttagtgctttgcagattttattttaacgcaagctcttgtttggtgtttgacttgtttagtagaggagtgagcttaaggcaagatggtaagaatcagtgttcttaacgatgctctcaagagcatgtacaatgctgagaaacgaggcaagaggcaggtcatgatcaggccttcctccaaagtgattatcaagtttctgattgtcatgcagaagcacggtatgattatcccaccagattttatattttagttattcctaagattctcggatgttgttccttaaattatgtggttaccaatcaaatgcaggttacattggtgagtttgagtatgtcgatgnnnnnnnnnnnnnnnnnnnngtcgttgaattgaacggaaggttgaacaagtgtggtgttatcagcccacgttttgatgttggtgtcaaggaaattgaaggttggactgcccgtttgctcccttctagacaggttcgctcttcttataaactttctagttacagtggccttatgaattataagatcaagatttggaaatgtttttgaatcactttgcatactgtcccgaaacatcaatagtagtagctttgtttaatgctcgctaatggtattaatggattgaagctatttaattgtgcagtnnnnnnnnnnnnnnnnnnnnnnnnnnnnnnnnnntatggaccatgaagaagctagaaggaagaatgttggaggcaaggttcttcgcttcttctattgaagttttattgtatggagaaacagattttcattgagttattcttaactttt

SEQ ID NO: 22905 - DNA, 279 bp, Arabidopsis thaliana landsberg
ttcacggcttggctccaatcttttttgcttataacataatttaagtaactttttctcccttttgctttgtataaccaagtcgcagcccacaaaagttcatcctatttttacccccaaaatatttgaaaacataaagtatcttgttaagtaactcatttacgtaaacatgaaaatatatctatgtgtatcagtttcattatctggtagcctgactgcgagctgtatacgccgcaaaatgcttggtaacaacctcttttctgggcagcaaattcaattggc

SEQ ID NO: 22906 - DNA, 3464 bp, Arabidopsis thaliana landsberg
aagtaagttcacattgtgctttccataaatattttccgctattggaagacatacctgttacttagttatacttaattcttcttttgcttatcacgttcttgagtgagtagatcattcaatgtcatgttgttgttcggaaccccatttagtttcagtatatcttattaccaggttacgaagttactcatgctgtacttggatatacttaaacgtttcttatgtgatttgaaacagaaatcgggttaggtctgacaggatttggcgtattcttctcgtttttgggaatagtcttcgtctttgataagggattacttgccatgggaaatgtaagtatctcatgtatctttgtttctatactttgaccactattattgcatacacgtacagaactagtatgagagcttgtttcttttcatattttctcagattcttttcatctcgggggttagtctaaccattggcttcaagtctaccatgcagttcttcatgaagcgtcaaaattataaggtttgtttctgtctttgtctacattatcaatagcttgggccagtctctgctggatttttacagatttctccttaatgtcatctatgtgtgttcatttggctttatatgttatccactcagggaaccatctcttttggcgtcggtttcttctttgttatcatcgggtggcctatcttgggaatgatgttggagacctatggctgtttcgtactcttcaggtacttttgcctattttcttcttccttactggtattgcttgaggaaatgtaaactgatacttaaaacgttttgcttttgcagtggcttctggcctaccttggcagtctttgctcagaagatacccgttctcggttggattattcagcaaccatatattagatcggtatgtgtccaattgcaaacaactatagcaaacttcgcatgaaattcttagacctcgaatacaacacatacaaaactcataatgactcccagttttgccttttcaaattacagttgataattctctctttgtttctgatgatcttgagttgctaggccttttctcagtttggcttaactttaatattaactctgttgcatagtctgccaattgttggctaatgcgattacttgacacttttatttatgtgatgtgtagttctttgacaagtaccggggcaagcgagtgccggtctagtcttccatcccgagtagagagacgattcactgagctagatgcagctgaacaggcgattaaagtttttggaagaagaagtttcgtgatcctgtagaaaactaaaaccataggagaaagaaaataggaaggaaaagaacgtacaatttgaagctgtgtgtctatgtttcaggtgaagtagatgaatcttcgtccaggttgcaaattgcaacagaatgttaaaaatgtaatgttttatttttgggttagttataggttacacctcaattttggaaactaattaaagagaaacaattgtttctattcacaaaaactttttgtaaccattacgcattacataattttaatcatattgttattaacttaatggctctatttgaccaaaaacaaaaacttagaggttatttgacaaacagattacttaaagagggaccgaaaaataaaaacacaaaagaactgagtgaatcaactaaagggtaattccggtatttcaggaaagttttaaggacgacccctactaaaggataaagtagaaaccctagtttgaattttcacggccgacctctctctcatcctccgagtattgttggcttcagaccaaatcttctccggcgctgcggcgtttcccccggtacggagtcattcacctctctcttttctctctcgcgctccctctctctctctctctctctatctctggctctttttgattgtacaagtattgttaggatcatacgtttgattctgtatgtagcatctgtctagtcgacgtcaaatcgatataatgtttccaaatattgattggttaccaaaactgatacgagaatattgaatctctatgggctatgtatgtatatcagagttatggctaagccatgggcacattttgtaaacactaatgttgtagtttcaactttcaatggcctaattgctgacttcaacatgtttttaccatggcagcaaaaggtagaagcagctcattacaggaaccatgatgtcctttgaaatgaatgaccggaaaagtaagttcacattgtgatttctataaatattttgtgctattggaagagatacctgttacttagttgtacttaattcttcttttacttattacgttctcgagtgagtagatcattgaatgtcatgttgttgtgggaaccccgtttagtttcagtatatcttattaccaggttacaaagttactcctgctgtacttggatatacttaaacgtttcttatgtgatttgaaacagaaatcgggttaggcctgacaggatttggcgtattcttctcgtttttgggaatagtctttgtctttgataagggattacttgccatgggaaatgtaagtatctcatgtatctttgtttcatactttgaccactattattgcatacacgtacagaactagtatgagagcttgtttcttttcatattttctcagattcttttcatctcgggggttagtctaaccattggcttcaagtctaccatgcagttcttcatgaagcgtcaaaattataaggtttggttctgtctttgcctacattatcaatagctctgggccagtctctgctggatttttacatatttctccttaatgtcatctatgtgtgttcatttggctttatatgttatccactcagggaaccatctcttttggcgtcggtttcttctttgttatcatcgggtggcctatcttgggaatgatgttggagacctatggctttttcgtactcttcaggtacttttgcctattttcttcttctttactggtattgcttgaggaaatgtaaactgatactaaaaacgttttgcttttgcagtggcttctggcctaccttggcagtctttgctcagaagatacccgttctgggttggattattcagcaaccatatattagatcggtatgtgtccaattgcaaacaactatagcaaactttgcatgaaattcttagatctcgaatacaacacatacaaaactcataatgactcccagttttgcctttccaaattacagttgataattctctctttgtttctgatgatcttgagttgctaggccttttctcagtttggcttaactttaatagtaattctgttgcatagtctgccaattgttggctaatgcgattactttacactttttttttatgtgatgtgtagttctttgacaagtaccggggcaagcgagtgccggtctagtcttccatcccgagtagagagacgattcactgagctagatgcagctgaacaggcgattaaagtttttggaagaag

SEQ ID NO: 22907 - DNA, 2542 bp, Arabidopsis thaliana landsberg
atgttcttgtaaagctcccgcaatgtatttcgccggtgagagagaagacacgttttgtttcaacggtaatgttttgtaatgattcgacggcaaaatccgcggtgagattgacgtgaatctgaagattctcatgcttacattagctgtgtgaattgtgtgaataaagattgaaactttacgcgtaatttacagaggctctgtttcgaactttccaaaatgcaaagaacgagagagagagaagtcggtcaaacgacaacgtttgatgtatttgataaaacgacagcgtttgatatagttgatatagttatgttttaaggttgaggcatatgtcatgtgttacccttaatggtagtttagcaatctcattaatttgcttatatgaacgaagaaagtcagagcttggggacataatgaacgtccttccatgaacgcctgcactcaacatgggggctccacctgctgttgacacgggaggctttgtagcgtttccagtcacgaagagcaagactgagatcagagatcttagcagggatgtggacgcaacagttggcgtggacggttgtgacagcccccatgtcagggctgtcttggcagaaaccgctgaattcggccgtactgaggaagccaacgttgagaccaagctggttaaagaagccagagtctaggagattcttgaggacgtcttgttccttcatgcccaaagacttgagcctcatgtcgtaccatttctggaagagggagatggtcttgttgttggaccgggcatggtagaatcccgtgttgatcaattgtcctctcacgttatttctgtccacgcttatatgcatatccaagctcacgtttagccgggacaagggactccttagccacatcacgtccgtatcctaacattgtatatacactacttgtttgagcaacaaattaagtgttttgttatatatgttacaaaatcaagggacggacctaaccgtgaaaataatatggtagccgcggctgaggacgtctaggagcaagcgagtcctcctccacatcatctctatgaaatcttttgacatgtatactttctctccctccaagtcaaccccttccgtatccatcttgtagcaatggagcctcctgaagaggcagcgatcgtaggccgtctgatccgctgcaaccaccatcagatggttaagaagcgggcgtgtcccctctccttcccaaaaactctccaaaaacagatccagcatcgtcctccctcctccatcctcctccacgtaagctttgttcaccattgctattatcaccgtcttgttgtttcctgtcgacgccttgtccagcaccgtctctagctcgtccaccggatactgtatcaatctctgtcacgtaccatttcaaaatatatttcaaatcttcctttatttgtactctagaattccatatatattatatgaatcaacttacagtgttgacattttgtaggagaccggagatgggatcagaagctgaacgtgatgagaagtagatatataaggcgccggcaaatagaagagcaacggccagggcgagactgccggaggagttattgtaggaagtcatatgtttttggtttttgttcggattattaggatatactcacaactatttcatgtgccctattttctctcttttgattcacacaacaattcaacactatatttatattaccggatttggatgtataacaccagtttaatgtgaatatcacaaacgtttttaaggttccttctcgaatacgtcacacatgaatcatcttttgttctagggtttttgtacttcctactttagtctcacgattatcatcacgccaacatattattatatttgctatagagattagagaatcttataaatatttactttatcaatccatgctttaggtacccactaatcatatgtagttgtaagccgagagagctccaagaaaggttacatatgtaattgggttctatacggaatccttcatcctatactgaagagtttgagtgcttcatcagggtttcttaattctgatctccatatccatcaatcatcgaaaacacgtttttctcttacatttggtcaaagactcttctcttgcatcatctttgggatcgttggtagtttaaaatgatcaaatttcacacaataattaaaaaaaaaaacgatatctataatagtccaactaattaataattctaataatctatataattatgtaaatattataatactttgaaaaagaactataaaatatctccaattgttctgatgtttagttattatactatctgtattttcctttcttacattttaacctccacaatgttatatagagcagtagttattatgatgttacttaaaattcatattcacaaattacacacttcaaatatattgactatatcaaatttaatccaattagtcatatttatcagcgatattaccgatttcttgattataaaactaagtatttttaaatagaaacttcaatatgtaaaatatgcacaattttaaaattaatgtcaaagactgtatgtatacg

SEQ ID NO: 22908 - DNA, 577 bp, Arabidopsis thaliana landsberg
actactgatcagaggttcgaaggctggccccttggaagggttcgacagtcgcccaagagcacacagagcgagggatgactctgggtacgtccgatacatggctgacgctcgggctacactcccgaggtaccctaggacatttctgagaccagcaggagcgatttcgtaatggaatcccatcagagggaggcatcgagccctcggaccctatcaaacgggaccgggtccggcaaatcacctgcaggtacttttggagcgcgcctctgggccactagccgacccttatcgaacggggtcgggcgtccactcggatcacccgttagcaactcactggagacaccatgttcggcgccctccgagggcaacatggcgctttcccccttcctccttgcggaaaggcgacgaaggggcgtatcataaaagtcgagtcagtccttgatcgtcctctcgctccgtgcagaggctcgggggctgctctcgcaaacccagctacgtgcaaaccgttgacagcatcaacaaaccagcctgaaaactcggaacctgaccatgcatccggactacgatcagatcggatgag

SEQ ID NO: 22909 - DNA, 488 bp, Arabidopsis thaliana landsberg
  unsure (1)..(488): unsure at all n locations
acacangcaccgccgaaaatagaaaagcagcaccgcccatactttttactgaccccaccaaaancacagacggcgggtttgaatttacgtccgaattcctgcaccaaatctatatatgtgtaatgtcagtctcaatcacgattgcctcttaaaactaccaaaaaaaaaaacgcattgaaatgggatattcccttccgtaactaaacctgaaaagctcgtccgttatgagaagcgtttgaattgccattcgttcatttgcaactcccacgtgttttggaccatagcatgcccgatctggttcctggattaaaaatcaaaaagatatcaacacatattgagagattcttaaaattcgatgagaatattaagaatcgctgagagctttgacctacagttgaaagcatgttgtgaaaatcattgagagctttgacctacataggcaaattcacatcacttaggcagatgacataggtacatttcaagagccc

SEQ ID NO: 22910 - DNA, 2981 bp, Arabidopsis thaliana landsberg
acgcctccttaccgcatcagaccgcaacattacactactcactaccacactgggttccgcttcttgatctttttcattcatgccaccttgaaaaaatggaattgattcgatcaatctatcactcatcttcaaatacgtcccgagatctatacattaataggacatgcatcagcatcagcaacataaatttgcataataagactaccaaactgtatggtaataagcgtaatgaatatcttattatataaagtacggtttcaaaagttactaactcaccagattatgacacgtggcagtttatcaatctaagattttgacatgtattagatttttttttacttttttccttaaacaaaataaaggaaactaaaaaaagaaacatattaacaaatattgatttatatgtctatatatatgattaatttttaattttcttaaataaaatggaaaactaacaataagatgtagtttatagaattaaaaataagatggaatatataaaaaccggatagttcagattactcatgtgtataggaaaattaatcgcataggaatggattagcaaacaatgcgttttagttaccgattattctacatttatttgatgtttgtcagatggttgcaagtccgacattgttagaagataaacatgagatgttgtttctacaaagtattcgagtgtacttttatgttatgaataaatcataggggacttttgttccatatacattatcaaaaaagaaagatggaatatataaaataattaaaaaatatataattaaaatattgtttattatgataaaatatataattaaaatatattgtaaaattgaatgtgtatgattaaaaatttattaaatacaaaaattattaaattaaatattagaaaagtgtgtggattactatttactattcaaatttaaatattatcgataaatatttgaataaattcatatcttacacccgtctatttaggcggaccttatctagataataacaaatatttattatccataaatgttaacaaataaattttagttaatatttcaaaagttagtaactcacgagattaccaactattaaaaaaagaaaatttttacagttaataatctattatagaagaaaaaggattatatacataattctaccaaaaaaaggaatgtaacacatccaactctatataacaaagagataatctcttattttttctcacataacaaataaacctcaaaatcaatattgatggcttcggtcttgaattgctagcaactgacgggaagctcttatacgcagagggtctattggtacgtaaacttctttctgggctgtgactataacacatacactgtcaaatttattttctactttagacgtgcatgaccagacacattgctattagagtattattgtaccatgcatgcattagaaatattattcttggttgttacgttgactatactacgtagtatatcatgcttacgtttgaaaaaattattcttcgttgttgtttacatttaattatgtatctaaaaattatgcttatcatctaaaaaaggtaagcaataaggcatgatattaccgtacttgttatataaatgtcatgatctcctaagttagtaactttcaaaaccgtactttataagatatcatgtacacccaacaaacaaaaaaaaaggtccagtataataccgagttttggaaaagcccatatttatgcccacatttgtaggcccatttttgaatccgtcattttcattcgggaagtcaacaattttttttcaaaaccaattgtcttcacttctaggcttcccgacatcgattaatcaatttcagagagcaattctttaacatctgttaacaaccatgtagctcatgttacaattcaatactttgtgctacacaatttgattcaagtattaggtaagagtttattttcctccgatctgattttttataatttgattcgatcaatttctttttcaatcgttttatggagatatgtagtacacacatggaacagctaattggttttattcatacagctggatttatagttcacaatctcaatcggctactcaatatgcccaactatcgatcaattagataagtcaatcgggattttcaattaagaggtgaatcgaatttcaagttgtgcaatggagacccgaaaatcatatttagtgacctctgtaatcaatttgtcgcaaagacaaaagtaagcttccaaatatattcaaacttctttgcgtttaattttcatgtttgaatttgggttttgaagtaaattatataagtgtcatctgtttatcaaatttattctgacttttttaaattgcatgttttagtattgggttttgaagatagttttgagtataacatgtatccgatatgaatcatagattgatgtgctattttctgtatgaacactaccctatataacatggaataataacgtagtttgaatttgataaacataaatagaaacgaggaagttatatgaatatgttaagtaaatatttgtactatgaatttaccaaagctagataagatactgagtttcataattaataactaaatatcaactataaatcttcaataagaaactatgctgtgaggaatagaaaattaagtatgaaaattgatatttataaatatagatgctacaagtaaattggttatgaaatatcttggataattagttaatatttttgattcttatttgtcatagattgtatgttaagcattaaattatattattaaagcatgtttcatttggtaattttacctttttattaacataaatttgacttattcatttattttaaatattatagtttattctatatatgtaggtaaaagaaagagagaacgatggcgagaagtcttctagaatcaaaggtatttagagcataagtaaaacatgaattattcttttattgaaataatatgaactaaaaatgtaaaaattggaaataaaaaga

SEQ ID NO: 22911 - DNA, 1460 bp, Arabidopsis thaliana landsberg
attcccgaggatcacgcgaatcttttccttctgtctagctttatagcttgaacgcgttttaaatgggggggggggatccgacgcgcctttaaaaactctttatatatggggagccattccttcgagatttcatttgaagttttcaaagaaaataaacaaggtttgcttccttctctctgatcttgatatttctatcgtttttcttttccggcgaagctccgtcgttctttttgttatttttgatttttccggtatagaaattcttgttttctggtcgtttcccttctcgtcgatcgtccccgagccgagaatgagttctaaacagtctcccgtcgatctcgagcgcttctcttgtcgattctagcgattcaaatcacccagatgaccttccttcgatctataaacagagagcagtttggacgtcttctgaagaggattatgtgtcttcttcgagtgcctccgagcagaggggctgtgtcacggctcgggaagataccaatgccgatattgctagggaattggatttgcccgatgatcccgagttgcctctcgttcggaggccccttgccccgatggctgatgaagccatgacatccaattgacaagatgtgcccgagcccttaatgccgacgataaagattgaggactttctttatttcggcccgaacgagacataagacattctgcgtcttaacgagcagaggacttttgagaaagccgagaagaagaagaggaagaagaataaaaaggcgataatgcgggatcctcctggctcaacattatgcaccgagcggtctctttcggatctcagggcccgattcggtcttggtgcagtaaccttgcgtgtgtagagccctgatgagcgagccgacaatccccctgcgggtttctatactttgtacgaggggttcttttatggttgcttcttgtggttgccagtcccaaggctggttttggagtacgtgacatcgtactagattgccctctcccagatcacgatgcggcccttgagacatctgctcgggattttgattcggagttatgaatctgaaactgaaattacgcttgctcatctaaggaattttctcgagattcggcgggttccaaaatccgaagtggatcggtattacatatctcctgctaagggtaagaaaattattgacgggttcccgagcaaggatgagtcgtataccgacaacttcttctacgtggctctcggagatgttgttcacaatgttcttctcgggacggttctgacgagatggggaactttgggtagttgtagttagcgatctatttatgtccgacgcgatttatataatttgtttctttttcaaactagtttttcctttgttgcagaacgcaccctcaagttcctcgagccgattcctgacgatttcctctcagcttatcacgcgttatcagctcggaagtgtgattggtcgaaacatttctctcgg

SEQ ID NO: 22912 - DNA, 1217 bp, Arabidopsis thaliana landsberg
tgcaatagtgtagttcatcaatgtaatgtggtataaaaaaatattataagatcgtcgatccacttgtcaaaaagattcactatgatatgcaaatattttgtgatattcctctatttgatccatttaagctaataatcttttccctctttaataaaattttaaataagatgaaataaattttgcaaggattggtttttaaggccacctccattgcacaaataatttaagtgtctttatatattaaataaataaaataaaaaggtaagtgtctttaaattggtgcagagaagagaattgtgtctctatggagacattaaagacatttttttagagacatctttatttagatggcactatgtaattggtttttttttttttaatcataattaaagacatccccttatatttgtgcaatgtagatgctctaactaggttttctagaatcagaagtacgtaagcaaaaaccaagtgtttggaaacgtggaatcgattttagagagaaaaaaaatagaacgcgggtatgtattaactagaaccatatatgtattataaacattaaacatcacatattggtatagtgaacaacataaatgataaatctaacaataaatttgatataacagttaaataaaaatgtaaatctttctcttaattagaacaaaatataacacaaatagtttaaagttaaagatttagatcactatcttcattcaattctatcaaacaaaagcgtatcaaattacgtgttctcgttagaaaaattattgttaattaaattaaattaatcagttccaacatctcatatataaatcatgacatagacaaccattccaaccataaattcaatatgaagaatagtctgtcaaaatatctaaatcacaattaatttttaaaaaatttcgtataaaaactatcaaaaaatatttcatgtttttgtttatttgtgataccatactttttaagcggaagcgtaagcttctaaaataaatgtaaaacttacaaagaacttccaaagtggattttctggaagcgctttaaaatcgagattccaaaaagtttcaaaaccttctgatttcgactataattctaaagcgggaaacggacctccaaggaactttctgttctaggttcttgttgtacaagaaacaaaaaaaattataaaagacaatgctttgaagatttgccgaagaaaatagaaaaggaaaaaatgatggttt

SEQ ID NO: 22913 - DNA, 558 bp, Arabidopsis thaliana landsberg
  unsure (1)..(558): unsure at all n locations
tttttggtattagcactgaattagaaacttagttgatagcctaaactcatattattaacactgaaactttggtgttcaaataaaattatgaagcaaacaaaataattatacaaaagagtgttgcaagttttagggtttagatgagagaaataaaaacagagtgttgcaagttttttagaaagcaagagatggagaggatccaatgttgtttgcctcagtctcaactgcctcctcagctctaactgtttcagcttcaacagcaacaggtggtgcgatcccagcagctgtagttcgtgtggcatttggcatctcaggtggctggttggagccgagaggttctgtcctagaagnnnnnnnnnnnnnnnnnnnnnnnnnnnnnnnnnnnnnnnnnnnnnggtagtcgaagtacacatgaaagcaactaatcttctccgcttggtttgcaataagagcttcagcggcacgcagcttttgagagagtcacccggatcttctcgaggaactgaaggaccaatgtgagctgatgaggcttctagctgcaatgaaccagccccatat

SEQ ID NO: 22914 - DNA, 725 bp, Arabidopsis thaliana landsberg
cgcatgagctagaggacgcgttccaagccgggtccgtgaaacaagtaatatcctcacactgaggtaagacaagagagagagagagcctcggaccaaggaaagctggtggaacgaacctcaatacaaggtaaagacaaggaagccgcctcaataagaggtagagtataggtatgaaacgtttaggagcctgacaagacaccttcacagcaaattgaaccttataaaaagtgttaggttcagtgatactccttttttcaaaaaccaataagttttggtcagctggccagataaactgaaacaaagaagtatgtctaaactgccatgagacaaattcaaacctagctaaatcgagacagaatctgcatactttagtaagcgatcgcaacaaggcgataagggtgctagaagagagcaaaaaagtagacacaagaatatctaaacccatcgaaatcgattgagttaaccccgagttctacaaaacaagaaccacacattcaacaaacataaaattccttcccatgttacaagaagtagaggacgaggaggacaagcaaacatgggggaacatctctccaaaccagtttgtaaagagggactcgtcgagaagcagcactcgaaagctattgagtgactttgcaagaaggagagggacactcgtcgtcaagggcgactgagcaagagatacattaaaggagaggcagatctgagggtcaggggggtcaggt

SEQ ID NO: 22915 - DNA, 596 bp, Arabidopsis thaliana landsberg
  unsure (1)..(596): unsure at all n locations
caattgccgtacgacgctatcctggtcaagacgaagcggaccgccgtgggaagaaaccggcggtggagactggaggcgaccctgcgctggcggccgcccctcctcaaaaaagagaaaattaggtactgcgatgggggacttggggtgtctgaaagttttgctagagagttaatgaggacgtgtgcggccccgggggaaaggatgtcttcgcccgagctccgggagtcttcggctcggatgctgagggttaccgggggttgttggccgaaaaatgttcctatcccctgcgcggctgaggaggactgttttacatctcgtatggttcatcggtggagagtttttccttacgggcgaaatatcggtgctgttgtgtgggcagtgatggacaaggatcgccaaggggcggcgcagaaacgccaggcgactgtcaggattcacgaagctcggccgaaaaggcgcggggaactacagaacgcgtggctccggcggaggtaagccgcgctgcgttatggcaggcagctctgactagcaaggcgcggcagacggcgggcagcgacgcncaagtcggcgaaagtggtgccccagcagcggaatgc

SEQ ID NO: 22916 - DNA, 3201 bp, Arabidopsis thaliana landsberg
  unsure (1)..(3201): unsure at all n locations
aaaaaaaaaggttttttgtggtttttaaaatttggtaaataacgaaaagcgctgaccttccaatagaagtcatatgggaacaaaatattgtaattagtagaaagataatgaatttgtaatttggcactaaaaatagggagatatttaaagtaaagtttggttagtaggtgaagaggtccaagtaataagaagaagagacagacacgcgactggctccttttattttattttattttgtcttaaagcttttggcgagtttgcttgtgtgtgagtgtgtggttatggagtctccgttcaaacctgatgtcgtcagaggtcaagtggctctcatcaccggtggtggatccggtatcggttttgagatctcttctcagtttggcaaacatggagcttctatcgctatcatgggacgacgaaaacaagtcctcgatgacgccgtctctgctcttcgatctcttggaatccaggtaatcagcgatttttgttttgaggactttgtttgttggatatgtgtttgaatctgtctgatttctgtttcgtttgaaggctattggattggaaggtgatgttcgtaagcaagaagatgcgagaagagttgtggaagcaacttatcagcattttggtaaacttgatattcttgttaacgccgctgctgggaattttctggctgctgctgaggatttgtctcctaatggcttcagaacaggttcctttttcgttttctcattaatttgatcatgatctgagaagaattatgcctgaaagtttgtcaatttagctcaaggaaacgtttttttgttgtgcatgtgcagtcttagacattgatgcggtaggaacattcaacatgtgtcacgcagctctcaagtatcttaagaaaggagcgcctggaagagactcatcaagcggtggaggttcgattattaacattagcgcgactttgcactacacggcttcttggtaccaaatacatgtctctgcagccaaggtaatttgattagtctgatagagtcattcaatgtcttgagttttggttagagaatcaagaactaagtaataggaacaatagatgtagcaaaaatgtgatcttaggagtttgaaacttgaaacaggctgcagttgatgctaccacaagaaacttggcattggagtggggaactgactatgatattagagtgaacgggattgctccaggtcctattggaggtacacctggaatgagtaaacttgtacctgaggagattgaaaacaaaaccagagagtacatgcctctttataaagttggagagaagtgggatatcgctatggctgcactctacctcagctgtgattctggtatgctgagttaaataaagcacactctttaatataaaacatatatacatggttagatgatgtaactcattgcttgatttgtttaacagggaaatatgtgagcggactaacaatggtggtagatggaggactgtggcttagcaaacctcgccacttgcctaaagaagcggtgaagcaactctctcgtgcggtggagaagaggtctagggccaagcctgttggtctcccaaccagcaagctgtagatcatttgaatttcagatatcaaataagtgcacattgaaaaaatgttttggtttattgaattacattggagactgagaaaatggtattaagattatgtagatcaaactatcttatgcacaataaagtagctttctttgcaaaagaggcaaaacagtaacgaatatatgatcaaaaagataatcgcttttgaacctctcatcagtgataagagagaaatattccaaactcataaaatctcaaatggctaataaataagaacattgtgagtcactctctctgtttctcatctcctcatctttttatcttctttgattgatccacatggcttccgctgccgcaagttccgccttttcactccttaagtccaccggcgctgttgcttcctccgccggaactcgcgcacgtgcctcccttctgccaattccctctacctctgtttccgcgcgtcctctaggcttctccgccactctagattcccgtcgtttctctctccacgttgcttccaaagttgaatcggtgcgtgggaagggaagcagaggagtggtttctatggcgaagaagagcgtcggagatctgacctcagctgatttgaaggggaagaaggttttcgtgagagctgatctcaatgtacctctcgatgataatcagactatcactgacgataccagaatccgtgccgccattccaacgatcaagtatttgattgaaaatggtgctaaagttatcctctccactcatctggtaatattattcccacacactccttacgtttgattcctccatcacctgaactaaagttgaacactttgatctttcagggaaggccaaagggagtcaccccaaagtttagtttggctcctcttgtccctaggctctccgagcttcttggtattgaggtaaagtccgtgatttgtctcagtaatcaatcatctacctgtgagaatcaatcacttgagacagcttattgatggtgaattttgcaggtcacgaaagctgatgattgtattggcccagaagtggaaagcttggtggcttctctacctgaaggtggagttttgcttcttgagaacgtcaggttttacaaggaggaagagaagaacgatcctgagtttgctaagaagcttgcttctctagctgacctttatgtcaatgatgctttcggaactgctcacagagctcatgcttctaccgaaggagtcactaagttcttgaagccttcagttgctggtttccttttgcaaaaggtaatattttgatagagattattctattcagcattgaagcatcgttgctacaaatggtaccatgaactttttgtttacttctctctaccnnnnnnnnnnnnnnnnnnnnnnnnnnnngctgtttcaaacccaaagagaccatttgcagccatagtgggtggttccaaagtctcatccaagattggagttattgaatcgcttctggagaagtgtgatattcttcttcttggtggtggaatgatcttcacattctacaaggcacagggtctttcagttggttcgtcccttgttgaagaagacaagcatgaaccggctaccgaactccttgccaaagctaaggccaaaggagtaactcttttgttgccaacagatgttgtagt

SEQ ID NO: 22917 - DNA, 557 bp, Arabidopsis thaliana landsberg
  unsure (1)..(557): unsure at all n locations
ttaagccaaactggacttgtgtaatctacactcagcattcggctggaaagctccttttcttccaggagaatagccnngaggtaagctcatgtaaatttcttcatccaaagtactatgcagaaaggcattagatacatccatttgactcaactcccaaccttctcttgctgccaagcctaacatcatctagacacttgtgagtttagcaacaggcgaaaaagtctcattaaaatcaaccccttcctgttgagtaaacccttttgcaacgagccgagctttgtaacgctctacagtcccatctgagttgtatttgatcgtgaagacccatttacaaccaaccacattttttccaggaggtaaagatgtaacactccatgtcttgttctgttccatagcctgtaactcctcatttaaagcccctttccatttgtcagaaactatggcttggtcgaaagttttcagttcaatttccagggaataagactagatataagaacaaaaagcgggtctaaaaaggtcatagctaaaaacagatgatagaggatatggagcagcat

SEQ ID NO: 22918 - DNA, 801 bp, Arabidopsis thaliana landsberg
  unsure (1)..(801): unsure at all n locations
atagttctttgagattggatattatagcaagaattggtggttgtcttcaactatagtagattatattagagcataattaaacgcattaattctgtttactataccaattcttcgatgtcattgtcaaagaattatatatgatagcataaaacacaaaagtacaaaacttatattagagagcaataattagttgtcctgttaggtgagggtattatgacacgaaattagaaagattagtaatttataacaagaaattaaagtgatatatcaaaactctataatgacgttatatcgttgctatcgtagcaaaatataccatagcgtacaaaacgatgttgtcataggggtgacacctactatagctgccgcaaacatagcatttgtgaattcgctgtgtattacatacgatagcagatggtttgcgctaacgatgaagacttttttgtagtgggaaggcgtaacatcaacgttctttcggcaagacgagtctgtgtgatttcggagacaacgagagagaatcacgaggcaatactgtgtaacaacgacattgatagagaatcacgagaaggcgacgatgacggcgagagagatgatgacggttaatcggcgacagcgacagcgagagagaagatgatggttaatcggcgacgacgacaggcgagagagaatcgattaggtttagattttgagactttgagttttttgcttctttaatctttatttgcattaattaattttcaaaagcttttggtgctatctttggaaagtttaaacgtaaatgccatntttagaataaaaaac

SEQ ID NO: 22919 - DNA, 1187 bp, Arabidopsis thaliana landsberg
aatttaaacacgaaatcgaagattggtgagatcgaaagagaagaaaatttgggctcaatgggtacttcatttatgatcgctctggatttttagcacagctgaaaataaaacctaaagggaaacaatggtgagagccgagagaatagcgtaagctcacgcgcttgaactcacacgcgctttagaacccgagaaatttgggaaaacaaacacatgtgtgtagtaagggaaagtaatctcaggtgtcctccaacaatattaccaaaccggtacaaaccgtatatatatacataggctaataagataaagtaagagccatcatctccttatctagttgcaaaccaaactgtcctatgcttctcatatctttcatctccttgctcttttatgaaagatatccgatttctaatgtttttgtctagtcatttcattaattgggtgatgggtgttatgattttcgccatgtcttctattgttctttctctccaaattgaataaattacaagttggaaagaatatcttactaggaataacctttccaaaaatgttgcccgtgagtagccttagtaacatgttctaatcggtagagaaatctgcagctaggagtttttaagtgaaactcgaccaaactattttagaggtattggcagtcgaagaacaagtggtttctagtttccacgggttcatgacagagaatgctcgaggtgttcatccctgcattccaagtcaacattcgatctcatgtgcttaaacggttgtgtgttgctaaccaagctagaaacgagtatttaggagtggcattcgagaaccaaattcctttatgccaatcctttcttgctctaggcgttcgagttgcttcccaagtgcctttggtactgaaactgggctgatatatgtcacctttgccccgccaaagaactatatcctctgttccaactagacctttaacccgaagctcctctattgagtcctccatttggattaggtgtgcagctcgatgtcttcttcgcctatgcgtgtacagcacatttgctaccgtgtcttgcagaccaatacccatgtctatacaacctcgatttcccgttatttcaatcattggttcaagaggggtccaattgtcataccaataagaaacacttgtcccattgccaactgcatattttacaaaaacagaggtctatgttgcaata

SEQ ID NO: 22920 - DNA, 444 bp, Arabidopsis thaliana landsberg
ctctagaggacccccacaaaggattatagaaagttctagtcaacagggaacagtgctttaggacaaacagaccaagtgtggcccaccttctctcttctttgtcccccccacgcgtttttagtgataaggaaatcccaaggcttcatcacagccactcgatccaacctcatctcttcccaccgacgccatctcttcctcacaacactcactcgaccaaacctcaccatctctcttcctctccaaacactcgaccacacaaagacactcgatctcacccctccggcttcgtctccctccttcactcgaccacaaaacaaccatcgccgttcgcgccaccgccttcactctctccttcactcgaagacggtactcgattttgacatctcttccttctcaccactcgccgttcactcgaccactccagccttcacttcgccggaagct

SEQ ID NO: 22921 - DNA, 946 bp, Arabidopsis thaliana landsberg
  unsure (1)..(946): unsure at all n locations
acacacaaaaattaaatcaactatataaaaatatattcctatgttagttaggaaatatgtttatctctacgggccatatgatgaatcataggtcgacaaaaaaaatatgaagaagcatgtcttatatgtacatcaaatttgtcatgcccgtctccctcaacattgagacggcgtgctttcactttacttatatctttcctctattccactttcttaattcaaatacaaaattgtcttaaataataatcgtaaatcattgaaaactctttaataaattgtataagaaaataacaatagtagaaataaacccaaggttcccaaaatacaccataagccagacggacttgagtgactacacacgattctcaccgtgacctgnggaaaaagggaaaagaaaggggtgcgtaaagaattactcagtgagaggatcctttccgcccactggaaatacgatacacgattctacctttaaaccacaatcaacaatcacatagaaaatagacacaacactcttatagtctccatctctatgcaaaactataacacacaactcattcttgcttaagcaagatctccacatcatttccaagttcgatcatctccctaacctttgaacctatctagttcctctggacnnnnnnnnnnnnnnnnnnnnnnnaacgaatccgtcaattcagcaaatgcccattggtctagtagtaaaagaaggtaattctcaccatctaggttcgagtagtattagacaccagagttcaaacaaattaagatagtttttccggatcagagaattaggttttgggcgtcttgaaaacttttagcatcttttgatcgtctgggagagcttttatgcatttgttagtaaaaaccaatcaccccgcgtttttattttggaggcgattcagttttaaaaaaaaaatgttttgaggtggacctctcttttttaagg

SEQ ID NO: 22922 - DNA, 646 bp, Arabidopsis thaliana landsberg
  unsure (1)..(646): unsure at all n locations
agttccaaaagggttgttctttatancgaagaaaagagaagagagtcctcttatatataagtagagaagtagtgttgctagctcacacataattgatctctagcaagttggcttcncgaggtggatatagaagtcaacagttttaatatcaagcatagaccaactgtagtatatcaggcaaatcaagataatcaataaacaaatgggagatccttgagaaagtataggtgaaagacacgttgctttgaagtcgaacattttagaccatatacaccaaatttgaagaaacaacagaacaaaacaaatccgagccgcctctgaagaattttcctgttaagtaaaagaatccaaaaaaaggttcttacttgatttattttatacttgtatgtaacagttctaccagttgtgaaaatccaaattactgtttgggctattttcagataaaaaccaaatgaactcaagaacaaagtttatccaaaaacaaacaaacttaacaacaacaacaacaacaaggagaagcaagatgcaaaagaagctaattgaaatcagaatgtttgaatgtctataataactttaacaaagcttacgcatatattattagcttccatgctncacgtgatcatatccatagaggaaataatgaata

SEQ ID NO: 22923 - DNA, 1851 bp, Arabidopsis thaliana landsberg
aaagataattttaaatgttacattaaaaatacaaaaatatatttgttacaaaatggtttgtattgctatattataagaaagaaatacatagaattgagttgttgacaaaaaaaaacatagaattgatttaatgtagcttaaaaacagaacataacttttttttttttaatttgttttcaccatttaccgaacccatatatttctaaaaaagataaacaagtgtagtaaataattttaattttttttcttcaaaataaactattttctgcgaaattaagtctaaaatatttaatggcataaagaggtaaataaatgaaaagtattagggtaaaataatatataagtataatatccgatttctctcatgatgtccttgtttatatttcatccacctctcctctgcacaatcttcttcttctcagctctctctctctcaatctcgagatccgttctctttaaatctgtctctttctcttcaatctcattgtctttgagctcttttgttgagatcaatctcagattgaaatcaatcatcatagacaattaagttttgattttcgttttttttttttaatttcttcatcagatctagtttttaccaataacggataaattcgaagtatgttcatcatcgtagatctatctctgtctattgattcaaattggatgtatttagattcaatcctgatctgatcttttggctttttgcgatcgcaagttttgattggtgagaattcgtttttttttagctcgatcgaactctgtagtgtagatcgagacgaatgtagagtttcgtgattcgtttttggttatatgatgttatgttttaattgatgcatgtgagttttttttgttttttttttgtgtgtgtgttgtgattcattgatctgtgagaaaagttttctgaattatggttgtgtttattgatttgttggagtatgaatcatagaagaaccaatgcaatcattttgaaaaggaaaacaacctttttttaaaaaactttattctcatttcgcgagtgtttttagtgattgtggtaagtgggtaacctttttgatgttaggattacttttgtttgatgttttttttttcattgtttatcgtgcaggtcttagccaatcaccaacatggcgactggggcagcaactgagaaccagtggctcaaagggagagtgaaggctgttacctccggagactgcttggtgatcacggctttgacccacaacagagctggcccacctccggaaaagaccatcactctttcttctcttatggctcctaagatggtcagctttgttaaaaaagcatttcttttcacaactctttttactaacaaaagttttcaatttcatagctacttattatgtttctcattgtttggtttgcctttgtttcaggctcgcagaggaggtatagatgagccttttgcatgggaaagcagggagtttctaaggaagctttgcattggaaaggtgcaaagtcaaaattaataactcagttattatacactagctattgtgagtgactatattttctcatctcaagtttttatttgacaggaggttgcattcaaagtggattacaaggtggaagctattgctggaagagaatttggctctgttttccttggcaacgagaatcttgctaagcttgttgttaaaactggttgggcaaaggtgataagcgttttctttcactcgagatgatgttgtctgaattatggtggtgataccttagctttatgacatgacaggttagggagccaggtcagcagaatcaggacaaggttagtccttacattaaaaagttgctacagcttgaagagctggccaagcaggaaggatatggtcg

SEQ ID NO: 22924 - DNA, 1001 bp, Arabidopsis thaliana landsberg
ttggcagagccagcttggcttgaccttagcaagatctctaaatgttaaatcataataggggtatgcacgttttgtgacttgtccttgcggtccagcgaaccagtctacaataaatcgcaaactaaaaaaagttaattggtatgtttgatggatccaaattaattagtcttataagccattttttactttaatagcatatatttttaaagacctaacaaaatgggtcagatctctctgaatcttagaggattggactggatcaagtttgctccccaaaaatatgtcccatcggctcaatattattaggcccttttaattaagacaaataaaccgaaccgaatatactaaactgaaactgaagcaaaaaacgaatcataccgaaccggaaatttgaaaataaccgaattaatactaaattctataatcaaaagaaccgaactaaatcgataccgaatcaaaatattttgggtaatcgaaaataacagaaataaaaatattttttataactattagttatttctaaactaaataattaaaaatatataaaaatatatataatagtaaaaatattaaaaataataaaaaaatatccgatatatctaaaaataaccaaaaatatctaaaatattcaaaaataatcaaaatatctgaaaatatttaaaattaaatagtcgaatgtatattaaatttaaaaccgaaagaatcagaattaaactgtaaccgaaccaaaatttcaaaataatcgaatagatattaaacttgagaaaaaaaccccgataatccaatggtttcaaactgaaactgaatagataacatattaccttgcgaaactttcgttggtcaaatgggcttaagcccatagaaccatagccacacaactgatgtggtggactggttaatgccgcgtagtcagagtcttttttggttttcgtttgaaaaaaacatcatgtaatttagaacgaatagagatagagaagcaacatggagccctggtgctggaa

SEQ ID NO: 22925 - DNA, 762 bp, Arabidopsis thaliana landsberg
ttatgttatattacgaatttaatatatttagtttgtctgtaattatttgcttctatcattttaaaagtgtatcaatatataattggtatcatttaaagatgtatattattgaatttattatataattaatgtgtctctttgtgtacataattatatatttaggatatgtagtctcctcaacttgtattttgtttgtctttaaatatttatatgtattctaattttaaaagtttatgaatttagtattggtatcatttaaacatgtatactaatgaatttattatagaactgatatgtacttttgtgtacataattatatatttagtatatgtacttgtacacatagtatgtgtggggtttcgtgtattttagtaacttgtaaattaattataaaatttgacaaattaataagacaaacataaatttgttcaaactcataattataaacaaaaaaaactaaaaagaaatattaataaactacatacaaaaaaggaagcattaaaaaatgatagttttataataattattccaacctgcacatacaaaaaaatgtctaagttagtatttcataaaattgtatagaataattactatgttaaagcaatcataataaataattcatacatgtaggattaatctactaaaggttttggaatatttatttgaaaacaacagttgcgactctttttattgttttcctttactgcctataataagaacctataagccttcttgtgatttcactctacacataacgacata

SEQ ID NO: 22926 - DNA, 618 bp, Arabidopsis thaliana landsberg
aatcagaaatttgaggcatgttgctttctctagggactccattttgctttcaatgagactactacacatgtgataagtttgggagaggtgttagtctaaaagataccaacttatagagtgattgtaggggaactagacctcgacccatttgattaatggttttgttgtttgatgatcaacataaccatttggactaatgtgttttatagtgtttatgtttatagtttaaaggatgttgcgtggacttggacaaaggcaaagaagtgatcatggagatcaacacctcaaagcaagacattagaagattcattgatgactgtaggaacggtgacgcctaagagggggtgaattaggacttataaaactttctctatacagagccatgtattaatccctagagcaaaacgtatgcaaataaataaactagattgtgcatagtaggttttttctaagtgttgctatctctaccataaaaggagttttgcaacctaagttccagtcctagcaattctaactagaaatagagagattgaaacttaagtacttgaatgtaaatgtggaagctaaagaccaaaggtagagatgcaactcctgtggatgacgccggtattttaccga

SEQ ID NO: 22927 - DNA, 743 bp, Arabidopsis thaliana landsberg
  unsure (1)..(743): unsure at all n locations
gtggtgcatgtgtgagatagttcttggtgattagcatggtgtagaggttggaagtttacagttatggaacgtaggggattatagttttggtatgtgtcatagtggaactaagaggctgcagatcaacaagtcttgttgagacttataagcaaagagttatattctgtttcagtgttagatgagttgtctatttaggaaaaaatcaaagatgtatatgaatatgctacgtagaattcaccattcttatttatagaaaacaaaatagacacaaaagcatcagtttacaatacaataccaacaacaacttgacaaacattgaaggatcaaactcaaaaccaaaaaagatcttaacagtttctgctcttaattaccagataagctagccactccggtttgtataaagcaatgagttgtgctattgccaatccaagtaacactccaatcccgtaccctattgccactgctttccagtttaacacttgctcatcttcttcctcttcttcttcttctttaggatgttgtgctggtgcgttagtcccaaagcaactttcttgaagaggaaaaccacaaagccctgcatttccttcaaatgacgatttaggttgcccagttatttgtgttccttgtggtatttcaccaatgagttggttgtgagacacgttcacgtatgccaaaaacgagagggtccttaggccattangaatagtccccgagagttggttacttgataggtctagtgactc

SEQ ID NO: 22928 - DNA, 480 bp, Arabidopsis thaliana landsberg
  unsure (1)..(480): unsure at all n locations
gcaatgttattggaaggacttaaaatcaggattttttttttgtttattggtgccgacagtcaaaagggactacaggcaatcatgttgccaaagttcgatccaacagaccaaaaagcttgtctgtctcttcttgaggatgtgactaccaacgtaaagcagattcaagattctgtcttggaagcaatactttcacgtaatgctcataccgagtatcttactggcttcctcaacggtcaagctgataagaaaagcttgaagaagaatgtacccgttgtaacctacgaagatattaagccttatattgatcgtatcgccaatggagagccgtctnnnnnnnnnnnnnnnnnnnnnnnnnnnnnnnnnnnnnnnnnnnnnnnnnnnnnnnntaacatagatgtgtatttataagttcaatgcaagatttgaaaagaattataccagactagaatatgacaagagacgttaaatctatgctcacat

SEQ ID NO: 22929 - DNA, 1963 bp, Arabidopsis thaliana landsberg
atttgtgctcaactattcacgtattgcactaattacttgcctaaacatataaattgttaagtactaccctcataaattgcacacattaatcccttgaaactctactaattcaatattacacgaaataatatttcctaaaaaatccgaacaaccaaataactaaccatatctttacttacttcattccaaaatcttgaaatatttactacactcttaccaaatattcatatttcgatatcacatttctataagttaaacgattattaatcatgcattaattcctcaatatatcatataatcttacatatggtatagtcaatatatttttacacattctaaaaatcatcatcaattccaaattccaatatatcacctcgaaaattaaatttcgccaactataatattatccaaattgttatggattattgccttcccaaaattctatccgattcaatcatctattttctccattcctcattcatagcaattctgtttcctgatttacatatatcaccttaactacaaaatcttttaacattcgcttgccagtcaagacataatctaaatcacgcaatattccatcttctaaaccatccaaatcattctgttttgaatgtacaagcgtaaaaataagggcaaatgcatctaccatatctcgacagtttgattcagaatcaaatcaaaatctaaatacggcatttcgattattattttgcacttatgatactcaagcatattcctattttaaaccattcagaatcattctgtttctaaagaatttacgctctaaatctttgcaaatcaatgtttaaggattcactcggctactataaatacgcttctcatatcgttccatttcatcatcacttacaccgcaaacgagagatcaaagcaattatacattttgagaaatggctgctacattcgcataccttaaagacgtgaggccttacaaaaacgcatggagagtccaggtcaagtttcttcactcttggaagcagtacacaagcaacaccggtgaaaccattgagttgtgttctttgatgaatatgtaagaattactgttatctatgcaaaatttacgtttacatatacacaagtactaatatagatttctgttgtttttgtcataaggggaaaaaaatgcatgctaccgtgaagaaggagttggtttctaagtttgttcacaagcttattgttggtgaatgggtcttcattgagatttttggtcttacctatgcgtctggccagtttcgcccaaccaaccatctatacaagatggcgttccaggttagaactgaagtcatgggttgtgcttctgactccaacttcttgactttggcgccattttcaaaaatccagagtggtgagcttaaccctcacatgttggttggtgagttttctgattctatattatatttttgctttattccattcatttgctatcattagattatgaacacagtcatgtttcactgcagatgctattggccaaatcattactgttggtgagttggaggaactcgaggctaacaataagcctacaacaaagattgactttgagatcagagatcaaatgtaatgtctatatcttattagtttattgtgatcttatttgtttattgcttatcaaagaaagtgtttgtttcgattcatttgttctcatagggatgagagaatgcaagttactttgtggggaacatacgctcagcaggtttacagagcatgtcaggaatctgagggaaagaatgtgatttttctcattcgttttgccaaaattaagagttacaagggtatattcagtttttttgtacctattcctcttctttccatactgcatgatctatggtcacttaaatgttatgagactgcaggtgtgaagaagtttattcaactcatttgatgtatgggaagtacatgaaaattcttaaaaccctctagctcaccttttcagtaaaacgtg

SEQ ID NO: 22930 - DNA, 359 bp, Arabidopsis thaliana landsberg
ggaattttgctatggtcgtcaagctgccgtgaagattttgaaggattcaaatggaaattgcgaagatttcttcaacgaagttgcaagcataagccaaacatctcatgttaacattgtttctctacttggtttttgctttgaaaaatccaaaagagcgattgtgtatgaatttctagagaatgggtctctagatcagtcttcgaatcttgatgtgagtacactttatggaatcgcgctaggcgtggctcggggaatagagtacttgcactttggctgcaaaaaaaggattgtgcattttgacattaaaccacagaatgtactattagatgaaaatctcaaacccaaagttgctgattttg

SEQ ID NO: 22931 - DNA, 487 bp, Arabidopsis thaliana landsberg
  unsure (1)..(487): unsure at all n locations
attatagtagaacactatagtttgataaacgaagtttgataaaaaaatctacaaaattgtgattatagtagagcactatagtagtcgagttatttatggacaccaaaaataaccactagaaattttaattctggaacaaagttgggaatatcttggtagatatggcaccgataatcacaatgatatgtttcgctaaagtcatgacaggtggcnncatggtctttgtttagttatagttgattacttgatctttgtttgcatagagataattgcaatttttcattgttctttactagtataactaccttaaactattgaagagatttgaagaatatcagtactgttgtcatatttgtttgcagtttctgttctataacttctgttaaaataatcactttttgacattgttgcagatattggttaaggaatgctctgagtgttcaaagaaccgtataggacttaatcgcaacgggtggagcttgatgcg

SEQ ID NO: 22932 - DNA, 581 bp, Arabidopsis thaliana landsberg
  unsure (1)..(581): unsure at all n locations
gcaaaataaccatatataattaattagaaatatatgcaattaattatataaatatttaaactaaataaaatcaataaccaaacatatacaaatattaaatatacttaccataaatatatattttaaaatttcaaataattaattttatatgttaagatttcttctatatttgtaaaattattctaaatgtataaagtctttctcacataaatataagattagttttgcaaacagaattttgttcaatcttagtttataaataattttatttaaaaacaaatacatatatttgataaataatttgtatttatagcataatatgtattagataaatataaaatacaattattccatcttgaaattggtttgatattcatagttagatggaaaatgtataaatagaatcattttaattaaattataagaaaatgtgataattgtattgaatggtacatatatatttatatgaacacgattcgcataagtttaggtcacatatttaaagtgtcgaaatggatgaataacgatctngtctgaatcctaattntgaattgtcctgcattttaatatttgatcatagt

SEQ ID NO: 22933 - DNA, 1494 bp, Arabidopsis thaliana landsberg
ggcgaaagaggtgctcgggatcgaaaaagactggctataactcattctcggttcggagatgctcgacgagatgagaacgaccagaaaacaaggaatttctaaaccggaaaaatcaaaaataacaatgaaacggcggacttcaccggaaaaagagagaacaatagaaatatcaagatcagagagaagaagcaaaccttgtttcttttcttcgaaaaccttgttgtctatggataatttattgagcatgtcaatcacctgtaaactaaggaaacgaaactactcaattatcccatcctcgggaatttcttatttaattgatttcttatttactcttctattgtttactgcatcttgttacctgttgcttagtttttgcaatttttgcctattactcgacctgatactcgatcacccagttgtctggtaagagactgtgcagtctactatctgttggggtcggatttcaccctggtaaccgagccgaccatgatcaatgcctcagagatcacgtcgaagaaccatcccgagccggccttaaaacatctcggagatcacgtcgaggaaccatcccgaggtgaccttgaaaatgcctcggagcatcaccgcagaaggtttccccgacccggactcaaaatgcctcagatgccaacccggaaaatcatcccgagggggggtttcaagatacctcgggaaccaacttgtgagacccagtcccggacgtctcggcctccggcgaccgtttactcaagttcgcgcctctccccggccgaacctcttaatttttcgcgattaaccatagaattgcctttacgaggctaaattctataatcgctttcttattacacagaggaagtctttctaaccttggtttaattctaaccaactcttgtaccggtttcatcgtctttgtcccttagatttagatcaatcctttactcgttcaagacatgcatattgttcgctaaccattctaggcctaacaatcgcatattcctttatcctattttcacggtcaattcccaaacgtctatcctaactagtaagctagatcgttacataccttggccaatatgcggatttgattccttagcccgtttgtcgccttactccattcgttcaacgactcatatccgatcgtgaattgatgaaccaatccctatcgttacttagccatacaaccaaccaaccccactggtctaagtactacgatagagattggggatcatacgattcccttgattcacgatggccgaatcaagctcttggctcattggtccatccgtcctccaaacatacgcccttcggttccatggtggacgattcagccctcagcttatcgaaccatccatgtttccgatccggtcgtttactacgaccgcccacggtttactaaccgtttatctctccggtctatggtggtcggtataggtttcggcttatcaatccatccttacgatccgaacgatatcattatcaaacccaagggggggatcc

SEQ ID NO: 22934 - DNA, 560 bp, Arabidopsis thaliana landsberg
atttttcttccattctttacttgctagatcttagaattttagattcttaaaataaatagaacaaataaccagagtgagtgaaacaatgaccatatggattgcaccgctcggacaaacatctatggacaatattatttttgtttactactaatgtgttttatcactagataaaatattctatgtatagtatggatccattttataatgatggttgtgtccatacacaagcaaatattggtcaaagaaaaatggacggtgtacttttaactgatgattatcgtgtgtattgatatgaattgattatgttaattactagatgaccatttggacttgacttcttggacactcgtcaatggacaactatgtctttgatttgctgcgagtgtgttttattgtttagtaaagttatcacccctttttttttatgattacgatatatttatatggtttcagggagagaatcgttgtatgtagagattatttgggtgaatgaagtagatggagcagatttatacaaaaatttggtgtagaatggatatgactcagtaaaaaaagtttct

SEQ ID NO: 22935 - DNA, 572 bp, Arabidopsis thaliana landsberg
aaagcaccgtaaaggatagttaactactgccattgataaccctttcactccctctccaccatattaatttcattaagattgatcttggacgtccaaaatcttactagtatcaatccctctagtttgtataaaaattggtttatttatgaatccctctagttttttatatgtttgtttggatccgtacgtgtattggtttacacaaaagaaacatattttcctataaatagagtgtcaatttcatcttcatccacaataatacaaaaatttcacaaacgtatcatacataaaaatcgttttcaccccacaaaaaatacataaaaactagatattgagattatttacgttagaaattatattattttttcaattctatatcacttatatttaaataatcagttatattttgaatttatcatcttactttttatatctatttatttttaatattatatttgtatttgcttggtttgatctagtttaattaagaaaatctgtttattatacgcatcattatatagggtgtgtatttttatggtgcaatattacgtgtttgtcatatagtttttttt

SEQ ID NO: 22936 - DNA, 2196 bp, Arabidopsis thaliana landsberg
tgaaccataacccatatatatcaagtcaacacaaacaaaatgttagactctatcaaaagaaatactgatcagcatcaaaagattgaatatgcacatgcatgcgtcttaattaggttactgaacacattgtctatgatcagaaacccatatgctgatatgacaaagagatttctaactgtcaccaaacaaaacgtcatgtttacaccaaaaaaattggacgtattgtatcaatgatttagatgcacctaaattttgggaagatttaaggggtatgatttaagcaaaccttataacacactgtctttaacaaaaccatattgttaaaaaaccaaaagaaaaaataaactacataaaaaacttgacatgaataatcttatcagatttcactggagctacaacatctcaacatatcatagattgatgcactttcccagtttgtttctcggaggtccttacggctctttttccgccctctccaaattctctttgagctttttaatctcatcgctcgaccgcttctgaacttcgtttgcccttttttccttttcaagtcttgcagcttgctcttcacctagttgctgctctagtctcttagcagtgtctctcagcttagtctccacctgaacaacaacaaaacagaaagctgccggtcaatgaaactctcctgtgagaccataactattgataaataaaattaccatctcggtgatgcggctaagctgcctgtcataggacatatctatttgcttcttgaactcatctatctcattattagagtaaccctgaagtaactcaacctcctttttctggtcccttagcttgatagcctcttcctgaaattgcaaccacagttagaatcctctctgcttctaaaacagaattaactcataaaagtgagtgaaagcaacaatctccacctgtagctcatggaacaactcatctgaatacggttttccattgttctgtttgacaacagattcaacaagcgagagaagcttctgaacttgctcagcctttttgacattatcagtagtcttgttattaaacaacaccaaccgattgtcacatatcccaagaatttcctacaagccacacacaattcaaattatacttctttaatgaaagactcaagaaaagaatagccaaagtcagcttactttaagaaactcagggcaatagtcagccaaatactcctccaatgtctcctcattctcttccaactcatcgccaccggtaaaaacaacgatcatatagtcagcgatcttactgccgaatagcgcttgcaagaaactaagcacagtttgctcctcttcagcaagccgcctcacagagaataccaacaagatcgcatgaatcccatcttctgccaaacttatacacctcacaatctctttaccaataaaatcagctgcagtagacaaatcaaacaaacctatacacaaaactcaccattaacataacactcaaatagtaaaatagactaaaagtgaaacaatttacacaattggggagcttaccaggagtatcaacaacattaatgatatcaccatcttcttgaacaactctctgtgactcgcacgtgcctgtccctcctacagttctagctcttgacaaaaagctttcctcccaaggatactgttacctgtcgcactctttccgtttccagtacggcccacaagaactagggttcttttagggtttgatgatgacgcaaattcccaatcatcttccatcatatctccacccatctccaacaaactcatatacccttctctgaaaaaacaatgagataattgttgatcgcttaaagggtcacgtaaagttcaaatctttgatagataaatcacaaaatcaaagcaaaaacagtgacgatcgaatattacttgcttgctaagaagaattaaacaccaaaaacagaacaaaacagagccagaagaatcaaacctaaccacagaatcaacagatgaataagcaatcaagtaaagaagatagagacgaaagaagattacttgcttaaaaaccggagaagctaaagcgacaatcttagagaaaaatatcttttttggactttatacagaatcagtaaaacctgacaagaccagaagtctctgcgaaacaaactcgtactttatcacctgcgacgcggatcacctattagattgattatacaccgtacgatgtattattataatcttc

SEQ ID NO: 22937 - DNA, 489 bp, Arabidopsis thaliana landsberg
  unsure (1)..(489): unsure at all n locations
ctatacacaatagctactgctattcaaattnatantcacatgtaacatgagaacataatgactgggtttatttaataaccaatataaaagtaacatgaaaagctgatcgaccttaagaaagcacttccaaaaatcctttgtccaatctcccatcatgcaacatatctgtgaccaagccataagttgaagcatcgccagcaaacctgcaactcctcatttctttgatgagttcagctgatgctgctttgtcaccatctctcagatgtgccctgataagcgtattatatgtaccactatctggaagaggcccgtcttctttcatctttatgaacaaggtatatgcttcctcctttaaacctttcttacagaatcctgagatcattgtattgtaggctataacatcaggcttcactcctttaaggctgaggctacaaatagatcccaccatcttcaccttcctgccttgcacatccttactcatatatatat

SEQ ID NO: 22938 - DNA, 441 bp, Arabidopsis thaliana landsberg
atatccaaaaattttgtgatatttgcggatatctactttgatacatgtaaataattttaaaaaatctgtaaactatataagtatatcaaatattcaacatttttatttaacatgctttcaaaataagtttcaaatctacttcctatatattttgtgatgtttttaaaagttttgtgttttttatttggattgactcaaccaaataaacagtataacaataaagaaataattaaagcaaattgacatttccatttgagtaacatacaaaactttagacacacacacacacatacacaatctcacacactttatttacatgttaagtttcactaagatcttagtgtaataaaaaggaagaaataaaaagatcaggagcaaagtggactaatctagacgttgtaccggatactattatcatcgcctgagaatttgttcttgatc

SEQ ID NO: 22939 - DNA, 3678 bp, Arabidopsis thaliana landsberg
aggagtcattgcatgcgaaagaaattaaaagttgttttggtacctcccacccgttgcacaatcccaagaatccaatcagccggatgacaatcctcttcaggaacttcattcaagagctttccatcctgatttgcattaaggacatatatgactctcctcttgcgtactaacctcgagaaagcagcacgcgaaccattaccatgaagctgtaagaaaccataactatcaaccgttaataaagttgagaaaattactttggtgagagcaaaataaaaatcgataagaatgtagagaacctgcacaagctcaaggtcagaggaatcagctgctctcagtatcgtgttctcatcatcttcaacaaaaacaccaacaggtttggccccaccttccctggccactttggagatatcctttgcgacagaaagagaaatagatcgttttgaatgtggccaaataatcatcccaataaaatcggcaccagcctcaactgccatagctgcatctctggctgatgtgatgccacacatcttaaccaaaggtctatcctttcctctttcatcatccttaggagctacattctctgtgttggaaacactgcagctcaatttcctgttctgagcatacccgactctcgaaaaagacactgttcgattgcttaaacctggacaaatccagtaggaaaaaagagatcaatggcaagcttcagtaattagccggaaacaaagagaatcacacacacagaaggtctagtgaaatctgaagaaaaactaaaagtcaagaaaagttaccagatttgtaggtttttgagaaatttagagctccaaaatggacatggagatcagtggatattcctgaggaaaaataagaaagcttgcttcatcaactgatcttagaataaagctcactattaacaaaacaacacaaactctgaatttacaagacaattatacaatcgagattcctattagtgcatgaacatgtcaagcaaacaatataatatgaaaatggatcatcactaaagcagattgatagcagcaaaatcactactagaaaacaaaatcaagctcattgagtaaatacatcgaacaagttatctgcgtttctcccaatgagctaaaccagaagaataatacctgttgacatcttaatttcactgttggaaatctcagatggtatgggattttctcccgtcgatgaaatgagaagaggagggtcagcagagacgcggcggttttacgactgaagaagatcgacaagaatggcggaaaaataaaaacgaatgtaccaacttttttgttaggtgtaattaaaccgaaccaaaccgaattattgaattttctgtttggtctttgtaaaaccgaatgaaccgtttgcttttcggttttgtgaaatttccactactttttcaagtccccgatgttctttaaattttgtttcttgatcaataattcataaagatagataattgatcaaatattcaaaataaatatttaagtttcttaccatcttgccttaagctcaatcctctactaaacaagtcaaacaacaaacaagagcttgcgttaaaataaaatctgcaaagcactaaaaatttgatacaaatgcacagatttactcatcatgaatatttatttcaatgggaataaatcaagcttttaaaatgtaaaccgaaatcacttatagaaattgaaacaaaggtcttgtgtccagaaaatacacacacagacaaaatagagctaagactgactaattcgaaaagcgttcttaagttcactatgaaaagctctaagatcctaaattttctgatgtgaagcaagagaaaaaaacaaagtaaagaccaattagcagctatctcacacttctgaatatttctataagcagatcagattctgaacgactatagtgaagatcaattgtaccttaagattgggagctcgagaggcaaggtactcagtgacggagaaaagcaattagaggaagaagagaaggtgagctaggattttcttatcgctttttatactagggaaaatcaaagaaaccaattgacatgtgttatgcgctgcgtctcaagcttcatttcaggcccaatgggcttctttgtcacgaccattgaagcctatcaaagctataacttgaacctgtaaaaatgaatgatgtttctctcagccgtcagatctaatttgagcattgataaatttaacgaatgagaaatatacacgtcaatgatcctcgtgaagatttctatccaatagaatacgtttgttccttctctataaaatctaaaagcctcgggtaaacctattatcaccattcaccactaaactacttcaatcaacttccttttcccgagaaaatcagaaagaaaattcacgatggcaccaagagccgagaagaagcccgccgagaaaaaaaccgccgctgagaaaccggtggaagagaacaaggctgctgaaaaggctccggcggagaagaaacccaaggcggggaagaaattgccaccaaaggaagccggtgacaagaagaagaagcgatctaagaaaaacgtcgaaacctacaagatctacatcttcaaggtgctgaagcaggttcatccagatatcggaatttcaagcaaagccatggggattatgaacagtttcatcaacgacatattcgagaagctagctcaggaatcttcgaaactcgctaggtacaacaagaagccgaccattacatctcgcgagatccagacggctgtgagactcgtcctccccggtgaactcgctaaacacgccgtctctgaaggtaccaaggcggttaccaagtttactagctcttgaagagacccggttagggtttttagggatttcaatttcggtttggtttttagtacttgtaggaaattagatgcattattcgcttaacttcgtattttgtggctttgtaactctaggacgtagagaagattgttccttccttttatgaatttcaatgttggattatatatttttaacgatttttttttccatttcaatttcatttacctaatcactatattgaaatgtgtctctattgaagtatatgttatatgtgtgtgtttatattatttgatacgcgaaattggcctacttttccttcaatgatgttgctttcttaccttcttataacgaacagagtctaattatgatatgattggagtcattgaaatagataaaattgaagattagtagttgaattacctatcgttatcgttgtgccacaagcaggctataagcatcagatttaggtgaacccgcttaattttaatgaatagtttttggtgaacaacataaagcataaatcactgtcattactccataatcatataatatagtttatgttctcctcctatatctgaattatggaggaacgagtctgaaatttcttaacaaccaactaatacagccgtcgattaaacaaaaattgatattgctgaaaacgtgggagtgtcaaaggggaaggagacgacccggaagggcaaaagaagaagagaagagttcaaagggaagggtaaattcgtaattaacaactctctgtgtgtgtatgggaaagaagagtagttagttaaacgtgcaaagaagcagcctttccattttcatttccgtttccaaacacataaaccgccccaatcaaacaagctctggtttttgctcatcgaac

SEQ ID NO: 22940 - DNA, 435 bp, Arabidopsis thaliana landsberg
cggttcgattccaagttcgtttgcaattccaacacccccaaaatttattattgtacctgagaaacaaaaaagaagtgctaatcaaaatcaagtaaattctcacaaatataaaaaccaaacagctacaaaaatcaaaacatgtaatcgaagaaactataaagcttgggtaaacaactcatcaccaattggcaaagatctataagatcttactttccaagtgaccataacataaaaaagagttgaaaaaatcgatgaagatgcatcatagaaaggacctagattgaaatacaaaaaagaactataaaccatattgctattgctatgcactaaaatcaagctacgatgtttgtgtttgagaggagggatcatatatttataggtattttcagcataaggttttagggtttacatatgacggcgtaaattagggtttaa

SEQ ID NO: 22941 - DNA, 606 bp, Arabidopsis thaliana landsberg
  unsure (1)..(606): unsure at all n locations
agttcctaaacagcccaccaacccctctactgaagaagaacactttattcctgattcttttgctgaaaaactcctagagctttgagttggatataaagctcaggaggatacaattggaaaattaactcataagatggaagagttaaatagcacaattctggaacttcaagaaatggttaaaggctaccccagttttgaaaatgaggattggtcaaagtagcctggttcagaagaagaagactactctgctgatcagaaagaagtttatgttgaagaaaaatcaaatgaatactcatcctaccatatgtcaagagaggatgcagagtatgattcaggcactgaaaattcaaccactgaagatgaggacttctctgttcctctcttcaacctttttcctgactaagctctgtatgagtcaagcttagtgacttaaaacaagctaacttnggaggaagtcccatgtcaatccatgtatataactttctatttcccttgttatttttgatgtttttgtttaagtgttttaggtttattttattgaccatgagatggtcaacggtcaagtaaattcaaccaactcaagaagatctcaaccgttgagcgact

SEQ ID NO: 22942 - DNA, 2022 bp, Arabidopsis thaliana landsberg
gttttattgcataaatgcctaaaagcccttaaaagacacgagaaataacgtaaagagtcaaaatagggttagacttggctatgaaacctcttggagactattcttgttttgtataacctgtgtgagcacccaatatccagaattgacagtatagcctccgaattagggctgagcagagagcagatatccgggattttggtgttgtttgtgattcgatttgttttatcagaatacttttttttttttttgtatttgctttgagagagaccaaatattcggtggttttgaatatccgttaaaatctaaaccatttaattatcatatatcggatttgttaaatatttattttcaaaaaaaatataaaaatataaaatttaatccaaaaatagtaaaattttatcaaaaataataatattttatatttctcttttcaatgttaaaattagtagttcaaataattaattaggtgattagaaaattataattaaattgagtagaataacggatcaaagcgaatctaacaaatattatatctagtcgtactccaaacttggtataatcccaagtataggtatcttgtgtattttttttcctggtatttagatccccgttgaaaatggtctgagccaaaattctttcgattattttttttttggtcacttttgaatttttttataaatccatcatttccaataacttttcaacgggcaatattgtaaaaaaaaaagaacaacaagttgaattatatagacttcaattaaagtggctttgacctgaattatagaaaatatcttggccatactttttaatagatgattagagcagcagatttctttaaaatatgagacaaatagaacttaaacccatcgatgtacacagttacaacaagccgggaactataagaaccaactataattatacattacatgatatagatacagacatacatacactataatttaacaaaaaaaactaaacaaaacctatacacccagaaaacccaaggtcgacatttctaattcctagaaaaataaggctcttcagttttaaaatcaagcccaacacataacttgcaacaaataaccaacgaatgacacagaaactaagtaagtttggctcttgctgcgcaacccgaccgcacgtgtgtgtgtgtcgaagaatcatgtctcgtgtctcccaatagtttctctgggatctaatctctcataaatcttcgggttatgcctgcttttgtacattaggacatcaatgttagaagaatatatagcttttgttgattctgataatatcctcatgaaaaaagcaactaaatacttcacctattgaggaaatttactaaaattagcctcatctacggagaaggggagatgctgatcccgagcctcctgaacccacggatggtaagggtcttctcacaaatggatggttcagcagttcagctgcagttggccgctcttccgggttcactttaagacacttaagtatgaaaagccgagcatctagtgataacgtatcaggtacttccggaagagtaccccttccgatcctaaacagggcttgaacctgcgcgtttgcacaaattctgacttttaactcataaaatcccataaagtagacacttcaaatgtcgtttaagattattaagacagttcaaaagtttgaaaatcttgaagacttacgggttcgagatcggagtaggggatctgaccagtacacatttccagtacagttcacccgaggctccatatatcagctggacttccatagccatcactatcctttcggttaataacctgatcaaattattatgttccatttaggaaaaactgtaacatattacctgatcaagtatagctaaactacaatgaaagtggaaggaattcaaatatatctgttacatataattacacaaacatacttacagttataaacagaaataaaggaaatttaatcaaactatgaaggaaacataattaggggtttttgtggctatcaagcccatatcacaacagccgcaacaac

SEQ ID NO: 22943 - DNA, 131 bp, Arabidopsis thaliana landsberg
taatctagggtctcgttagatcgcagaaaaagaagaagagatcgacgaaagagaagagaaatctatgatttagaagatgatagatagatccatggagaagaagaattatgcttttggaaaattgattctga

SEQ ID NO: 22944 - DNA, 552 bp, Arabidopsis thaliana landsberg
acgattggtacggtaccctagttgtatccaaatgtactccgacaaccttcaaccaacactcttgattttttcctcactcaaatctacaatccacataaccaccgggaggcgggcggcttttactcctatcaccactatttcaaaaccatggcctgattttaatccgctttctctactaactccggttcacaggtcgatgactctgcttctatcggaaggactcatcttgctgctggagactatttgggacacgtggttgaatcttctggtccggagctagggtttcacggtggatctaccggagctttgtcacttggggttaacgtcaataacaatactaatcaccggaatgataatgataatcattaccgaggcaataacaatggtgagagaatcaacaacaacaacaacaatgacaacgagaagacagattctgagaaggataatgctgttgtggctgtggaaacatcagattgttctaataagaagattgctgatacgtttggtcaaaggacttccaattacagaagtgttactcggtattatataatt

SEQ ID NO: 22945 - DNA, 598 bp, Arabidopsis thaliana landsberg
  unsure (1)..(598): unsure at all n locations
acatgtatccctaaccttgctcgccttctcacagctggtcacatggctgctacaacacctccaattttagtcaatgtttgcatcacaagactaaaagtcgtgctcgtggatcaccaaataattctcctaccaaacgtgacaagaatataacagataacaataaggattcatgaataattttgtaatgaaaaagctaaaataacagagaattataaataaaaaaaaatcctgacttcataccaattctggttggttggatacgtttattttagctcttccagaattttatttacagcttcaattgaatccaaacgcatctacaaaaattttaaaaattcagtttcaactctatagcttagaataatttccacaaaagaattgttaggttaagacaaccaaagaagatttccaatttgtacagcaccttnnnnnnnnnnnnnnnnnnnngtcctttactgataacttctccaaataagctattcggatctctaacagaggttgatgttgaaaacgacgtcttactaactccctttggagccgcagtcccctgatgaacagaatacaagtacgaaaagaaatagaaatccaaaagaaaatc

SEQ ID NO: 22946 - DNA, 487 bp, Arabidopsis thaliana landsberg
  unsure (1)..(487): unsure at all n locations
aaaattgattcttttaatttatttcttatatttaatatttaatgggcaattgacaaaaaatagggccagagtaagtttttcttccaaaattagcacaacatttctaaaatttcacaaataacactataaacttcaataaaaattaattaaaatataacatagaaaataaaaaatgagagcaaacactaatctaatattaaattgaataaaaaaaattaaatagtggaaatatctacccaaaattaaaaatagagatcccaattataataccacaaactaatataaaaatgaaaaatttcttttaaatggtgaaaatatatactttaaagtggaaatagggaacccagataaaatacctaaactaatattaaaatgaatcaaaaaaaatttaaatgattgaaatatataccctaaattgganatagagaaccccaaatataatattttaaatttatttctaatttatgtttggctggatataatttat

SEQ ID NO: 22947 - DNA, 530 bp, Arabidopsis thaliana landsberg
aatatcgatttcgaggtttatttgttttgtgagaaaaaataatagattatttctttgttatatagaggtggatgtttaccttttttttttcttttgtagaattatgtatatactcctttttcttctatatttgataattaattgtaatattccccttttctaatatttggtcatatgaattagggctaacgaagtatagacaacggtgagttacgttttaaccaaaaggaaagtgtcttttccacatatgctctttctccaacagattgaaagacaaaattggggtttaatgagtttgaattactaattccttttttaatttttatttttatctaataaaatacatatagtttttgtataattatcttatttagtttttccaaaaaaaaacgtgtacttttaaggacaaagtaatcacttttcctttcttctataattgatgtaaaattttccttttttaatatttggtaatttaaattagaattagtgattgcttttctaatttctattttcataatataagatgcatg

SEQ ID NO: 22948 - DNA, 560 bp, Arabidopsis thaliana landsberg
  unsure (1)..(560): unsure at all n locations
cttctccattgttcaaggaaattctccaatctttactacctttaaatcaaccaccaccacctaggctctctgtgctgtgccacctccgctacctgtgccaaacacatcaaatgtgccttctattcctcgccactcaatgaacacaagatcaaaatccgacatcactaaaccaaaaaagattttgtcacttgtcaccacagccaaagcgcctcttcctaaagctcataatcaagctttattggaccctaattagaatccgacaatgactgatgagtatgatgctatgactaaaactaagagttggaatttggtgccacgacctcctcaggtcaatattgttagatcgatgtggcttttcaggcacaaatatgatgcagatggagtgctttcttgacataaagcaaggctggtagcaaactgtaaatcataggaacacggtgttgattttacagagacnnnnnnnnnnnnnnnnnnnnnnnnnnnnnnnnnngatgttcttgacgttggagtagcgttaacttgcccatacaacaactggatgtcaagaatgctttactaca

SEQ ID NO: 22949 - DNA, 548 bp, Arabidopsis thaliana landsberg
  unsure (1)..(548): unsure at all n locations
ctgcgggtatgcctaacccggtnnnnnnnnnnnnnnnnnnnnnnnnnnnnnnnnnnnnnnngtacctattccgatgcgtgataccatatcaaaggtgtacatggaccttgcatccaaggcctcaacttctagtcctgtagttggtgagatgcttgattgcatttccaagctagggcagctctcaattcctcaggaaagtagtccttgctcacctgttaccaagcctggttcttcaggtgcttccctgagcagggatgttccttccgctggtggaaagaaggatatctctgagaggacccagaccggaaggaaacctgttaatctgaatgaacccactggcgctcattcaaagacttctggtcatgtaccaaactcgtctggactgggtgctaatttcaacgagtgtccctttagtggcagtaccatgaattactcctgtccaaatccagttaacctcaacaagcatcctcgtcgtgtttgtcattccaaaaagagcaccaatggtgattactggacttcattgggtgtattccataagggcatccgtt

SEQ ID NO: 22950 - DNA, 572 bp, Arabidopsis thaliana landsberg
tcccctaaagcaaacccctcatgggcaataggaaccctaattgaagctataatcaaaagatcatgtaaacattatgatcatggcttgggccaaatataaaagttgtaatatacttcataacctacaattaatagtaaggaagtacccccaaaaagtttttagaaaaatccctaaaaagttcacctaaggttcagcactagggagaattcagattttgcctaagtacaaaaactaacccttgcacaaagattccacatgttcaccttaatccaaatttcaaaacccttcgacccaattgacaaagtggcgccaaattaaccctagaacaccctggaaagagatgacacctaatctagggcgctagacacgacttgacaccatttttgtctcggcttggacctagctgacacagccaacttctcccccctctatctccctaccccgaccatatcttgacttggaactcacagcaaaaaggtaggatatggagcagagaagcgaccatacacagtgactttgccaagatacgcacgctatggtgctctaatccgccgttgaaccatggcagaagc

SEQ ID NO: 22951 - DNA, 1256 bp, Arabidopsis thaliana landsberg
  unsure (1)..(1256): unsure at all n locations
acagggttggatgttaggaataaaggaccacatgtggcttacatggcatagtgggtcagaggatgtgtcataccgcacaggtagcctgaaatcacatccttctttaccacactcgtagaagaaaccggctgtccacaacgaagggtaagctgcacacataacctcatggtccacaatattgtcatatcctagactgagcatatgtggatgtataggatgataaatttggcgaaaaagatttgcacattcttcgtggagaataaactcacactgcatgcatgagtagaagttaccaaaatagattggcctgatgcatgcttgacactccttgttctcatcgtagtctctatttatgttgtcatcaagtctcaaatgatgatgttgatgactaaaatgttgtatgattccatcgcttatcttgacaaatggctcaacttctttaatttcttcttcttgctctccctcaagttctttaccatcccacacatttctttgtgtagcacattttgaatgtgctgcatacaaacaaccctccttgatgcaagaaatatcccccataatcattgttgatctttctgcgacaaacaccacaagacaaaccttcttggtcaaacgaaggagtaaaatatatacgatggctgtggcgagagatctttatgacacgtggtaagttgatacatcttagatgagtcacaaagtcacaaggcggacacatatagataggagagcttggatcggccaaggcgcaaaggttgcaagttaagaaagcttgtcttggaaacagagcaagaggatgaccatgccactccggacggtgatggtttatcaaaaagactggtggtttcctcgcacaaagtatacttatagcaaaatcgcaagccgagcaataataaagtatacggctaagagcttcatcacaacaatagcattccctggtactatcttcctgcaacacgacaagctggagagaatgatttggatgaagaggatggttgatctcaacaggaacattgttaaattctttatggttatcgccattgcaacctatgcagataaaatggagagtgtcttcttctcttgataacttgaatgtccgccagtttacagaaaggcaatgccacttgttattggtgcgccacgagacgtcttcaagaacacgaaatcttccgttttccagttttacttgtgcttgagggcacaaggnaatatactcccccgagtttgagttcatagagacgacgagggagagtatttga

SEQ ID NO: 22952 - DNA, 511 bp, Arabidopsis thaliana landsberg
  unsure (1)..(511): unsure at all n locations
tgatgctatcagatttttgtatcctgactaccgctacccgccaagggggcagaagagaaagagtgcaacttctgggaaggatgttacttcagctgctccgagtgagcccgcgccgaagggagaaaggtgaaggtccttactcaccgaccgcgctatattgaaccagccacagtgcccgaatttggcggtgagacctcttcggctactgaagccaaagaacccgcgcttacgcagaagattgaagagtcggctgcaatgcgaacatncctcagccaaattagctgagtcgaaggccgataatattgaagagataggggtcgaaggaacaaagatattagaagttacaagcccttcggcggaagtgacagtgccgaacggacaacaggtcttaaagtgacccccaagaggaaaagaatggtcaatgtactagatgcgctggagacgnnnnnnnnnnnnnnnnnnnctccaaggaaaactgccgaagctccaaagacgcagactgagacaaaac

SEQ ID NO: 22953 - DNA, 990 bp, Arabidopsis thaliana landsberg
attgtgcgagaaaaatagatgattctttgtaaacgtgttatattatcaaaaaaacaaaaggtgtcaaccaaatcgaaatttcctttttggttagattgatattattattattagtaaaggaaatcgaatctaattaagattacctctataatatcaaattcccaacggttagatttaatctataatgttatcaaatcccaacggttaggagaaatataaagcaaaggaacattaaacagatcttcaaattttgtgggctaaccctaaaattagagagaaacgaaaaaaagcatacacagagagagagagatctagagagagttatagagtaagaaagatgcttctttacgattatcttcttcaagttacctctattctcttcgatttcatcgaatttcatgagtttttcatctttggcttgccgttgctcttcgccaaatcttcaccaaccaaaagaagggctgattcttcttcttcgaccaatttcatgagcgtgatggaagttgatgctgattcttcttcgaccaagatgatgcctcagaccgacggcggagatggcgagagagagagacgactgagaggagaggtcaaaggattctcgtttccattgacgacgatggtggaggaagaaagcaatcatcaatgacaaacaagcttctcagatttgggcttccatattgggcttttctgtatgggccttcttttctaccaaatccaacatggtgtctcttttcttcattcttatttttattttattttctttgacaattttattttaagtaaaactaaaattatgtagcttaaaaactaaaggtttttctgttttatttttgaagtgttaaatttttaatttttgtgtaaactagttagacacatcatccaaacccctaagaggtgttctaggtttaatttggtttacacataattaaatttttagcacctttttttttaagatttgttttttttttctaatttttaatttttgtgtaa

SEQ ID NO: 22954 - DNA, 624 bp, Arabidopsis thaliana landsberg
ccactcctttgatattatcagattctccataagcatagcccaatgctcattttcaccgtccaatttggtatgatcaccgtccccttttcactcatggtgtttctctcttgtaccaagctcgtgacaagctttgataccactgttgttttatcaaatctcactttagggaaaaacagagatttgcaagatactgaaaactcatacttccattgaattcagatttttcaataaatagactttacaaaagaaagcaactgaagctacgaaactctcgcaactaaactaatgtcacgattctttctcctacaaaagtggagacttattcaaaactagaaaacgataaagttgcagaacaaacacaaagatgcaggcccaaacccaaaccgattgggctttattcttcagatgttaggtcttttgcaaatgctcagctactaattaaagaaaattttgaaccatcgtaatgatttaaacttataaatccttttaataacatgcatgagtctctggttttttattttcttctaaattttctggttttaaaatatttatgaacgggttagaatatgttcatcatatctttattcacaagacgtgtcatatagtcgtcggaaatgaaaatag

SEQ ID NO: 22955 - DNA, 634 bp, Arabidopsis thaliana landsberg
  unsure (1)..(634): unsure at all n locations
cttacttcatgtacttgatgaacagtgttttcatggactacctcaacaagttcatagtagtgttcattgatgatattcttatatattcccagaccggtccaatgcttcaccacctgagagaagtcttttttctccaaaattgatccttttgattggactttcttgtgagctttcctaccggttagacaaacatagttagcttctagtcaaaataaccaagaggaaacttaccttttcaccgaaatttgcattatcgctcaaacaaagtcctagaagcacttttctcacagatttgagttagagctcaaacaaaagtgctagaaacatagtactatgcaaatgcaacttatctaagtactcaaacctcatgattttaccctttttccaatagttgcactttccatcctccatttcagctctttaggaccactagtagaaaagagctctaagactgcagtagggtccaatttttactgacagtttcggttatcaagcgctaagtgtattcccagtggtagtttcttaaaatcgcatgtagaaatcatatttcatcagaaactgccactataaatcatttttatntaaattgttttcagtttttaaatgacctcgatcaactagtggactgtggagg

SEQ ID NO: 22956 - DNA, 597 bp, Arabidopsis thaliana landsberg
caatctcagcatctcgcttctcgttatatgcagcctgttcttcaatttgccgctgagcttcctgcagccgttcttctaaggctttaaaggttgagtctccggggagttggcggttggcactgcctagagtttctttaagacaaccaagtccataaggattgcctcttgcatccttttctccggggagttggcggttggcactgcctagaggaagataattagtgacagatcctaaatgtctctaagactctgaaaaagacaaagaacatcttacctcgagaaatatggctgcatactcatctagtgtgagatcccgaggacgtgaagagccatcagacacagcagaagcaggcgcctctagttcagacaacttctctctcacattctgctcatacggcagagcaatcttctttgccttctgatcaacataagtcccatccgacttagtgtgtgtctggatgaacacctcactaagagggacatgtcttgccattttttcttcctgcaaacacagatcacaagcttcattactatcaacagactaaacatcacacacagttaaacgaacatcactaaaacacatgggaagattgcaga

SEQ ID NO: 22957 - DNA, 372 bp, Arabidopsis thaliana landsberg
  unsure (1)..(372): unsure at all n locations
tgtatttcaaggaagaattaagagttttcaagcaaaaatgagtaaaagtaaatcaaaccccatttcaggacggtttttgtaccatagaattatgtcatccgttcaaggtcttcacctcgatgtggaatcaccacaatccattcagccattcagaagttatgtcgagagggggaagacatgacccaattgttagaagttatatgcacccgttccggagcctctaagtcacactagccaccaagcatgtgcatgggctattcaccactctcaccactagtcgcccaccnnnnnnnnnnnnnnnnnnncttaaccaacacttaacctaatcaacatatattaacgcttaacctataaataccaaacctttagaga

SEQ ID NO: 22958 - DNA, 3397 bp, Arabidopsis thaliana landsberg
aacgtctctgcagctctttcctgatctgaggacttcctatgttcctccttcacagctacagtaggttcagaaactttagatttagccaaagtgggatgtcgcttcaccttctgtaagcttctctcacagttatatgcttcaacctacaccatgaaaacaaagcacaacaaactatgagttgttgaatatttttggattcaaaagaaatatgctttggatttcagaaaccttacttcttctctaatgatctttgttgttgcagcagctcttgaagaagcaagacgcaggcaatgaaggattacactctggttcacgccttcttcccccggtttttggattgcgcatatatcgccattggcattaactgtcacagtcattctcccacacataactgcttcttcaacataagttgggtccatcacctgcatataacaacacatcacactttatatctcagaaaagaaaaaagaaaaagcaaactagactctcactaaaaatacaactgtttttaccacaatgttgcctttattaaaaaatccaaacgtgaaggctattgggagatgatgtattatcaatggaagtggttccctttcctgtaaaagaaaccaaagatagaacaaaacagttgaagttgagaacttccttctctctagttattaagttcatcaactaaactgaaaaaaaaaaaatatgaattactaacttcgggtggatgtatgatcacgtcttgactgttgtcccctcctacagtgcaatcaggtctcctgaaagtcatgagtgcggctaaggcagcaacattagcagcatcaaccaagttcctgtaagagagtgagtaacaatatacacataaaagatcattctcacaacaagaaccttggataaacatgaagaagacctaccctccattgtccaaaatgtgaagatcaatgcgaacagaccaaaccagctttccggctagaacacaaagcgactctgtatctactgcacggctttctctgcaaccaacaacacaaagaccatcaatacaaaaaactttgtttgtagcatcaaatcaaaaagagaggtttaccgtagagcacggtctataatacggccaagctcaacagcagattcaccaggatgccctggctcaaacgatggatcagccattggagaaaactcggtgaagatagagaaggagccttcactaggtctgtctttgtaaggttgtactagctgagcagtcacaaaagccattacatgagtctgacccagttgaacttgtgagctgccatattccctatcgaaaactcacacagattaaattaatcatcagtaacaacattgcaaaaccagagatcaaaagcatcaacaaaaattgaagctttaaaggtaaacataatcaatgaataggagaaaaactcacttgccaaacttaatagtaagcttgcggtaatcataaaggccacgaccatcgactctgagctcagattgcaacgcagattcaacgaatttgctctcattcacagtcaaccttcacatattattcaacctcccctccattgtttgctagtgagctactaccacaaattgatgattgagaaacaaaacaagatacaaaaaatcaaaactttcagaatataaaaaagcctagagaatcaacataagcagctttccccagagggagattaaaccactaaccttcttccgttcagctagggttttgtggcgcgaggattttgtgaacagagaagaggagggatttatttcaatttaacccctcgtcttttcagtatttgtcttatggaccaattttcatttatctctttttttttccttttaataatatttgtttgatggagggaccgtgtctagtccttctcttatcaaacgactgaccagctcttatcattggccccgttaccctaacggtcacaagggttttcgtctgtttgatacacccagtcttgtctatcttgactattctggttatcccgcagaagattatgaggttgatttgggttcccttgtagaagctacactcatgggagcgtcttccagatgactattaattattatgtggatggtgatacagaggatattgttggttatgttacgaatctggttgcagggataagcaatgttaaaacccttcacttgtccgctgtttctcttgaggtcagtctctgctacgtcttcttcttctattggttgattctatttgaagtgcatgctagctagcaaagtctcattttgtgtatatgtttgttttggttgtgacaatagatcccaggtattttactcgtgctgtaaatcaatcccggtgtttcccaacctcgttactttatcttttgagtgtaacaaagaaagaggctggtaagtggagccacttctccttaactactctccaaatctagaaactttagtcatcaaggtatcatctatttcgttcgatcaccacgcacttctgtttctttgctaaagttattattcccatgaatttgcttatgccttgttctttttgctttcacggtcttgtgcatgaagttacagacaaacgtggtgacgcctgcgtttgcacccctaagagggataagaggaagagctgaaacgaatgaggcatttcttggcaaatttaaaacgtcttgaaactgtcaatgttaatgtcgaattgagtgaaggcaaggatgttaagaaaaggttcctgacgatcaccaatgctcttatgaagcttcccagagtttcatcaaactgtctgatccatttcaccatggaatgtctagtaggtgaattctactactttagtttggcagtgtattttttgttaatttcattggctttcgccgtactaagatcatttctatatacattataatgggttcgttgcctaatgactccaaaatgcttcggggtcttggtttcgttcaactggataaactctagtattctagttgaatataaagtaaaaacttgcatttccagtctagtatatgtaatgattgaaaatcaagaatttattagcttatagctttgccaaaaataccacatatacaatacgaaggaatcaaagagtaagtaaattaagatcaaattcagtagtcgaattcaataggattcaatgaacagaatcaccaaaaattgaatcaaaatcacaattcccatatacacatgtctatactttagaatacatgtaagaaaaaatatctatgtacctcgttgtgaacctaaattagcagttgtggaagagacccatctgctcattttcccatgagctctcctaaactagcttcttgaatctccaaattaatcagccaaaaatatctcattctttcttgattcgcctgccatttggatcgttacttcaggcacgaacccttgaccccatagacagagaatataacatgtctgctaatcattc

SEQ ID NO: 22959 - DNA, 1206 bp, Arabidopsis thaliana landsberg
cattcactcatggtactagtaaaggcttagagctgtctttttggtttcactttcgtttttgatttattactttgacttcaacctcttggttcattattaatcgattgttcctctttcttaatattgattttagaaacttaatagctaaaatttcatatctcttggtgtttataattgtagatgcaatgaatgggtcattataggaactttaccagaaatagaggacaacggtctaatgggtctactgctgttcggagttcacagtcctctcctcattcgactacaagagcatgtcctcagacaactgaaccggtgcaacgcagcccatctctttcaccacataacactcctattcaagagacatatcagaattctactcacactccttctccacctgaaggtcaagctcaatatcaaatgggtttggacttacaaaactagaccctaaacgtcctccaagaacacattggtaactcctttaattgtataatgtgtatttttcaattcaatgacatcattaagttactaaagtctgttgtaggtttgaggttgataatgaagttgggaaggtggtctctaactacatcaaatgatacttcactgaacctcacgctaacatctcacaggcacctaagaagattgttgacacttggtttcacatttttgcggtaattgattagatttctgtttttgatttgtagaagtaggtttgcggtattaattacttttatttccttgacactacaacaatataattgggacaactcaattaacgaattggttaagaggcaatttacaattaaggcaggaatccgcttgtgtgatattgttcgcaagtggaaaagtaagtagaaggaaatagatgataaagcaatgcctatgtggatggatcctaaggtatggaagggcctcgaagtttttttgcttgatccatagtctgaaaagaaaagtggaaagtgttcaaaatcacgcaacactagtgtggccagtcatggtccgagtagacacacctcaggtcaaaagacttatgctaaacgagcattagaaagtgtaagtaatttatgcttttcacttttttctcattttcctagtttcatgatgatgattactactttaactttcatgttaggctgaaaagaatgaaggtcaactccctccaattgtctagatcatggagcagactcacaagagaaagaatggagaatt

SEQ ID NO: 22960 - DNA, 2787 bp, Arabidopsis thaliana landsberg
gtcgatggcccttcctactcacattatgttgcaggttagagtgcttgttcagatttaatcttcgatttcacgtgtagtgagcaaggctggagtggtgaagagatcgagatcaagaaacggtttcttgtagcgtttctactctcgtataaatttgtagttttctgtgaggttaacttctctgtttttacttttcgagtttgtagttttaaggtaggttcatgatttaaacagaatcactaaagtctaaaggtaaactgactggtgtttggaaatttctagatgatatgaacacttctctccatattactgaaccaaaccaaaccagattatcaaattcgcacaacaagacacatactactaagaattcactttcacataaatgaaacgcagcgtttcatacccttttgttaaacgcagcgtttcacgaaaacaagataataataagcatcgagatggaaaaaggcctttgggctttaagatacagtaaatgggactgtaatcctttttgggcgccctattacaggcgtgctctctctcctctctccatctatctccctctcttcgccggagatcgccttcaccaattccactgtgagtcgcacatcaaatattcctactttttcatgctaagattttgatttattgttaaatcacttatatttaaatgattcctgcatttcgagctcgtctaatggaattcatgtttggaatcgatgtctcgacatacgtttttttgttcgattagacgtaaagagctcagctttcgccttttggcattcaaatttgtttactgagtggatatatatggtttgataaatttaagctaaatatgaatcttaaagctttatattcttcgggtttgattttagctcttttattagcaatctgaagttttttgtttgagttattgataaaatttttatgttattatctatgaactctctgattctgagtctattgataagtaacaatctttgtcctttactctctctccacagatagtagcaaaaacaagtgaagcacaatggggatcatcgaaaggattaaagaaatcgaggccgagatggctcggactcagaagaataaagctacaggttctctttttacatagagaacattcagttataggcatgggacttatcagtttcatgttgctcatccttagtagacgaaattagataacaaacattacgaattaaacagattgcgagcctttacaacacattatagacacttaagccaattttccaaataatcactatgacaagtttctggtccccttcttctgatcttacatttgctaattgataatgttctgtttgtgaacagagtatcatcttggtcagctcaaggcaaagattgcaaaactcaggacacaactgttggagcctccaaaagtaatgcaagctctttataaaatactaaaccattagcctatgcgcttatatttctatatagctgagtgattcttgaagcttgtttgtttcctttcttactcggtttatagttttccttgctggtgtgttgctgtatgtttactactaagatagacgatgagtaactactgttttcgtcaccttagcttatctatttagggctataatctatttaagattttcctgctgctttgatctgaagtagaatttcaaacatttttcattactgctttcagtttgtaattgtcttccgaattcctttaacagggtgctagtggaggcggggaaggttttgaagttaccaagtatggtcatggacgtgttgcacttataggatttcctaggtaaaggcatagatacttatactcacaagatccaattacaaattatttcctgttttataaaattatgttgctccttaagaagttgctggcataagtttagggaaactgatggaaatggttgtactttgcagtgtcggaaagtccacgcttttgactatgttaactggaacacattctgaagcagcctcatatgaatttacaacacttacatgcatccctggtgtaattcactacaacgacacaaagattcagcttctcgatcttcctgggattattgaaggtgcttcggaaggaaaggggcgaggaaggcaggttgaaatccaattgctttcttttcttgttggttatctgatttctttttggatgcccaagttcgcctatcagaaaaagataatcaagaggatatgaactttcgttatgactgcttatttctcaggttattgctgttgcaaagtcttccgaccttgtattgatggttcttgatgcctcaaaagtgagttacggtttatatgtccacgtgaattggtatatggttgtcatgctctacttgtttattaagctttgtatttgcttgtttaaatttgttagagcgaaggccacaggcaaatattgactaaggaacttgaggcagtgggcttgcgactaaacaaaactcctccgcaggtaaagcttgtcttatcagcagtatcaaattatagatgtgtcatgtaatacgctgaagtctaaactccttcaggtttacttgttatgctccattcagaaacttgggttcgtgtggaatttgtttatgtatatttggtttgttctgcccaacagatatactttaaaaagaaaaagactggtggaatctctttcaacactacagcacccttgactcacattgatgagaagctctgttatcaaatcctgcatgaatacaagattcacaatgctgaggtacgtggttcctgctttattcttgtcttgtctaagtgttatgagtagaattttataatcatcagacattt

SEQ ID NO: 22961 - DNA, 542 bp, Arabidopsis thaliana landsberg
  unsure (1)..(542): unsure at all n locations
ggcgtaaatgaaaaaagactaacgaatcaatttacatttcangttcattcatctgtattaatgtgtctgaccttacctaatttggagacggtaaacttggtgagcaagtccatttcctctgtattaataatgtagcgactaaaagttaacatatcagtatatcactaccgaattcttcaataagggttttgtttttcccaaatctcttgccttttgctaagatcgatcattcactattttatcatgtctctgtttctcaaccagccttccaagttgtgcctaggccaacctgcgttgatgagatcctcctctcattttctctctaatggattctaatcctcttcactgcaatttcctccttcttccatcaacggctgtggagtcgtgactcaaggtcgccacacttgtttggcaaagaaggttactgaggataaatgtgaaataatgtggtcagcttacccctgggtggcagctagtttcattcacgacggaatgttatctttctttgatgatacatgtacatgggagtcggatatagcagt

SEQ ID NO: 22962 - DNA, 2548 bp, Arabidopsis thaliana landsberg
aatgggctcacaacaaggaaaaaaaagcccatttaaatgttcatgctctatttgtagaaagacctttttatccctagatgttgaagtatgtcctcggtgtctaaaggttaattggggaagaagaaaactctccgtctttttgtaacttccttttgcttcacctgtcttctcctcttgttctattttctttttccgattcaagcaaaatttttcaaggtaaatttactcttcttctcaagctgagtttttttttaatcattggtctcctccttcttcactctcgtacttctcttcttgaagtctctcttgatcgattcgattctacggtctctctcgatccgagggtttttgattgaacttttattggtctctttgataatgaagaaattattcaaccctaatgtcaaattacttcagacgatttcggaaacttgtttattcttatgggttgatgccaaagtacttaactttttgttattgtagactggtcaatttgaagaatgtcgcaatcaaccgtagatgtgccgccaaagggtgggtttagcttcgatctgtgtaagagaaatgatatgcttacacaaaagggtcttaaagctccgtcttttttgaagactggaactaccattgttgcctttgcctttcaaggtatggtttttattctctacatagttttttgtctatagattggatagagtaatagtttcatgggaactgttttgttcttagtcagctgagaactaagttttgtattgtggaagttaaaattagatctttttagaattggttagtcaagaagttgaggcctaagactgagtttgcaggcacagtgattagattgctttacttagtgtgattgtttacttgtatcctgttaaattctttggggtcgttattgacgagcactttcagtttcgcatgatacatctttttttaaggaatgaattttatctacaagtaggttttgcttagtgataatgtggtggttcttatcattagctctctgcctctccgtatagtatagattacagtatccagacgtgtaaagatgtttgtgttagttaatgattgtggaagctatataatgttgattttgatattcgagtttttttgtataggatggtgtgatactaggggcggatacccgagcaactgaggggccaattgttgctgataagaactgtgagaagattcactatatggcaccaaacatatattgctgtggtgcaggaactgcggctgatactgaagcagtcactggtatatatactttctaccttcagtggggcagattttgttttctctgtcaaagaaatcagaatctaactggcataatgcatcacttcatagaaattgatgcttagttatcttggtttctttcttattgtccagatatggtcagctcacagctgcggttgcatcgttaccagactggtcgagactctcgggtcattactgctttgacccttctcaaaaaacatcttttcaggtaaatttgttctttctcctctagaaactcgtcttaaagaaacatagattatttaactgcctaaaattcatttcagctaccaaggtcatgtctctgctgctcttgtactcggtggagttgatatcactggtccacatctgcatactgtaagttatacattcccgacagtatatacactgagaagagattttttgtctgtttgttgttattcatatcacatttgactgtttattttatacgcagatatacccacacggttcaactgacactcttccattcgctacaatgggttcgggttctcttgctgctatgtctgtgtttgaggcaaagtataaagaaggcctaactgtaagtaagccattcacctttcaatatccagagacgttattttcatctgtctgattattcttgtttacaaaatcctctagagggatgaaggaattaagctggtcgctgaatccatatgctcgggtatattcaatgacctgggtagtggtagcaacgtggacatctgcgtgatcacaaaggtttgtcttcaccctactttaacctgtacctttgattaatccacaaatctacctttggtcagcatgttagactcatagtttaacatctcatagacataacagtgaccaagtaaatcgccatcaaacctcacaaaacccaactcttagcattgccattagataaaagcaaaacaccctctccatttggtttagtgcaatcctagacctctgttctgcatgtacatattaagctgacccaagttattcaccaccagatcaaactcttttgcattacatgtgtatgttttgttgcttttgagcttattattggacacaatattggcaaacaggggaacaaggaatatctcaggaactacatggaaccaaacccaagaacgtatgtcagcagcaaaggctattccttcaccaagaaaactggtaagttactctcgaacacacaacaaatatacttgcttcgaaacaaatcgcctttagctggtcgaaatcctcagtttttctcacttcatttttgttgtgtaacagaggttctcgttag

SEQ ID NO: 22963 - DNA, 1461 bp, Arabidopsis thaliana landsberg
  unsure (1)..(1461): unsure at all n locations
aatgaggaaaagaggaacaaaaagaaagattgaaattgagaaacgcatgactaaacaacaacgatccgtcgcttgcagcaaacgccgtcccacactcttctccaaagcggctgatctttgccttctctccggagccaacatagccgtttttgtaacttctcctgacgagaactccgatgtcgtttattcattctcgggctactctcatgcctctgaaattgttgactgttacctcaacaacaagtctcctcccaagactactattaaccctgaatcagccaagttttggtgggaagagcccgatctttaccgtgattgtgacgatctgtctgagttaagaatcatcgaagatcgtttgatgagaacgaagaagcatctcatggattatcttgagaagaaagaaaaatcacactctgtttctaaatccgatcaaaaccctaacaacgacagngggttttcttctcctttctcacaaattgcttctgattttggtcaaaaccctagtacctctactctgtcttcttctcaaattgcttctaattttggtcaaaaccctagtacctattctccgaattcctcacaaattgtttgcttttatcagaaccatggcgagcctcggtcatcacaagttacttgttttgatcaaaatcatatcttctttgttgatgagtcattatttgatcaatctggttacttagttaatgatgatcaatctggttacttggttaatgttaatcttggatttgttgacagcttatgtgaaatagaggaagagaagaacggaatgagtgtaccccaagaaacacagacatcaacgcttttcactgaggatcagagcttttgggaaaatctattcaaggattttaataacgaaaaccttgaggttccacttcaagatcattcctcaactaacgaaaaagacgagtttatgatcgatattagtgaatacttaagcgaagaagcaatggaatggcctctggtttagttagtttatagcttaacactagttaattagggtttttttgaactctaaattgatctgttcattaggtaataattaccatttatgtttttgtgtttgtaacgatctctagtagattcatgttgtttattgttttttaatcttgtaagaatacgacaaggctgagcctttttgtgattttccctgtaaagtacacaaaacttgtcttcaaaattagctcaaagctactttagtttcaataataagtgtttagaaattctccttcatcactaaggcaagggtgtctctaagaaaggtatctgaaaaaaaaaaacttgaactttcttttgtgtatttaaggtggtctaatcaatggatgccaaattgatctcttttgtctgagttagtctttgcgagtgaaaactctgcaacattctctgtttcttagattatcctcattaccttcttaatgcatcactctacttcttcattctagtggg

SEQ ID NO: 22964 - DNA, 490 bp, Arabidopsis thaliana landsberg
cgtcctccggcatgccgagatggttgccttcggagggatcccctagctcgacgtggaaacattcgtggtttgggccgcagtcctcgtcgtcaaggctgcggcttccgtcggaacagtcggagaggcagtagtcacatgcggtcatgaagtcccgcatggcactggggttgccaaatccagagaaatcccaacagatgctgggatcgtcatcttcctcggacccagagggcccgtaggtcgaggcgtccgtcaatcggtcccaaggcgaccgcatacgaaacccagtggggttgcactcgcctcaatgagagcgccgccaaagcaaggttgctaggcgggttgaggccgagtcgaaatgacgtaagatgggaattagtcagtaccttttggtcgacgcggacgacgtagtcacatcggggactggttgcgccgtcatctcaggtacaagggcgacgtcatgcaagctctccgcgagcgcgctggcgtcgtc

SEQ ID NO: 22965 - DNA, 1545 bp, Arabidopsis thaliana landsberg
ccgagtctgtcaactttgtagcataaacacgcttagatgatggagtaactgagtcagaagtctcctggctcgaagttaacataagacactgtaaacacgaaaacagagtttagaaaagtttcattgatactatataatttacacctaatttgttaaggataacatgtgtagaatcatacctggtccccagaaacaatggatgcagggttgacagagtggtctgagtcttcgaggacttcatcaccatagagaccatcggtagacaatagccttgtgcctttaaaagaatccttaccatcccatatgttttctttctcaacagataccagaaagtgaaaagtcttcccaaccaaatttctcaaaccgtcagggacatcatttggatcctcaatctaaatagtaagaccatagatcgttagttagccagtttatatactcttgcagcatattagattcacatacattagacgataactatttagattgtgagtatgcctcattaaaagagccacctaacatggatgtacattattcaccacccatatctgcacagatggtatcaaaaataaggcatttggtttcacctctgccatccatgactttcacataaagcatgtaccttaaattatataagggtcaattaatgtgtgcatttgctagttgagttagaacatgtcataaactgtaaggtatacttacttggcttgcacattagtgactgcattcttgcagacatcacaccaaaaccttggttttgatgactccaatgaagttgtgttaacaccagcatgaatgtgagtcactttcttgttgcaattacggaaactaaagtaataccatgaccaatccaagtcaagagcatgtatggtgcagacaaccttaacctttccaatctgaaatgaaaatttatataagtaagtatatgataactcaaattcatagtacatctaaaatgaagaactcaaacctccatagaatgaagaaaatcacggattgacttcctctcatactgcgaacagtcatcatcctgtttcacagtaaccatgggaaactttggaacactttcacggaaagtgagagaaagaccatcaacatgtaaactgttaaataacatataaacggaaagtgagttaaagacaaagaaaatagaccgagaaacaaaagcttgaacttcagggaaatccgggttgatgtggacttgagatgcataaaaagagttagaaaaactcctaactcctacaaaacacaaaaagtagaacatttaattatggtaataactgttagaatcaatgagtaatgtcaagaaagttcagaacagacatgtacctttgtaagacttaatctttgcaaatctcagaacacagataaccatttgaccatcagcaaattcacatgcactaaaaacactctgagcaaatgctccccacaaagtacatgacattcgctcatcactaaaccaaacaatatatcagagagattgaaacaatagttgcattcttgaggataaaaaacataggtacatagacttacgtgtcgtcccttaat

SEQ ID NO: 22966 - DNA, 433 bp, Arabidopsis thaliana landsberg
  unsure (1)..(433): unsure at all n locations
aacctgtaagtctagaattcccatctacaacattcttcttgaatgagacccaaaacgaggttttccctcttttgtaggactcttgaaaatatccaccgttaagggtatctctatgatactcgacgctctatagttgcgtcatgcataccatgtgaccagcagtcgcttgaagatctcaaacgcaacgtgactcaccacctcacctaggactttgaacatgctgtctgtgattccttcttgccgaaggcaagagataagcaatggctggagctnnnnnnnnnnnnnnnnnnnnnnnnnnnnnnnnnnnnnnntgtgatcagagagtatgacgttgagttgtctgatagccatctcttcgggctcatctccaagattggttgacgcaaagattttcaaaactccaagagataatcaaagacctcaaaggaagcat

SEQ ID NO: 22967 - DNA, 1547 bp, Arabidopsis thaliana landsberg
cgatcaaaattaaaacagtgtgaccaaaaactcctgcaaaaatatatatgtatatttgtaaaagacttcacatgtaatcgtgatttaaaacaagggaaataacttatatacaaagtcttcccggaaatatcgttttcagaattttaaaattcgattcagaattttttttaaatggtagacattatgcaaataatggaagcttacttgcatttaattaagttagtcttttttgtcaacgcttgcatttatgcctcacggcgttcgttaaagaatactccagcatatgcaattaggcaattagcagcttctcatctattagttttttggacatcttcatatctagggtatacaatacatcaggcgcatccattgcatttactgtggaaaaaaaaatgagagaaattaatgccctttcgagtacaattagtttagtgggggaatttggaaacattttatggataaataaaatattatgatatagatgaaatacttatttgtgggtttgaatggttacgacggttgaggcggacaaaaccgtcaacgaatcagaccgctttttatttaccattcatcaattatagtttgcagtgatctagataaaaaaaaatagaagaaaaccgcagcggaccatttgcggaccatttttacatacaaataaaattggtctgtagcgatttattgtccgccccaaaaataagatgaactaaaccgcagacaaattagaccgctatgtccactgcatccattcaaagccttattttgccacatctataattacattttgatgtatgtgcattgaataattgtaaacctaaaccaccctaatatacatataagttagttttcttttatacatttaatttacaacgaatattatctatcttaaaataaaaaaattatttttgcaaaagttgtataccctatttggtcaaagaaattcttatgttatctaaaatatgcatatagacacatataacattaatcaatttaaacaagagggagaaaatcatggcgtagcgcgggaactcacatttaaaaaacaaaaaatagaaaagcttagaagccaaacgaaattaaattaaactgccaatccaataggttatttcatgcaagttctcagccgctttagaatttattttatgtggaaaatttatctagttaaaaatgaattcttagaagctgagatattagtttgagagaaccaccttgaaatcatgcaaaaaaccctaagacaggatccgaatcttaactttgcattgttattggaaaagcccaggttgtgttcatttgtttatgtcttccctttgtttggaagaatgaatactgtttgggattacattactcattctcccatagaatttcaagtactttgtgtataattaacgattcgaacaaacattaaatctcttatatgatatattaaaacatattatttcacatactactgaataatgcttttaaaacataacgaaaatagcaaataaaaaaaaaaaaggctcgacgcatttgagatccttgatggtagcgagtcttggagaaagtcgtca

SEQ ID NO: 22968 - DNA, 520 bp, Arabidopsis thaliana landsberg
cgaaaccgctgaacatcttgcttctgttgatatgatgcgccttaagcatatcataatccttcagaacaagattgatctcattaatgagaaagccgccactgaacagcacgaggctattcacaaatttataacggtttgatcaattttcttatctctctgttgttaaatctttcatgacttcatcagtttggttctcatattttctgtcacatatataatgttgcagaacacgaatgctgaggatgcacctatagttcctgtctcagcacaactgaaatacaacattgatgttgtgagtgaatacattgtcaagaagattccaatccctgtgagagactttgtgtcaccaccaaagatgattgtgattcgttctttcgatgtcaataaacctggctcggcgggtcatgaaatgaaaggtggtgctgctggtggaagtatcctccaagtatgtgtttatctctctgctactcctctgctcttacctgactgtgaaacaatttagtattaatatgtgtctctc

SEQ ID NO: 22969 - DNA, 486 bp, Arabidopsis thaliana landsberg
catctttttatatcttcttgtaaacagaacattcttttaggttgaatctatacttccgcaataacaatgacatgggcaatggcagaacttgctaaaaaccctacagtgatgaagaaagttcaagcagaaatcagaagccaaatcaagaacaaagaaagaatcagctttgatgacactgataagctcgagtacttgaaaatggtgatcaaagaaacatggaggttacatcctccaacacctcttctccttccaagagatgtaatcactgaatttgagatcaatggctacacgattcctgccaaaacacgacttcatgtgaatgtttgggctatcgggcgtgatcctgatacatggaaagatccagaaatgtttctccccgaaaggtttaatgatagtaacattgatgcaaaaggacagaactttgagttgttgtcgtttgggagtggtaggagaatttgtcctgtactgtacatgggaacaacaatg

SEQ ID NO: 22970 - DNA, 590 bp, Arabidopsis thaliana landsberg
  unsure (1)..(590): unsure at all n locations
ccagttaatctctgatcaatattcacttctgtatgagtatggacattatcataattataaatggatccatatccagcgagaactcatgaacagtaaacaaaggcaacattgtccattgatgtgtgtccaatatgtgcaatccatatggttatttatacctaacacataagttatacataaacagaacaagacgatgaataagtcataatgctccctcagttaccgtcaccaactcgatcgccaccaccaaccaatagacactttatcaccatatcaaagacaaccgtcgcaaggaaccataacatatccgttggagaaacagctaagaagagacatcgaagtaagcaacgaattttagatctaaacccaaatcttccgtcgcaaattattgggtgtttcttccgtcgttgaatgtttccgctttcgtcattcacacacntgccgtttttatactccaccagagccaaaccttgactaatgaagcgagtacgttcaattagccaaaattgaatctcagattccaataaaaccataggaattcgagaagatcaaaataggggaacgaattgatgaatngacttctgatgaga

SEQ ID NO: 22971 - DNA, 3830 bp, Arabidopsis thaliana landsberg
caccaaaagataatatatcttttgacttgtccgaaaagtaaacatgtccaaaggacataaaaataatcaaatctgtatcccttatctttttttttgttgttgtgatcaacgaaaataattaaaattttaacacatgctaaatagtgtttattgactttttctccaaacgtgagatagttttggtcataatacattaatggtataattaatcagcccttataaacacgttattggttaaataacttgaaacttatgtcacaatcaattccattaacactccacgcgtaggcgtagcttagcgtgcgtgcaactatccgctatcataagttcccattatcactagtattaaactttggattaaggatcttactcagattttataatagtttatgaaattttgttacttttatagtctcttaaatcagaaattgacttcattaaacagatcgtacgaaattttctgatcagtaattcttttttcctttataattcatcacatacaaacataaaatgaaaaaagaagaagacattttagaaataacttaaactctacatctaaacttgaataccatgtctaaattaatgtattatttaacataataaaatgtctatttaagtaaaattaaagaataataaaactcgaatcacataacaagccttcattgccgaataatttagacattaaaccaaattaaccaaacattttttttttaccagactattatgtaatgcatatttaaaaactaattacgtcaggtgaaattaaaaaagaaaaaggtatgacgccgtcaaaggacccggtagtggacccaacggtgcatcaacggaatccggatctacccaattgtatcttaatttgagatccgaacccgaaacgaacagattcttttattggattaattagtgaaaaataaataaataggctttcttttcttacacgtcaccgaccgaccactcctgtctttgacattctcctccactgctttaaatgaaagatacagagcactgttccgattcttttcatttttccattgaaattacaattcaaagctttcttcttttgtacgctattccattaattcacattgaaactttcaaaattttcccttttctctggctttcgagtttttctcgattcctttctccattttattctttcccctcttcttcaacatctcaatataaaccctaattttgattctagtttctcaattggtgtgaattctcagaaattcagaaaaccctaatttcgtttttttctctgttcggtttcctttgattctccgatgaggatttatctgattttcctcgtggtggtttccttatttacctccgcgttttccgattcgattctcgagtacccgtcggaaatcgagagtcgacacaagaaagctgccgaagaagatgtcaatttgcattgtacgacctggagattcgcggcggagatgaacaatctcgcgccgtggaaaacaatcccggtggaatgtgccgattacgtgaaggactatgtgatgggtaaaggctacctcaccgatttggagagagtctctgaagaagctttgatcttcgcgagaagcatcgaattctccggcgatggcaaagatatttggattttcgatatcgatgagactctcttatccaatcttccttattacattgatcatggttttgggtacattctctcaaaacttttactttacacatttttatctcaaacttggtttggtttgtgtatgttcatgtgattcttttgctagagaaactcataaaagaggacaattggttatagaaaatgcttgactttgttgattatgttttgggaattttgaaggttggagctttttgatcattcggagtttgataagtgggtagagagaggagtggcaccagccatagcaccaagcttgaagctttaccaaagagtgttagatttgggatacaaagttttcttgcttacagggaggaaagagagtcacaggcttgtcactgttgaaaatctcatcaatgctggtttccagaactgggacaagcttattctcaggtataattataaacaaatgcagcttcttaggttgtaactatacatgcttctaggtcatgccatgagttttttcgttatgcaatggttgatgccggtggcatatagtttgataagaaacatgggtagctctttgattttaagtcatgcaatgagtttgttcgttatgcaatggttgatgatgctggtggatcatatagaattctggatctctgcaaatggtttgataagatatcttagacatatcatcatcagttttgaacatcctttgtttattcgttttgctttgccctcgtgtctgtgtgtgatgtgcagatctccagaggaacagcacaaaatggcgacactatacaaatctgagaagagagatgagatggtgaaagagggatataggattagaggcaattcaggtgatcaatggagtgatttgttgggtacctccatgtctcaacgatctttcaaactcgcaaatccaatgtattatatcccctgaagggctttatttgacgacctatataaaacatttcaaaaatcgtatatacttactattagagcaatcaaagtgtttttaaagttggattgcctttgcttgtaacttgtcaagctactaaatgtactaataacagagaatgctctgttttatacagagtagatagtatatagtactactcgttttaacttctttttttcacaatgtattcgtgatcatctttagttacactaaactctagtatgccaaaattaaaactctttagtttcttttttgttgacatcaaataataagaagtgcattaagagaaaaagtcacattcattatcgttgcatactccaaaagaacacatgttcaagccttgtggcacattcatcacaaactagcagtaagagccttaacgaaaacatgttgtttagggactgtaagcacatgatcaaaccactcaacctttccccaaaaactaaaatttaggtgccttttaagcgcaatcacggcacaccaaatcatcatctcatctctgccaccagccccacaagaagggcgatcctcttcccataaaaccgccatctttccaccataatcagccaatctaacaaacatattctcaggtaaactaggtagtcctaacaaacctttcaatattctccacattcttaacttagtatcataccatctgaacactccgcgatgaatatagaacaaaacattattcatctcgcaaaaagaatatgaagccctcataccaaacatcgttggtatagccttgtcccatctaccttccttgtaagcatacaccactccgtgagtcgtttccacgtgaaactttccatcaatacatgcgcttttggagtaaaaaatgccttttgtcttgctgcatgggatgggctcaggatgccacacttgtgtttttgtgtcgaacacctcgaacaagttcttacaggagttggaatcgccattgccatctttgtagcttcctgctacatatatctttctgtcaaggacgctagcagaatgtgacatcagctccacccgcaagcttggagcctcgcgccacatgtgagactgggaatccagaatcgagacactagacgaggagggtcgtaggtaaatggatccaccaatgttgtagatatcagagccaaccgccacgagacttgaaaagtttgcagtaggagaatggggaattggcacagtagccaaaccatacccatttgacttcttcttctaactggtgtcattggttagggttccgtcaggtttccgacagagagtgaaccaatgtgtgttagggccacaatc

SEQ ID NO: 22972 - DNA, 646 bp, Arabidopsis thaliana landsberg
tcagaactccgaagctgtaaatgtcggatttttcagagaacgtaccagtccaagcatactcgggagacatgtatcctctgttcatatcatacaatagttagtcaagttgagtatttatatacatgaacgacttttagttaagcatgtcataagaatggtagtggttacttacagagtgcctacaacactaccagtgctgtcttgatgttgatttccatgaaacagccgagccaatccaaaatccgatatttttgggttcattttctcatccaagagaatattgctgaccttcagatcgcggtgtacaactctgaggaatgagtcacgatggagatagagaagtccacgagcgattccttgaatgatattgaatctcgtagcccaatcaatctcaagctttttcttcaaatctgctggccaaaagtacaacacacagagtatggcagaaatcgatcagcataaagaactctctatcgtcatggaaggagaaaagcaggaagggacttaccaaatataaagatatcaaggcttttgttcaccatatattcatagaccaatagcttctcttctccatcgatgcagcatcccaaaagccgaagcaagtttctgtgttgtaatttcgagatgagttttatctcgttcatga

SEQ ID NO: 22973 - DNA, 1519 bp, Arabidopsis thaliana landsberg
  unsure (1)..(1519): unsure at all n locations
attttacaaaaatctgattatgatcaagaaactaacacgtcaattttgcaacaaaagaagaaaatctcacataatgcaaactgagacgtacgtggatggtaagtaagatgtgtggtcgagagagagtgagcaagtaggtgttgaataaatgcgttgacgctttatatatattaagaacctttgtatttgaataaatgcgttgacgctttatataaattaagaacctttgtatgtgagaatatcacaaacatacaaataattctttacttcaccaaaagaaaaaaaaaatgggatccatatcagaaatggtgttcgaaacttnnnnnnnnnnnnnnnnnnnnnnnnnnnnnnnnnnnnnnnnnnnnnnnnnnnnccacgtcaaccctcttcttcgtctcggcaagttaattgcttcaaagggtttactcgttaccttcgttacaacggagctttggggcaagaaaatgagacaagccaacaaaatcgttgacggtgaacttaaaccggttggttccggttcaatccggtttgagttctttgatgaagaatgggcagaggatgatgaccggagagctgatttctctttgtacattgctcacctagagagcgttgggatacgagaagtgtctaagcttgtgagaagatacgaggaagcgaacgagcctgtctcgtgtcttatcaataacccgtttatcccatgggtctgccacgtggcggaagagttcaacattccttgtgcggttctctgggttcagtcttgtgcttgtttctctgcttattaccattaccaagatggctctgtttcattccctacggaaacagagcctgagctcgatgtgaagcttccttgtgttcctgtcttgaagaacgacgagattcctagctttctccatccttcttctaggttcacgggttttcgacaagcgattcttgggcaattcaagaatctgagcaagtccttctgtgttctaatcgattcttttgactcattggaacaagaagttatcgattacatgtcaagtctttgtccggttaaaaccgttggaccgcttttcaaagttgctaggacagttacttctgacgtaagcggtgacatttgcaaatcaacagataaatgcctcgagtggttagactcgcagccagtttcctccgttgtttacatctcattcgggaccgttgcttacttgaaacaagaacaaatagacgagatcgcttacggtgtgttaaacgccgacgttacgttcttgtgggtgattagacaacaagagttaggtttcaacaaagagaaacatgttttgccggaagaagttaaagggaaagggaagatcgttgaatggtgttcacaagagaaagtattatctcatccttcagtggcatgtttcgtgactcactgtggatggaactcaacgatggaagctgtgtcttccggagtcccgacggtttgttttcctcaatggggagatcaagtcacggacgccgtttacatgatctatgtttggaagacgggagtgaggctaag

SEQ ID NO: 22974 - DNA, 571 bp, Arabidopsis thaliana landsberg
  unsure (1)..(571): unsure at all n locations
acccgtctgaagcaaaggctgaaccgagnnnnnnnnnnnnnnnnnnnnnnnnnnnnnnnnnnnnnnnnnnnnnnnnnnnnnnnnnnnggcagaaaagaaagagagtggctggtgttctgaataaagacgatgaagagcaatcgaaaaaaaactgaagcctgagccgaaaacagatgcttcgaagaagaaaaaagctacaactccgaagcagaaggcaattgacgaagaagaagaaactgctgcaacaccctctaccaccggcgtggaggaaattttaaaggtaatgactgaatctttgcctgtcaagctgagtccactggggccacatctgacgaagctttttcagaaggaaaaggagcccgcaaaaacgaaggcagctaggccgaagaaacaannnnnnnnnnnnnnnnnnnnngtcattgaagggacacaccacaagattcagctccaaaggcaccggctgttgagagcacaacagctaccgaagctgcaccttcggaggctacagctgcagaagctgccacacccgaagatattcacttagaaagcacaattgcaaatattgataaga

SEQ ID NO: 22975 - DNA, 1289 bp, Arabidopsis thaliana landsberg
tggaatgacttgatggtggtcacccaaaacctgtttcaactgagacacatgaaaaacaaggtgtattttagaaccctctggaagtttcagcctataagcaactttcccaatgcgttccatgatctcaaacggaccaaaatacttcgctgccaacttctgacacactctctttgtcacagaattttgacgatatggtcttagcttcaagaacaccctattccgtgtatcaaactcaacttctcttctatgtttatcatcgttatttttcattaactgctgtgcattcaccaaatgctctttaatatcggccaacatcaaatccctctgcttgagtaacccttctaactcacaattcttagtagaattagcttcaaaacgcataattggtggaggatctctgccatacaagaccttaaaaggtgttgttttgatagttgtatgaaaagaagagttataccacaattcagccctaggtaagtattggaaccaagtcttaggatgagctgaagcaaagcatcgcaaataagtctccaatgtgcgattcaacacctctgtctggccatctgtttgcggatggaaagcagtgctgtatttcaacttagtgcctgatagtttgaagcagtctttccaaaaggaactcaaaaacgtgttatccctatcagaaactatcgatgcagggaacccgtgcagcttcactacctcgtgaataaaaattctagccacatcaactgcattgaaaggatgtttgagaccaatgaaatgaccatatttgcttaatctgtctaccaccaccaaaatgacattttttccgtgagaaccaggcagcccttcaacaaagtccaaggaaatgtcttcccaaacctgcgttggaattggtaaaggttgtaacaacccagccggagataaggtggagtatttctgtcgttgacacatttcacacttaacaacaaatttctgaatatccttcatcataccttcccaatgaaatgattgttgaatacgtttcattgtcttcaacacacccgaatgaccacccaacaggccactatgatattcagcacgtatgagtggtaagaactttgagtctttaggaatgaccaatctctgtttcttccattatctgtttttctttcacagtataggcactagtcccttgtttagctgatagacattctttaaccaagtgttgcagatgagcattagaatctatttcttcatagagatcatgcaactggagaactgtgggcactgtaaacgccattaacaacattgacgagaatgacccagtt

SEQ ID NO: 22976 - DNA, 434 bp, Arabidopsis thaliana landsberg
atgaaatacatacctgtgtctggtgatgatttccagcagtcatagccccaatggtaagaagtgcaggaaaaagcaccactggagaagggagtctgcaaaagaaaaaaaactgtcagcctttccttatccaaacatgtcacaaaagggttaaatacatattctgagaagtactaactggaggatttgaactagttttgggacaaaaccagcctcaatcacactttggattccatcttctgaaccctcagacagatgacatagtgccatacaagcatttttcaagacatcttcattatttgaatgaagaagtatttcaagcgcagggagagcaggtttcacctgttgaatcatgcttcatatgttaaaaagtatacaaaacagaggaaacagagacagagagagaagtaagaagacctgatcgacagccgatgagg

SEQ ID NO: 22977 - DNA, 913 bp, Arabidopsis thaliana landsberg
aattcggaagtccataaagacacaagttttccttctctgctttagcattaaacgtaattcactaagaagtcgagaagagaaaccacaaagagaactaacttcatcttaggtacaaatctcacaaacacttaaaaagtctataatctgttcaaacatcatgaaccaaaaaaactgttcaaacagacaacaactctgacaggaagataatcaaagatataacacctaacagaggagtcaactagaaaaaggatcataacaacaagtctactgcagattagatgtaatcaggaagaagctaactaaaacaatctaacagaatttagaaaaacaaaagctgggaacaaaaagaatccgtgaacaaactcatgaagcaaaaaaaacgcatgtccaattacaatctcttccctaattcagacccgaaaggaactcttgcactgaaaaatcttaactttagcaaaaaaaaaaaaaacacatcttcctataaacaagataagaaccaatgcgttaggaagctatatacaagactttaaatgggtaacgaaataactcaccagggtcacactgatggtaaaacttctgtacatctgcaaaacaaaacacacaacaaaagaacatgaataaacccaaaacaggaagaagaaagccaaaatcttttgggggtttttttctcaggaaattaagaaaacccaattgaagaaacgagcactaaacatataaaaaaaactcgcaaatctacagaaatcatttaagaatcgatcaaatgaaacagaataaatagagaaagagagatcgagctgaccagtagagagagccttgatgaaaaccgctctacgaccacaaaagttgctaaaaaccttttcgacagtgcaaggtataggatgcttgaattccttccataaatttgcttcaaaag

SEQ ID NO: 22978 - DNA, 394 bp, Arabidopsis thaliana landsberg
cttgttgaagcgagtgaataagcggaagagttagaaggtaaagtttatcgcatagtcattattgttgatttcgaagacaaactttctgtttcagagtgaagagaaaacacgaagacaaactttggcggctttgtgaaaaagatgaagaaagtgagaaggaaactgtgtgaattagagatatattttgatcactagggtttgaaaaaacatttatcactctcgttgatcgtggaaaaaacgcagtaagatatgtgtgtgtgcgctttttttgatccgttttccatatatgtgcatagactttgcgtttagagtccgtaagggttgtcgattaaatggtaatatttgagaagcttttcttactggcattattagtcgtgtttactttaatttataa

SEQ ID NO: 22979 - DNA, 1926 bp, Arabidopsis thaliana landsberg
tgagcgtgtcgcttgctagccctgatggacgtgtagtaggtggtggtgttgctggcttgctggttgcagccactcctattcaagtggttgtaggaactttcttaggtggaacaaaccagcaagaacagacaccgaagccgcataaccacaacttcatgtcttctccattaatgccaacttcttcgaatgtagctgatcatcgaaccatccgtcccatgacatctagtctcccgatcagtacatggacaccgtcttttccttctgattcacgacacaagcattctcatgactttaatatcactttgacgtgatttcttccttgaagaactcgtagatcctctttattttggtttccagtttagggctctacatgttagactctcaaagtctaggtgttatgttggtctgtcacttaggattgttagaccatctccatcaatggtttctcaatgagaaactgttcaatataaaaataaaatataatcaaaaagtatgagagagagtataattagtctctcaagtgagaaactctgagacacctacaaaaacacttgtatatcatctattagtcaaatattattttattgttaaaatttaattatataactaatatttattaaaatactaatatcttttttttttgagaaaccaagaagatatttcactgatggaaaggcctttattccaactttctattcggtttattccgctcttggatgtagaaattgaaacttgctcccaatctcttaaccggctacacattctgatttatccaaaccaggaaggattttttcaaaccaatggtgattgattagcaagatgcgaaagataacacataaaaccccatttatcaccgcccatgctttgcgtgggcgtaacactaaaattgtatattttgcatgttcttgaaaatttggtatgaattagctaagccattaagtaaactctgaaagcaatataaatagatgaaagcaaacgaaactgataacaaataattatttttatctccaaaaagggtccatttgatatatattttaaaatgtatacataaagtttacctttgttgatgaaaaatataaaattctttttgatcaatttggtttgcttaacacggccttaaaactaatatagtactttttatcttcttgaaaatttgttactaatttggaatgaattagctaaatggctaagctaatttataccaaattaatagcaaagtttgaagaacatgaacaatgtacaatactagtgttaaagcctatgcaaagcatgagccgtgataaatgcatttttgtatgtttagttattattttaatttgtacacaatcgaaccaccattttgtctttctttttcaacataaggtactgttttccagtttacatgctgcaatgtggttgccggttggcattggagacgacatgaccttttgattctgctgattcggtctatgatcttgctgtcggctaaaaaacttcctacagctgcaaccagcaggccagcgacaccactgcctactacacgtacatcagggctagccaatgacacgctaatcatgtcttctccaaggccaacctattggaatgttggtgatcattcaaccatccgtcccacaccgtcttctctcccaatcagtacatgccacatggacaccgtctttaccttctgatccacgacacaagccctctcatgacatcaacctgatttcttcctcataaaatcctctgtttaatcactctctcaaagtttaggtctgatgtaggttggtaacttagggttgtttttccaacttcttcttcactttcttccactcttggatgtagaagttgatccctaatctctacattccgtttgatgatcctaaccgaaaccgaaatctgtattccccgacatctcaatgatatgaacccctcaacccagctacaccc

SEQ ID NO: 22980 - DNA, 550 bp, Arabidopsis thaliana landsberg
  unsure (1)..(550): unsure at all n locations
gcataaaacagtggttaaaatatttcataacgcttgaaaccacaaccgtccgctttcgcaaactcttttattcataacggcaaacgctatgtttaaatcagcgaagcctttaatcattattaccctgtcataatatcatactaccatcaccatcaccatcatcatcatcatcatataaatatattatagtcatgatagctatcatcatgataataacattatcataaaatcgtaattttcccgccaaaaacataaactgttaatttcttccccaaaaagtaaacccataattctcccgccaaaatatgtaaacctataatttccatccaaaaaacgtaaatccgtaattttcccgccaaaaaaacgtaaacctgtgatttttacgcgaaaaacataagcccgtaatttttccggaaaaaatgtacacccgtaatttttctaccataaacgtaaatccgttaaccagttataaagctcccgcaaatgcaccaatntttaaatgttaaaccaggcgttcaaatntatgatgcttaaaaccgcaaccctctga

SEQ ID NO: 22981 - DNA, 508 bp, Arabidopsis thaliana landsberg
attacatagcgaaagacttattacaaaataaaagaataaatataaatcaaactaaggatcgtcggcgccaatgtcaactgagaaacgtcacctagatcagatcaaactcctcgccttgtggctcctcctgaaccacctgttcttctcctgtgggggggtgtgagacagcaagagtgagctcacatacgttcatagctcaacaagtcgtggggaataatgtggcacgaactcaccaaaggtgggagctcatgaagtgtaaggcttatccaagaaaatggttaaagctgagcattgcttttaatgttggtcaaacttttattagcaattactagatgtaagtaaataccaaaccataataaataaataaaagtaatagtaaaataaacccaaatgcaatgatatgacaaattaagtttaggttccataaattaatcatgtgagtgtccgagccgctcatgaccgtgagcacggttagtataccagttttacactctgcagagggtgcgca

SEQ ID NO: 22982 - DNA, 478 bp, Arabidopsis thaliana landsberg
tatccttgtaaataatttttctttcttgttatttttgatttgtttttgttgtgtttttggttttcaggaatgaagaagtaacctggagatagagtaaaaattcaaaaattttactccaccaagagcatggggatcgagtataccagtccataggagtgcaaaaatttgaaaattttttgttgcacctggtgaccttgtgatcgagtaagaaggtcgagtactgtctggtttcactcacaaaaattcaaattcatcaccacatactcgatcatcaagcagagttaacctccgcatttaaatgagtttactcgaccaccaagccgagttaacatctacaggtcaccaagtttactcgaccatggaggcatccaactgcccgttttcactcgatcaccaaggtgacactttagtccatttctcagaccaatatactcgaccgccagaccaaacgtcctgtgaaacctgcgattgagtatcc

SEQ ID NO: 22983 - DNA, 618 bp, Arabidopsis thaliana landsberg
  unsure (1)..(618): unsure at all n locations
catgagtcactgacgttacagaaaacccctcgggttctacaaatcctaacccgaggtccttcttctaacttaaacagtaaccacggcggaagaaagggcggaggggcttaccggcggcgagattgcttcggtgaagtggtcgaggacgtaggggaggtctcggggatcacaactgtgtgcgggtcgccgtcggagatggccggagtcggtcggtccacgcgcgcagcggggatgctcgtcggcggcgaggagtccggcctggtcacggctagatagagcaattggatgggtcagagaggttcatggggtgccagagaagatatgggtgcaaggaattggtcggagatcactagttagctcggtccacgcgcggcggcggaagattgaagtccagtgaggtcgatctcgggcctccggtgaagtccggcctggtccgagggcttggcgagcttcacgggctactggtggagctagccgaagcactggctcgacttaggggtggctggagtgggctggcacggcagccgaagctctggtggnnnnnnnnnnnnnnnnnnnnnnnnnnnnngctaaggaaaggtggtcggcaggtgctggtgagctcggggcaaagtgggg

SEQ ID NO: 22984 - DNA, 581 bp, Arabidopsis thaliana landsberg
cctcttgtcacaagatgatcaacaactacacagcctgagtgacgatctatgttacgacaatcaatgcaaggacatgcaatcatatcatctcccaaagccgcagccacatcccgtacaaacttgatagcccctctctcataagcaggatcagctctttgttgcagaagtagaaagagagaaaaaaaaaagaagtaaactcccaaaacccttactgaaacctaaggaatataattataattataattataattatattccttacctgccaagatgcacccaatccttggccaccattctatgtgctaaccgtaatataaacctttagtaacctaaacagcataccatattgtgtaaagaaaagaatctcctgaataagcaatcacacaataagtagacaacattcacaagtaaattcaaacttataaacgtaatcaatcaaagcaatttaggttttaagtacatgctactcgattatagtagcaggcttttacacatgtaagccggagaatcttcaatattaacaaacacagaatacaacatttactaatcactctatcatacgattcagtagataagtacag

SEQ ID NO: 22985 - DNA, 585 bp, Arabidopsis thaliana landsberg
taagatcattattttaatgggaacatggagcaaccacccgggaaaacagtgctaccacatgggtataatgggacgcccttggctgattaactaggaaagctagtggaggtcttccttacccgaaagggcaagggcagtaggggagtggtcagtgtagggaggtccttgggttgattttgctgcgatggcggtcagacaagaaccctgcattggagcttcctataaactgtagcgggatttctgaagctagtggaactttgtaaaggcctcgtagtgttaccctgcctcgcctcctcggtagaggtgtatgggattggccatctcttggcagatgggtagcatgacttgtgggtaaagatgcgcaacctctgcagagtgtaaaactggtatactagccgtgctcacggtcatgagcggctcggaccctcacatgattaatttatggaacttaaatttaatttgacatttgcatcgcatctgggattattttattattacttttctttattattattaaggtttggtatttacttcacttagtaactgctaataaaattttgaccaacttataaaagcaatgctcag

SEQ ID NO: 22986 - DNA, 636 bp, Arabidopsis thaliana landsberg
  unsure (1)..(636): unsure at all n locations
gaatgagaagagagcaccgtccgggaccaagctcggactgtccagcctcaggcgcggaccttccgctgcgttgaaaaactcgaaggtgacaggttcgataaaatgcatttttagcgtcctcgcggaccgtccggggtgcacggccggactgtccgtgactgatgtgtctgacatctgacaacacatttaatgcacttgtagccgttgatatagctgttacagctgaccgttgttatttcaaccattgatgtgcaggggcggaccatccgaacnnnnnnnnnnnnnnnnnnnnnnnnnnnnnnnaggaggcaacggctaggaagtggttggtggctataaatacaacccaaccacctccgttcaatccatccaagcctctcattcaatacaagagcaagcatttcacccaaagacacattcaagcttccaaatctcttcaagtgccataattgtgactagtgatcattagtgattagtgatttgagagagtgtgattttgtgtctattcttgttgctcttgttgcttggcttttaatcgagctttcttcatctctttctaaattctctagtgacttgtaaagctagcaagagacacctaagtgcgtggtggtcttacggggtcttagtgttcttgag

SEQ ID NO: 22987 - DNA, 1449 bp, Arabidopsis thaliana landsberg
attataagttttgtcaagaatgtattaccaaatgaacacagcccttgtgcaagcatatagttaagaaccttaaaagcggcatccaaataaaaaagagttgaagaagcatgtgtggcacttagtttggagtaacagtgaggctgaatatcgagcaaacttgaatcatcagagagcttatgatctgcctttgtatgaagatgtcatgcgtgaggaaccaaagaattggtgtagagcttggtttatgcacgagagtttttgtgagaatgtggacaacaatgcaactgaatcgtttaatgccacaattgtcaaagctagggccaaggcattggttccaatgatggaaacaataagaagaaaatctatgacacatataagtaagagaaaggaaaagattagaagatggaagaaatctgtctctaagtatgtatcagatattctggccaaggaagaagaggatgctatgaggtgtgaagttacaaaagaacacatggcaagtatgaggtttgggttgatggatagttctaaccatgtgaacttgacgactgagcaatctcatgggattgctcatgctgcaagtggccaatcacatgcattccatctgaacatgcttatgcagcagtcatgtatgagaagaagaatgttgaagattatgttataccattgttttgtacgtttatttggaaagagcagtatgatacaacgcctgaacctgttagagaccaaatgtactggcctactggctatgctctgataaccgcaccagaagcacctattccacctggcagaaagaaaggtgagaagaagaattttgatcgggtcaaaggtaaacatgaatcaccaaagaagaagtcgggtgaaccagaagtacgcaagctaagcaggaaagcggcgacaattcattgcaaatcatgtaaggaggctggacacaatgcagcaaaatgtaagaagttccctaaagagaagaagggtgagaagaatggtaacggtaaaaagataaataatcaagaagaaattggtgtagaggtatgtatattttctaatattattgatgtcttactttctcattgtaaatgtcatatgtttatctttctccttctattgtaggctgctggatcttctcaaatcacctctcaagaaaacgacgtttttattgggtaattttgggaataaaaccaatgaaggaaacgacgtcatatcgaaacgggtcgtgggtaattatgtggataatcgtaacgcgaaacagtaaacgcgaatttgtggtttgacacgatttagtgagaaatttgttttttcagaaatattaaagttgatggttttttttttcagaggaaaaaagtatgggggaacgatgagtttttaaatagttaggttggaaaattcagaaaacccatgtatataaaacaatggtttttttcattcagcaccctgtacattattttctcctcttcc

SEQ ID NO: 22988 - DNA, 576 bp, Arabidopsis thaliana landsberg
aaagcgaagtcctaagctatgcatacagagataagatcctatctacccaaagtatttcaaattaagctctaatggtaatcccatatgcaatggcaatataagaacctaattctaccctttgcattcataaatcctttaaaccctttttctaatcattcttttcttttctcttatctctaggagaagctttctcaacactttgatacatctagcggatttggatttctttaacaactaaagttcctgtttttaatattttaaaaccgagggcttttgcccatcttcaatagctagcaagaactctttcttttccttacaaatcccaaaacctttactagactttttatgctcctttagcttacttcaactagagtcttttaccttttctcatcgatgaatcaaccccttttttttcttttaaacacattccaacccaaactataagcgcccacctagtcctatctagtccgaaaaatgcgaactagaactacatgagacactatctctatcgttacgaacctaacactttctaccaagcttaatcggaataagacctcacaaacactcacaagtgat

SEQ ID NO: 22989 - DNA, 603 bp, Arabidopsis thaliana landsberg
aactcgattcgaatcgtctgcttctcgcagctaatgagactgcttgatccatgctgctacattgagtaacaagtggaattgtgctgaggtgatacaagatgttgattgctaaaaatgtttgctactatgtatgaatagatagtacatctttagccttaagagagtcacacttaattttgacaaagttaaaaacttgatttagaaactcagctagtgcttttggcaaccaaaccccatagccaaacaactgcatgtctagaggtagaggagtagactcctcacaccgggtaagtctagctgagtattagtatactcagccttgcttgtggcataatttttacaggttctttggaggaaatggttgctggagtgacttggccgtccatcttgccaccgggttggactgtcgagtgggaccctgcctcggctgaggaggagcatgaggagtgatgggacaggcttcccatctccctatttatttaccgttagtttattccgctgcacttcgaacaatgatggtacttttgcagaactccgatgatgatgatggtgatgtaatcatttaatactctgccatgtatggttttatgctttattgtattt

SEQ ID NO: 22990 - DNA, 3101 bp, Arabidopsis thaliana landsberg
  unsure (1)..(3101): unsure at all n locations
aaacaacgtcggtgtgggatgcatcgtagattcctgcagaacttgcgatttttgccgagaagatcaagaaaactactgcacgaaagcaatcgcaacctataacggagttcaccacgatggaacgattaactacggtggatactccgaccatatcgtcgtcgatgaacgttacgctgtcaaaattccacacacattgcctctagtttcggccgcacctttgctttgtgcaggtaattcaaatcaaatatggctatatatttaaaaccaaaaaaaaagtgtggtagttgttaagattatcgatatttacaaattacaaacatgaaaaaaaaaaaaaaaaaaaaagaagaaattatctacgtttctatcaatttttacttttcatctgatgatcatgaatatgatttcaattaatataccgtttgtaacgtaacatataggcatctcgatgtacagtcctatgaagtacttcggattgaccggaccggataaacatgtcggaatcgtggggctaggtggtcttggacacattggtgtgagatttgctaaagcatttgggacaaaagtcacggtggttagttcgaccactgggaaatctaaggatgctcttgacactcttggagctgatggattcttggttagtactgatgaagaccaaatgaaggtacgtaatcttaaaccattcattaattatgcgaataaaacgtaaaaaacgttatcaggtttcaactttatttaggctgcaatgggaactatggatggcataattgatacagtttctgcatcgcattcgatttcacctttgattggactactcaaatccaacggtaaacttgttctactcggtgcaacggagaagccatttgatatatctgcattttccttaatattgggtatgcatatataaccctacgtaatagaacgttatattagtctttcacatctagactatgtatcgagtatgatgaaaccatgatgcgacaggacgaaaatcgatagcgggaagtggtattggaggaatgcaagagacacaagagatgattgactttgcggcagagcatggcataaaagcagaaattgagatcatatccatggattatgtgaacaccgccatggatagacttgccaaaggggatgttagatatcgatttgtcattgacatttctaatacattggctgctactcgatcttaattaaagtcgatgttctatatgtattcaaaataatctggatttcaatcccacaaaacttaaggatatatatatatatatatatatatatatatatagtctattttatataaatggagtatagtcaaataaatatgcattatcaacgatatatagtcttctattacatagatacgtgggagttcacccaacgtagatacgttcggttgaaacaagtcaatttcatcaatgcctcttccaaaaaaaaaacaaattgcattattgatgaacacatgcatcattatcaaataggttggttaaaatgaccaagatgactaaagccaatcacactactaccagatcgagtaaccattagggaccattaattcacgtggacgtagtgaatatggtccttgtgaattaatgagtacgtaattgtcctcattcatatatggatcggttccacaaacatttcctgtataaaattctacatctttcctctcattattatctctacacttctcatctctcaatcccattcgcttattatttatccatatgggaaaggttcttgagaaggaggcgtttggattggctgcgaaagacgaatcgggaattctttcgcctttcagtttctctagaaggtttcaatttgttttcttaacgaatatttttgtttcctatatgatattccgataagtaagctgtttttgttctaatgaaattaagttttggtgtgtatatagggcgacgggtgaaaaggatgtgaggttcaaagtcttgttctgtggaatttgccacactgatctgagtatggccaaaaacgaatgggggttaactacttatcctcttgtccctgggtaacacaaattttctttactcaacaaataacattatttcatattaaaataaactataaatgctagcaaacgtgattgttactatttcaaataatatcaacctatatctaagactttcttgcatattttaccggatgagacatgtttattcataccattgttattgtaaaatcaaacaatggattgcacaaaaaaaaaaaaagggctctaatgatgacatttaatcggaattaaattgtttcaggcatgagattgtgggcgtggtgactgaagttggagccaaagtgaaaaaattcagcgctggagacaaagtcggagttggctatatggccggctcgtgcaggtcatgtgacagctgcaatgatggcgacgagaactactgtccaaagatgatcttaacgtccggagccaaaaactttgacgataccatgacccatggtggatactccgaccacatggtgtgtgctgaggatttcatcatccgtattcctgacaatctcccattagacggtgccgcaccactactctgcgccggggtcacggtctactcccccatgaagtatcacgggctcgacaagccgggtatgcacatcggtgtggtgggactaggcggtttgggccatgtagcagtgaaatttgctaaggctatgggtactaaagttacggttattagtacttcggagcgtaagagagacgaggccgttactcggcttggtgcggatgccttcttggtgagccgtgacccgaaacaaatgaaggatgcaatggggactatggatggtatcattgataccgtatctgcgacccatccacttcttccgctgcttggtttgcttaaaaataagggaaaacttgttatggttggtgcaccagcagaaccgctcgagcttcctgtttttcctctcatctttggtatgaacctatttgtcagtcatctttaaacattatcaacaatatagccaccaaatttgcggttatagtaacaaatccggatacttttccattgataattaaatctactgattattttgtcacanatctaatcatatgtgaagagtaaagccactaaacgttg

SEQ ID NO: 22991 - DNA, 3769 bp, Arabidopsis thaliana landsberg
  unsure (1)..(3769): unsure at all n locations
tcttccaaagtagaggagaagccatcttcagtggatggtttacttagtcaatgggtggtaaataaacctaaaacatgggagaaaagggtaaaggtagaaggtgaagtatataacaagaagaaagctgtgggaaacggggcaagtagaggtgtagtaaaggatgacaagaagaagtcagttttgaagcaatctaaggtacctactctcaagggcttcaaaaaaccaaggaagacaacatctaatgatgatgttcaagatgttactgaccaagttgttgcagagaacttgaagatggtttcaagttctgaagatacattctccgatcctcaacagcagcgcaatagtaaggcactttctgcaacattgactgctttcgtagataagataaatcagatagatggagatggaattacaactgtgggtagacgcgtgctacaactagcgggttcttagaagtaccttttgttggtaactcaacagtgaagcgcatcattacagaagaagtccctcctccattgatacctgatcatcaacaacctgttacaaatgagaaactgaatgcactcatggattatcttgcacttgatgagttcgatttgcaactattcttttatacttcatttagcaacattttacttcggctatttaatcattctgattcaattgatttgtagggaagatccactagaaaccacttacgacgacatgaagttctattggcatattatgactccaagaaaatattggccggatgaaaaatagggatggttaaaagactatgtaagtgacacatcaatgttttttaataatttcatcttattacactcagactttaagattttgtaaccatcttaaatgtttttttttattgaaatgtagcatatagctgttgcgttgactatgttccgcaaaaggatgatgtgtgatccttcaatgtaccctaaccaacagataactttcttggatcaagatatgatcattcctttgtctaatagttacagtaggtttaaaggaggcagaaatgatttcaagttcagagactactttgtgatatagacttgctaatgaggaggattaatatctatgatagtagtccacacatgaccactgataaagaaatggttgaacaatccatgtttttgatgcttatgatccctgctatgttgagtgctgtcattccaattcagatacgcaagaagagctttgctaagttggaagtgaaaaggattacaaagaaggtccttgagaataaagatctaggtgattgtgctgtttagcactgaaatacatagagtgtctggcgcttggaagatcatttgatggcctttgcgataaaaacatgttggctctacggattaaacttgctacagagatatttgatgaagccaaagatttagccggaccggggaagtcagatcctcgtggtaaagaattcaagatccctcacatggaggattcatagtagtgtaggctctctactgtatgtgacctcggagttgtagattttttttaattgacttttgcagacatatgttgcaggttttaatcattgtaatattttttctttgtggtttttaaactcatagacatatgttacatgttttttactctgtttttaatcactcatttctttttctattagacatcatattgatcttttaacgatcttgtaattaattaatcttatttgactcttaaacacaataaaagctgaaatgttttctcaagatgtcgagtgacacacaagcatgaagctttatgttaagtgacacacaagcatgaacctttacattacgtgacacacaaacatgaacttttacggcgagtgacacacaaccaagaaaactaagaaacctttacgttaagtgtgtcctttacgttaagctgaaatgcttaatcaagattaagtgtgccctttacattgagaaataaaccgagaaataatacaagcatgattccacacgacatcaagtataaataaaacaccatttaaaagtctaactagtgatcaacaaaagtattttgaagtagaaaaacaagtaaaagtgttaaaaacataaaacataaggcctaaaaatcaaagtttatgaagtacaagtattacaattgtgtcctactttattgcaattaccacaagtgtatggctttgtttgcttcttttatgcatagcaacctccaatgccgtataattctcaaattctatggccttcccggttgttgtcgaggtatgggggtaagcaaacagttgtcgccacatgttcgggaacagatatagcaaactctcttggcatgatagcattcacatatgcattgtacaggtagttcttgtgataacacagatgacactatacaccttgctatttttcagctgctgcaattgcgtgtgcacatggcaatttctccacgtcaaaccggcgacatgtacactttttgtctaccaaatttaaaacatagagagatgttccaattgtaacttgagctttaacaacatttatatcttgatagtccattaactgagcatacttaatgcggttttgttaaatgaataacatagttaaacttatatacatgtttactcgtcattgttataatgactgaagtaaaatatatctgcagaattttctctacaccacgtgtcaaagatgtagtcatttttaatgcatcggctnnnnnnnnnnnnnnnnnnnnnntcatcatggatcttatttcctgtaatagttgagtaataggaaaactcctggcatgtgacaccacattattcattgattctgcaatgttgcttgtaagcaagttgtacgtatcacctaggaaatgtacatgtgtccagagttgcacatcttaaccaatccgaatgcttctttctaggtaagcatgtagtgcaagattcatcatttctttctgatcaaatgtggtttgaaagtcgccctgtctgagagcattagccgccttcttaaccaatccgaatgcttctttaccttttaaacggatgttgattctgtagatcaaacaatgaatttatactaaggggttagataaattcacttctctcttagctctaaagtaatcggaaaagaagaacaaagttgcttgaaaaagaagctagcgtttttgctatgacaaaagtagtgtttttgtattaggttctagatccattgaatataggacaaacccctctatttatacaatgtttccttgatatcagaatatgataaacttctaattatctaaggtttaaatcttcatttcttctattcttcacaagatcctcttctttaaaatagaagtcttctcttcacacgacttcagaaaccgcctacggcgatctcaattgtcgatctgaatcttcgggcgagctcatgactcaggcccattaacaggctaaccgggatttcccggttcaaccgaattctcgattttattcatgttatttcttggtttaaatcggtattgtcggaggtgctaattcctgcaccaacggttatctatcacaaattcatagacgaactttaaataaacaaaaactgtaggaacaaatgtacttcactgtgtttatgaattatgatcgagtagtaacaacactttttcttatgaaattgagcagaagccatatagagatggagaagaaattcaaagtgtgggtgtacagagaaggagagacaccgttagttcacatgggtccaatgaacaacatatccagcattgaaggccaattcatggaaaagatcaagacagggatgagcccgttcgcggctaacaaccccgaagaggc

SEQ ID NO: 22992 - DNA, 491 bp, Arabidopsis thaliana landsberg
gattgtctgttactggtacacatcccgctaaaatttgccacaattagtgacataacttgggcgaacactgtacttttgatgagtatgcttttaaaactttgatgtctaggccaataaaagaagagttatcatccaaagtctttaaccgcgccgtatgatatccagatttaactgtatattttccagattttgtgaaatgccaaccaaggatatcttccttagttagacacacccaagtccagagcactttttagcgtgacatcttctggatcggtgatcagactgatattccagaaaatatccaagatagaaatattggtaaagatggagtcgaagatgagcatgagtttgaaaagaatacaaatataaatgagaataagaacgagatgaagatgacaaagctgatgattttaaggaatatcaaatttctcgaaatgttagtgattcttaaaattgggaaaaggttcatataataaactaagatatttttt

SEQ ID NO: 22993 - DNA, 522 bp, Arabidopsis thaliana landsberg
  unsure (1)..(522): unsure at all n locations
ccnnnnnnnnnnnnnnnnnnnnnnnnncatgaggtttattcatttttgtttgatcaagcattttaaagaatggggcagccttcaccatctgatcaagtattacgcacttcaagggatactcgatcaattactcgagcgggaatgattcgacgaccaaggagtgaggtcgagtgacccatatgttccccttcacttcattactcggtggacaaaccaattacccatgcttctcactatttccaattgactttcctatccatccaaaagagagaaccaaagaccatcctcctccacccattgaaaacgccaaaccatccttgaaactctctctttcatcatctcattttcgcgaattctccatctttcacaaagcttcaagagtttcattccaaactctccctattacccctcaagaatccgttctcacattcaccatacttcaccaaagttactcgatcattcccaatcccatcctcaaattttcaaccggtttttaagctcaaattccatcaccaaaaaccg

SEQ ID NO: 22994 - DNA, 2010 bp, Arabidopsis thaliana landsberg
  unsure (1)..(2010): unsure at all n locations
ttacccctttgcccttagccaaatgagtttaatatgcattgtatagtatgatccatggtttttgcttaatgaatgttaaagggaatatgctaatttgaatgcttgaataggctaagtgaaagattaggttgtgttgtgaagaagatggctaaagtttttatgtagagatcattcaacctagcactctagaactaggaacatggacattgagactatcttttttacatgcatattttggttctgaatccccaccttcaaacctcactcctagcctagttctattgttgcttgaggacaagcaaagagctaagtttgggggtgttgataacactagaatttaacctttttaagcccttgtttttcatgcatttagcttagactcaagtctctttttatgcattcttagtctcttttccttcttttgcacattttgcattgcattgcatagcatacttgcatttggagtgttttgcagatgaatcaggtacttttggactcaacttggaggtttctagcacaagggatggacagactcgagttcgagggacctaaggaaggatttgaagtatactcggcctatgtactcggatggaggccgagtggagcacacgtgaagaacaaggagcctactcgaccaaggcactcggctggaggccgagtggtgcactcaaggatgaagagaagccactcgaccaagccactcggcctagggccgagctgtgtgaccaagaccaagccactcggcttttctactcggcctaaggccgagcgctcctgcgccgacttatcttttttgtcttattcccaattagggcaacctaggattgcctataaatagacctcttatgtttttgcccaaaatatcttagctttgtccgctggatattagggttccttgattttcttttgcattttctggttgttgtgttgagaatttggatttgatttcttctgcaaacttgtttatctcattgagatctatcttttgctaagtttataatgatttctgggttttatgaattttctgggttttgttctatgatgttcttcagtgttcttgagtagtgttcttcagagttcttgaggatgggttaggtttaggtggattcctctcttctttagctagctaagtgtttatatgcatgattcccttccgttttaggagttcttaatgctattttctttttgatcaattgaaaattgatttcagactttctccatccaaaaggtgtttgatgaaatgtctgaaccaactaatttcagagatttgtagattctagcctaaggcattggatgtttagactgcttattgacttttatagattggtgtttaaactctgctttattatgtttcatcaatggaaattgagattaggaagttctaaagttatgagaatcattcacacggaagtggcttgatttggttttgaatctattgtctagggatagcttgattgagtttgttagttagccaatggattgaggagtccactaagaccaattaccccattcttaagagctctgtttagtttattcgggcaaaactcgtgtttttagtactctgttagattcgtgcaaaattggtgtttttagtatncgcctctttttgcttactcgattgctcgaccgagtgctttacctagtgcttggtttactttatgttcttgttatttgatttgcatgttaacctgttgcttaggtttagtagaaacacaccaaacttattcacacttggcttgacttagtattctctgatcatattctgattgatagcaattacacccatttggattgacaccttaaatgctgcaatgacatatgatgcatttagggaattgacacacaaaacctttgtatcaatttggcgtcgatgccatttgggtgtttttcttgttacatttaggattttggagttattaagatcacgttctatttctttctttctggttactaactagatatcttatttgcttgattatgggttgcacgtcttcttacttgactagcacg

SEQ ID NO: 22995 - DNA, 474 bp, Arabidopsis thaliana landsberg
  unsure (1)..(474): unsure at all n locations
gcctcattctttaacaaccgacgaagccatttaatctctcatgtgcatcggccatagcnnnnnnnnnnnnnnnnnnnnnnnnnnnngaaactgtgttttgtttcttggttttccatgaaatgggagaaccgccaagtaaaacaacaaatgcactaagggaacgcctagtcaaaggacaagacgcccaatccgagtcacaaaaaactgtgagggtaagatcagagtttgcagaaagcaatattccttgtcccgaagtaccttgtaagaaacgaaccacacgaagtgccgcgtcccaatgagcctccctaggagtctgcatgaactgagataaaacatgaactgaatagcacaaatcagggcgtgtatgagtgaggtaaatcaaacggccaactaagcgacgatatgactttggatcagcaaggagcggaccatcatcacttgcaagcctacgattttcttccaacggagttgcag

SEQ ID NO: 22996 - DNA, 308 bp, Arabidopsis thaliana landsberg
attaattgatgtaaaattaacatcatttcgtcaccggtgcatattaacatcgattattgtggtcgtttttaataattatcggagacgacacacataatttgtatcaccaattcctaagtcatttatagaagtgatgtaaaacttatttgcatcaattataactgatgcacatatacaaaataagcgattcaaaacagcctttttgttgtagtgacaattgctgagttttattttctaagataaaaattaagaatctcatggatataatagaatcgtaaaatcaatgataactaaactttttgaataaa

SEQ ID NO: 22997 - DNA, 520 bp, Arabidopsis thaliana landsberg
  unsure (1)..(520): unsure at all n locations
ctaatgatatcgtgaagacctgatttagtatgtaacccgcctgaatttctttgaggaggtgacattctaccacggtcatcgccatatgtcaaacctctgaaccttcaactcannnnnnnnnnnnnnnnnnnnnnnnnnnnnnnnnnnnnnnnnnnnnnnnnnnnnnnnnnnnnnnnnnnnnnnnnnnnnnnnnnnnnnnnnnnnnnnnnnnnnnnnnnnnnnnnnnnnnnnnnnnnnnnnnnnnnnnnnnnnnnnnnnnnnnnnnnnnnnnnnnnnnnnnnnnnnnnnnnnnnnnnnnnnnnnnnnnnnnnnnnnnnnnnnnnnnnnnnnnnnnnnnnnnnnnnnnnnnnnnnnnnnnnnnnnnnnnnnnnnnnnnnnnnnnnnnnnnnnnnnnnnnnnnnnnnnnnnnnnnnnnnnnnnnnnnnnnnnnnnnnnnnnngttttcactacaaactgtttatcaaaaagagggtaagctagtacccgtgcatgacacatggcagctttaagtgcatgaaaa

SEQ ID NO: 22998 - DNA, 628 bp, Arabidopsis thaliana landsberg
  unsure (1)..(628): unsure at all n locations
tgtatgatctcacgcgctgcccatggcggaaagaacctgaaaagggattcattgattcaatgtatatgtttttttctctcttacaattgattccaagtaaaagacattctctaaataccatttctctggttctgtctctttctctcccagtgtatcgctattaacaatgacatttcttctaccaccgatcagctcgagcaatgtcattccaaagctatacacatcagcttttgtcgtgatgggcaaaccagatatccattcgggagccacgtagccccatgtccctctcatcgtggctagaactctgctgaagtcacgtccaaggagcttagccaagccaaaatcagacactttggcgttgtaatcactgtccaaaagaatgttctccggtttgatatcacagtgtataatacagtccctgcatccttcatgcaagtacgcgatccctttggcagtacctaacgcgatcctgaaacgggtctccagcttagcaatttggggcttgttctagacagataggactcaaggatccttgtggcatgtaatcatagacaagaagnnnnnnnnnnnnnnnnnnnnnnnnnctctaagcctaacgagattgacatgttgaatgttccaatggtgc

SEQ ID NO: 22999 - DNA, 2971 bp, Arabidopsis thaliana landsberg
aagtcatcagagtgtggggccaagcgttttgtttccggtagctaagacggggaaagaatttcataatcaatctccaccacacctttccaactcgacctcactcctccctaaagtaaaatctactcgacctacctctcttcatcttaccaccgacactccaatttctctatatcaccacgaatcacagagttactcggtttagacaacttcactcgattttgtcgccatactcgaccaattcacccatctcaatcgcagtctcattctttcaagagtcattcaacttcgtcctatagactcgacctccactcgacctccagtgttaaaaatcagaagacatactcgaccacaagaagcgaaccgctgaaacctgagcaatactcgaccacactggatctactcgacttttgcgggaaagaaatactcaaccgcaacagaaggagagataatcgaattccaagtttcactcgaccgcagggttggccgcagtggaagaagagaaatcgagtatcctcagagcggtgctggccgccacagacctgatgaggtcgagtacccatcaagcaaagtaatgataaatgatataaaacagtgatgatgtgatgctaaagtgatgacaaatggatgcttaaaacatgcaaaatacacacttatcaactcccccaaacttagagtttgcttgccctcaagcaaacaattaagaacaagcttgaggtgaggttttaaagcggggactcagagccaaagcaccagataaaccagatgaaatcaatgtccaagttgatagttctaagctgcaatatgatcgaattctactcaaaaacgttagccatgctttattatcgatcaatccgactcatatgctcgacctactcatgttttcaaatctaccaatccctttaacattcattagttctagaacatgaatcaagcaatgcatcatcaatgaactcatttggctaaggtaaaaggtcaagagacaaagatggtcccttacaaaatagtcttcagtaataggggatctctcaaatgattaagctttagtagaatgctaaaggtaagtcccaagctatgcatatagagataagatcccatctatccagagtatatcagatgaagctctaatggtaatcccatctcctatccttatataagaaactctaccctttgcattggtggatcttttaagccatttttctaatcattcttttcttttctcttaactctaggagaagctttctcaaaactttgatatatctagtggattttgatttctttaacaactaaggttcctgtttttaaaattttaaaaccgaggacttttgcccttcttcattagctaacaagaacccttttcgttttttttcaaatcccaaaacccttactagactttttctgcttctttagcttacttcacctagagtcttttactttttctcatcaatgaatcaaccccttttttttttcttttagacacattccaacccaaagtataagcgcccacctagtcctatctagtccgaaaaatgcgaactagaactacatgagacactatctctatcgttacgaacctaacactttctaccaagcttaatcgaaataagacctcacaaacactcacaagtgatatatggcttgaaagaaggcttaggttagggtatggggaaactgctctaaagatgagagtcggctatttggatcaacaagtgtggtgaaatgaataagaagatccaaatattttaagggtaaccatgagtttaacaagcaatgcatagtatgataattataagtcaaattatggttcaaattgatagggaatagcttcaaatcacagcgagttacgactaaggaagatcaagtatatgaattcaaaagatggtgcggtttaacttcaagttcaatcggttaagcactagacaactaacaacaaggacattgaaactatctagtgaacattgcaaatttacaaggttatgatcatcattatcccctatgcaagtgcataatgcaacaacctatatgataacattctaaaagaagccctatgatgcaaatgcaaactacatgacactctattttttggaatcatttttgaaaaattctcaaattttgatggggttttctatgcattagatgatgcaaaaatttgaataagaaaacatgaaacaatgttagatacatcctgaacttctcccccaaacttaaattacacagtcccttgtataataaaaattcaaaggagaattcaagagaaataaccacacaaagcaagaaataaaagaaatgcaatgatatatacaatgaaaaggagtgataccgcagtttttagctgaagtacatgcgggcgaactcgtccatgctctcctgagtgtaagctgggacgtttggtggaggcgggttgtactcggttggcacgtcgagttgctcggccgagtatttctccgaattgctctgctcggcctggggagcgttcttcttcttggtcttcaccttcttttggtgcttagtggtggacgcctcgcatggctcataagaagaagcttagctaggctcaaatgatggtgctcggctaggatcaaccgggttctcactttgctcaaatctatccgccatgctcgtagaatcactccgacggagaactcgatctctttcacttgaaggaggaggagacttgtgcttcctttgtagatctttgatttgaagtcccatttccttcaccgcgtgcgtaagagattccactttcttcgagaggcctttaaaaaccttcccttggaagtttgccaacccttgaagcattccgaccctttggtgagctgccctctcgcaccttgattacctagccgcgacatataggtcaaagtagaaccgctccgggaagtaatcgctagcttcatcttgtggttgctcatcggtctcgtcgtaatcggggtgttgatatgtctataattagcctgattaaggcattctttct

SEQ ID NO: 23000 - DNA, 471 bp, Arabidopsis thaliana landsberg
cttaaaaatgtcggtttgcctatgaatcatagactttaaaagcttttaaattaaataaagtttttaaagttggattagtaaatttttggcttttaatttttgttccaatcaacccctaagacactcaagaaaagaagaagaagcataaaaagaggcctaaatgcccagagaattaaacaaatgggccttaatatataaacaaacatcaatctctcgccgtcaaaggttacatctatcgccgtcaaaggttccatctatcgccgccgctgagaccgccactttaggccgtctcgtccgcaatctccgtaaccaacaccacccgcatcgcctggtaagctcgattttttaatcatttcgatctcatatgatgttcgatctgttcaatcttgcgaattccgatctttattttgttctgagatttagggtttcacgaatttgtgttctaggttttctggcttaatcattcttatt

SEQ ID NO: 23001 - DNA, 576 bp, Arabidopsis thaliana landsberg
  unsure (1)..(576): unsure at all n locations
atttataaggccaggacaatatccggaatggttagcaaacacctttgtagtcaaatttaagtatggaaaggatagagtgtgcatcgactttacagaactcaacaaagcttgtccgaaagagagtttcccactctcacacatagatcgtcttgtggactcaaccgccgcgaatgaattgttatccttcatggatgccttttcgggatataaccaaatcatgatgaatccggaagatcaagagaaaacttcatttatcacggataggggtatctattgttacaaagttatgccattcgggttgaagaatgcaggaccaacttatcaacggttggttaacaagatgttcaacgagcatctcggaaaaacaatagaagnnnnnnnnnnnnnnnnnnnnnnnnnnnnnnnnnnnnnnnnnnnnnnnnnnnnnnnnnnnnaagagtgtttcgcgattcttaaccaatatcaaatgaagttgaatccggcggagtgcacgtttggagtcccatccaaagaatttctcggctacattgtcacgaaaagaggaattgtggcaaccccaaaccaaatgaacgcttt

SEQ ID NO: 23002 - DNA, 579 bp, Arabidopsis thaliana landsberg
atatatgttttaaagtatatataaataaatttaatatatatttgttttaatatatattaaaatatgggtaaggtatatatgttttaaaatatattaaatagatatatctaaaaataaattaatatatgaaccataaaatcatactatctatatgtttagcaaaactatgtaaattttcagataattttaaatattcgagatattatttataataattagataaatatatatgaaccataaaatcatactatatatatgtttagcaaaactatttaaattttcaaataattttaatttcgagatattatttataataattagataaatacttaaaccaatgatgaaaactcataaggtttttaagaataacatgtcctaaaactatctaataaatttaaaattatactatttttcttgtatgcagtatttttttggtttaataagtcagtcgctattttgctaatctatactattttttttttttttgtcatccaacgtttttattgatattgagcccaatgggctatacaagtgatgaaaagaaagcccaactctatcattacaaccttaataaagtaa

SEQ ID NO: 23003 - DNA, 599 bp, Arabidopsis thaliana landsberg
ttcgaatttgatccatctgagatggctgagatctaatttgtatgactgtatccgagttcggatatttaatatttgatcaatatcttatttatatacatatttgtatactcaaagttggatatatatatataggatgtcgatattcattcaaatctatttcacacaacccgataatattcatataagggtccgaattcaaaaagaaaatataaaacaaatatgttacgagtaatatccgtccatatccaatctgattacatccctacccctcagactagcaccaataaggacctctaaagggttctgtaatgtaacgctttgaatttgaggggtataatttttcttctccaatatttaccaaattcaggcgttactctcttttctcttcctgtttcgctccttcttccaagcttcaaagcagtatagtgactggtgtccgtatcacgtgtaaacaaaaacctaagttgtatggttgttgcatcatgccgaagcatatttcttttgtctgatgttgtgttaatcacgtgtccgtctcgtttcgagtttcgattcgtgttttctttcgattagtggttgtgcgtcagtgggtttcggtctgg

SEQ ID NO: 23004 - DNA, 575 bp, Arabidopsis thaliana landsberg
tactgtatttttatcagttctatagtgcgaataagactttagcatttatctcaaagggttctttttaaacacaggaacacgaaacaacttcattttaaattggggaactagactaaaaatagtcgttgaatctgcccaaggtttgtttcgttcttttcttttttcatatacttgaagttttcaatattgtaaaaaactaatgtttgtgacataggacttgagtatttgcacaatggatgcaaaccactaatggtgcatagagacatcaaaacaacaaatatattgttgaatgaacaatttgatgccaaacttgctgattttgggctctcgagatcattcccgattgaaggtgaaactcatgtttcaacagctgttgctggaactcctggatatctcgatcccgagtaagtattacctcttaattaagggattttattttttccttcaattacaaagcaacccacataaaatttgttttctatattattttccagatactacagaacaaattggttgactgaaaagagtgataattatagtttcggagtcgtattgttagagatcatgcaatccca

SEQ ID NO: 23005 - DNA, 615 bp, Arabidopsis thaliana landsberg
tgcagaaaacgaatcagtgtcgatcgatacaccaaggtatcgatcgacaccaatcttgacgactctgtttttcctttgtcgagtggaatcgacaatttcgcggaggaggagggaactattcccgatggtgtcgatcgacacccagctcctgtcgatcgacaaccaagtcagcaaatcggcgaattcccttccccaagagtcctaaaaagtcaagacaagccttagatgatgttagatgcaaggctaggattgataagttgattgttgagatgctgatagatgaagctattcatctatctcccataatcagaaggtatgttaagacaatggttactaagaatgcagtgttatgatgatttcagagcagggtagcgacattattcaggaacgaatcccgaggaagctacctgatcctggaacttttgtagttagtgtcccattaatcatgattcattccaagagctttatgtgatctcggttctagtgtgaatcttatgcctcgttcagttgctatgcgtcttgggtattcaatcttgagcctactttacactcttgtgctagcagagcgtctaccgaattcagatagaatcttattgatgttcggtgatgattgga

SEQ ID NO: 23006 - DNA, 997 bp, Arabidopsis thaliana landsberg
tactacaatttcttaatttttttttggttagccacacattaattaaaaatcattaaaaattttactttggctcaatttaagataatctgtaaataagttttcaatttttcaattcataatgatattattgatgtcaatctttattattattatttctgtttttttttatgattacatatgttccaagattattataaaataaaacagatgttataaaaaaaaattgtttagtaaaattattaaaaatactattttgccatttaaatatatagtccagaatctgagatattttattaaaacgttaacggcgttttcgttctccgttatctttcttagaagccgttaaagtggaactgttaggtttaggtttaatagttatcgtttcattttcatctagtcttgccgctttcttcgcaattttgaaggtacattttcgaagacggagagaaacatgttcttacgggacgatcatcttctcctgagttatccgacaaaagatctggtgatgaaggtgattgggtacgaagagatttgccagaatcgttgttctttcaagttctcctgaatctcccgacaaaagaaatggttaagactagcgtcgtatcccccgaatggagacatctatggaagtatgttcctggattagatttggatgaagctgatttcacacaatccgatactgctcgtgagtcttatcgatagctttctgagtgtcaaccgtgagtcatccttaaacaagtttaagttaagaatctattgcaatcatgatcgtgataaggagactaataatgctcatatggcgcggtggatcagcgcaatcgttgagcagaacgttcagcatgtcgatcttacatggcttccagtggaggtacctccataaactcaacttatgtgagagtttggtaactttaaggctttgtggcgtagtcttgccaaaacctggagttatttgtcttaccggttggtataaaccctccctcttagaatgggttttatt

SEQ ID NO: 23007 - DNA, 443 bp, Arabidopsis thaliana landsberg
aacatttcttgtaagtaaaattataaactaaattatagtcatgatgaaaaagattttggtggagattgtagtgtgtatcgaaacgaaaatgatattaaaatttataattgtacaataataccttctcatcaaacattaaaagtaattttttgaggaaaatagtcgttacggtgtgtaggcataaccaaaatctaactgtaaccgtatttcggaccgtaaccggaccgtttattaaccgtaacccaaccgtaaccgtataaaacggttaataaccgtaaccgttaacagtgaaaatagatctgttacggttaagaaaatatactaactgtaaccgttaattaaccgtaatcgtatcaaaaccgtacgggtaaccgtattttcaaaaccttaaaatatagttataatagtgtataaataaataattatttcactaaaatagtaac

SEQ ID NO: 23008 - DNA, 1080 bp, Arabidopsis thaliana landsberg
aaaaacagaacatcgattcaggatacttcactacattaacaaagtctttttctgattcaggacacttcacacaaacactatgttaacgcagtttgttaatcatgcacagatagaaaacgacactggatcaccacctagataaactacattaacacatagtctaagtaccattatctcctatttgtttcatcaccattctttaagccaaaaacagaaagagacattaaactaattcaggatacttcactacattaacacacagtcttaagcatcaatctaacaaatcaacaccggaatgatagctacaaaaggatgcagcaatagaaacacgtcatacctacgaacagcaagaccaccaagaagcttgtaacgaagagactcagcctgagcaatagcacaaagacctctgttagcaaccttctcagcataaagctcaacactgtcctgaggaaatttgaatctcttttgtacaagagatgtcaattccctaatcctccttcccttctcacctaaaccaaacagagaatcatcaaattgatatcatagaaacaaaaaaaggtcgaatcagagcaaggttaacgaaaatgcaccaacataccgagaacgttttgagtacgagtggctctaatgatgatctcagtacgcataggagtgacgcgaacctcaacaccagagtaaccatcctcagcaagctctctggttagaacctcattgagttcagcgtaaaacacaccatcggctacgaactacaaaattcaaaactttttttgtgttaagcttagaatacgatacattggtagagagatagagacaggggagggcaaaagatatcacctttctcttcttgctgatctgggtcgccatgattgtttgcaaagcttgaggaggctagagacaaaaaccctagattcggagaagagagtgcgttaggagtgaaatgataaaattgtgtggttaaataaagttaagagcaaggcccggccttttaaggcccatttctattgacaagccacaatataaagggactgaaaataaaaccatttcacccgtattaaaattagtgacagtgagaattgaatt

SEQ ID NO: 23009 - DNA, 587 bp, Arabidopsis thaliana landsberg
  unsure (1)..(587): unsure at all n locations
gtctacggtgcttgcatgtgtttaaaaaatcttattatatatcttctttattcaagaatctgactataaactgtaccggatacatcagaattaatagcaattctactacactagcactatctggaagaagagaagttgctatgcaattgtgtgatgccttgggaaccaagaaatgtgggtttgcccttgagaaaaccagagtaccagtgagcagagagtttgggagatctcttgcgatggggatcactgaaattgacagagtacaatccaaaactactcttgtatccgtttagtaattcgtacaaatccataaatgaccatacgaagtagcctctcgtgtctgatccattcctacatgtagtcatatctttgtttctttcatacacattcatgaggaaagaatataagatgcaatgagaaacactctacttacctacagctttgagcaccgcaccaatgtaagcatctaagtactcaatccttggtgtgtccttttggtgcagctccaaatcttggttcattgttttacctattcagttgcattggcaagataattgagtngacaacaatcacaacaacaccacaac

SEQ ID NO: 23010 - DNA, 707 bp, Arabidopsis thaliana landsberg
cgggaaggtcctcgacttcttcgacttgtaattcctcgaaatcaagctcacgattttgctcgatctgaagtctctctcgctctcgaatcctctcgtcgtccatttctctcgagtttcgtttacccgccagtagagagagtcccctttcgccacctccgcgttttccaggttcgtctccatctggattgggaagtttattgggccggtttttggatccaatacccggcccaactatcacgggttaatatatgattatagttttaattattattccgttacccacgttttttttgttttacttgcaaatcatatgaaagcgtctatattgaacaaagttgttttcccacgccatctacgaacaaagttgctaacaaattgatcaatcacttatattgacatagattagatttccaaccataattcagccaaaaaagaaaagaaaaaaattagtaccactactactaagtaagtagtaattatacaattcgattttcaaatttaaaaaatgacacaagacacaatcaaaagaccataagtcttgccatcaagaatgaagctttataagtttaacacttaacaagctacatgctaagtacaacgtcagccaccgtacttgcaaaggttctcgaaacccatgtactcatgccgttggattttgccgatcatattcactattcccacgccacctacgaacaaaaagaaacaac

SEQ ID NO: 23011 - DNA, 602 bp, Arabidopsis thaliana landsberg
agatcctaaaattctttaaaagctatataccaagtgtctttgaaacttaacaaaattatattgttctcatgcttcagatgcctccaaggcgcttggctggatatgacccatgcttagacgattacgtgaaagtatattacaacagagcagatgttcaaaaagctcttcatgcaagtgatggagttaatctcaagaactggagcatttgcaagtatgtgttgttaataagttaattgtttctcttcttttgtatgatatatgcatgatggaacttgtctgaatagtttttggtattcttgtagcatggagatctttcataattggacttatgtagtgcaatcggttttgcctatatacgagaaactcatcgcgggaggattaaggatatgggtttacgggtaagttacattcatgaaaaccaaatcaaaacttaatggagaataataaaacatattgggagtcaagcttaaatgattaataaaaatttgtgttccttcatacgcaagtaacatgttgagagacaaacaaatgtcccacatcagaaactcagcaaataatagtctaattttaaggcaaattaactcattaattgggactttggg

SEQ ID NO: 23012 - DNA, 602 bp, Arabidopsis thaliana landsberg
caatcgcatgatatcatccctcagactggtaccgccagtggtgaccataacctcaattttcaaatatttggaaagctccttgcaaacctgggatgtctgaagggcgagctctcgggttggaactagaattacggctgcataagaaaaaagatcaacaaaagtactgaaaactcagtaagaaagtagggtttcactggaagttccactgatcaactaactcactacagagaaaggtaggagatcttttaacagagaaaagttctaaaaggaaagtaaaaaaccttgaatgacattgttctctggatcaattttctcaagggtaggaatgcagaaggcaccagtcttcccagtaccatttttggctctagcaagaatatcactaccagtcaaagcaatgggaatgctttcttcctgaataggagatggtttttcaaaacccttctcatatattcccctaagcagatcctcttcaaaaagtaatcttcaaattcatttcctttagtggcagtcacatcctgaagacaagatatggaaaaactaagttctaagggaactgctgtcttgtcaaaacaaaaatcatataactatgcaatcattcatac

SEQ ID NO: 23013 - DNA, 460 bp, Arabidopsis thaliana landsberg
tacgaaggtattggctttttgctttcattgtatatatatttaagggctgtctgcctctgtcaccctgaaatatatcagttcaactatattccccccatactttcaccctctacctatttccccctatacaaactatattcttcataattccactcaatcttacacaattccacccaattcaccaaaattaattaatctctctaaatgcgttttaaaatcaataattgcgttttaaaatcgataatcagctattaaaccattgacccaaccaaaatctcataacccaaaacaaaccttctgtttggcaaggagggttcgatttttttacttgatttggtgcattgttaacgttgttatgttaagaccttcatggtgttatgtaatgaaagttcaattcaaagagaagaaaaacaaaataaaagacatccgaaacaaagcaaatttgtccaaaataactaac

SEQ ID NO: 23014 - DNA, 580 bp, Arabidopsis thaliana landsberg
tgcctcctttaccatcatgcgcctgctcacgaattttccgagtatctcctcgggcgtcatctttgtgtacctgggattttcacggataagatttacaagattggggtcaataactgtaaaggacctgagcattagtcggacgacgtcgtgatccgtccatcttgtgcttccatagcttctaatcttgttgaccagggtcttgagcctattgtaggtttctgttggctcttctcccctgatcatgccaaatcttcccagctcgccttccaccaaatccattttggtgatcattgtagcatcgtttccctcatgtgagatcttgagggtgtcccaaatttgcttgacgttgtccaagccacttactttattgtattcatccctgcaaagcgaacgtaacaagacagtggtagcttgggcattcttatgaattagttcattaatgaatacatggttattagtgctatcaaaatgcatcccattctctataatttacctaatactaggatggagagagaataaatgactatgcattttatgactccaaaacgagtagtcctcttgtcgaggccataattagggg

SEQ ID NO: 23015 - DNA, 527 bp, Arabidopsis thaliana landsberg
aacattggttctaggcatgtcatgcaaacgaacaatttccttaaagaacaaattagcaacatgtgatgcatcatcgggtttatgacatgcaatgcaatgagtcatcttagagaacctatcaactaccacaaagattgaatcctttccggttttagtactaggcaaaccaagcacgaaatccattgaaatgtaagtccaaagaggagaagaaataggcaaaggcgtatacagaccgttcgactggactttggacttagcctttttacatgtgacacaccttccacatatacgttcaacgtcccttaccatgtgaggccaatggtattgatccctctttacctcaagagttttgacgactccaaagtgtcccataagtgctcctccatgtgcttccctaacgaagaaatctcgaagagaacaattaggaacacacaagcgattcccataagagaggaacccgtgttgcatatagtagcgacctgaagcaaacttggcaaagccttatatatgtataccttcgagataac

SEQ ID NO: 23016 - DNA, 740 bp, Arabidopsis thaliana landsberg
aggatatacgtaaattattctcttagtggcatagagtccattcgtttcgactatgtcaaaagtggaaaaccaaaggaggacccttccgtggtcaatcgtataatacttacacgcacacggtataagatgacattagaattttttttttctctttttatctttctgtcaaaccctttttcgcttttttcgcatgtgggaaattttgtaatatcattttttcaccaaattttgcagtttgagattaaccatctaaaatatgaacatcttgaatctgttgagggctactacacagaggacacagggattgaagcacttcaatttaaaaccaacttgcggatatctgaaccgattggatatcatcatgatgggtgtaccaaatttatactagcagtagagggaaaaaaaatcattgggtttcatggatcaagctttgctttgagggtgggctctctaggagcatatttcacttgggatactcctactataataaaagcagtagggggaaaggtagggacaaagtgggatgatggagtcaaccaggccggttttacaaagatacatgtacgtagtggtcaaaagggcatacaattcatcaagttagagtatgttgacaaggatgggaatctaacagatgggccaatccatggttctatctatagaagaggttccccacacgtggtatgtatacattatacatgtcacggaaaaatagtaattaataaaaattctgtgtatccaat

SEQ ID NO: 23017 - DNA, 568 bp, Arabidopsis thaliana landsberg
tattgaaagaaaattaaaccggtgtgaaccaatcagtaaacatatggtcttttgttgaccaaatctaatccaataaccttcaatttcatttctcattttttacctcaaaagtcaaaaaaaactctagaagaagactcttaactcataaatctctcattctttctcagattctctctctctgttttccttgttctccaagccagatctctctccataaatctctcttcatctctctctttccaccaaaacatccgcgatcctcgattctcaattccgtgtctgttttttttcttcacttagcgatggcgatgatagagcaaaggccgaagaccaagatcgtttgtactctaggtccagcttccagatctgttccgatggtcgagaagcttcttagggctggtatgaacgttgctcgtttcaatttctctcatggatctcatgaataccatcaagagactctcgataatcttcatcaagctatgcttaacactgggattctctgtgccgtcatgctcgacaccaaggtttcgatacatgacttccattttatagttatgttgttttgttc

SEQ ID NO: 23018 - DNA, 2004 bp, Arabidopsis thaliana landsberg
tacccaaatttttaaacaaagccaattttttgaaaaaatttcaaaacaggttccaacttatgagaaccatgttattccagagaaattaacataacttacgacttctttgtgtgggtaatgtgtgattttacccaaccacgctttagattctccagaggatgatgacccaacgaccaaccactccaattaacgccggagaaactaattaaaaagaagatgaagaagaagatgaagaagaagatgaagaagaagaagtagaagaagaagaagaaggagagagtgtcgatggagaagaagaagaaatagaatagatttttattttttattttttttgggcataagaagaaatagaaaacctaattcagaatttttccccttttggtttaaggtataaatcgaaccctccttaccaaacagaaggtttgttttgggttatgagattttgtttgggtcaatggtttaatagcagattatcaaagttaaaacgcaattattgattttaaaacgcatttagagagattaattaattttggtgaattgggtggaattgtgcaatattgggtggaattatgaaaaatatagtttgtatagggggaaataggtagagagtgaaagtatggggagaatgtagttgaactgatatatttcagggtgacagaggcagacagcccttaaatatatatacaatgaaagcaaaaagccaataccttaaagttcaattttatatttcttttttttgggtgtaaaactgggactatactatacatacattgggctaatttactgagacagagagatatctaaaccttatgttcaagtgatctctttctcaattgcacatcaaatgaggtaacaattacaacaaaaaactataaacctccccccaattgtaatctaagaaaaaatgaataactttaaacaagtcaaacttgatctcattgtagaaaatctgtaagagaagcttgtatatcttccaatgttcttcctttagtttcgggtaccatcgcataaataaagactatacccgcaccacatatagtaaagaagatcaagaacgttcctgaaacagattaatatatttcaaaaattaaatcagattaaagatctaatttttttttgagagtttaatgactctatagtatattatatagtagtatgtatttatacctgatgcgttccactctagcatgaagttttaggcgaaagcaacaatccaaccaaaggaccagttggctaaggtaaccagagtcccagcagaaactttaacattcattgggaatatctgcaaaataaaaaatgtaacattttttagagctggaaaaaatatatatatgtcggtttttgaggagttaatgttaatgttcatgtttgtttacctcagacatgatgatccatggtaagcctcccatgcctacggcaaatgaagagatgaaaccctgtaatatgatgtcaaattcagatcaagttatacaagagctatactttaagttgcttgtttattatgtctaagaaatgactttaaacgtaccactacaccgatacatgtgaaaatcggagtgagctcatcaagcatgccatatgactgtccaagaacaaaagtagaaaaattttagtataactggtaagaatctccaataaacagcagcaaaaaaagtttgtatatatctttggttagaaagcgaatcgttaatgttaattacccgaaagcagaaggaaaaactgaggagcaagctgaaaaagcacattccaccggtagaggcctgtaaataaagatcattcatctgttaaaagatatatgctaaattttgttgcttcatttgatatttgaccaaaagatcagatagcaaaatcttaccaatagaagtggtcttcgtcccattttctcaaccaaaatcagacccaatagagcttttggtatctacaaaagcagaacacatgagcataagtgtacttcttggcaagatttttcacgaataaatgaaactacgtacaaagacataccat

SEQ ID NO: 23019 - DNA, 893 bp, Arabidopsis thaliana landsberg
  unsure (1)..(893): unsure at all n locations
tttctataatttttcttctagtctcatatggttttcaaaagcttttctttgttttctagtattgttggtttttattatgtgatggggtttcatgatctttatattagcagttttttttcatgattgatatgcttgaaggttttattctatttgttgttcaaaacattggtatacaacaagcgaccatacattttttaaccggatgggattaaaatataataaaatattgttttcttccaaatcaacccaaataactaggtggaacccaaggatttcaatcactctatttataagtaaagcatatattcaattccattcaaatctaatatgaagtcaaatccatactcaaatcttcaatattgaataaggggtgactttaaaaattatttgtaaatcatagaaccaatatcacataatttttataaaacatttaaaatcaatgattgaataacacatgatttttgtttggatttccaaatccattaaatttcatgaaccaaagtttataagattagaaagaaaaaaacatttctctataccgcaagaaccaaagtttatacattatatgtaacggtactgggaccaataccattacactcgagtctatgaagcaacaaacatgcaacaagctcgcttatagcttcacaacacttacacttgaccatagaattgttagtctcttgcacacaaattaaatgaatcaaatagatccatagctataggatctacgcaatttactcgagtttgcggggaagctaatcttnnnnnnnnnnnnnnnnnnnnnnnnnnntctttttctcttttacttctggttgctgctccgccattgccttaagctnttnctcaaaatgtctttctcaagaccgtacattctgttcaaagcatgcatattc

SEQ ID NO: 23020 - DNA, 522 bp, Arabidopsis thaliana landsberg
cttattcacccgagacatgtctctgcttctcaaccagccctcgaagctatgctttcggagacctgtgttggcgagatcctctcctcttcactctaatggcttctcttcttcctcgttgcaaacccctcctagtatgatggcgctcaaacgtacctattttgctgattacgctcatcattttgaaaaaaaggtgcctcccgagttggtgtataatgatattaaagatgatgatgacattggaacgatcgggtcttcgcatggttgggtagttactttaaaagacgacggaattctacgtctccaagacgatctaaacccggttgcatcagagacagatcccaaacgcatctcgctgccccctcttgtgactctgcctcattgccgaacccaaattgtcaccaacgtggccatgtcctcctcttctcctgaggatgacgaatgtgttgtggctgtcaagttcttggggcctcaactcagcttttgcagacccgctcttaaaaacccagagtggaccaacatcag

SEQ ID NO: 23021 - DNA, 580 bp, Arabidopsis thaliana landsberg
  unsure (1)..(580): unsure at all n locations
tatcaaaagatttaataacttcttcacctcatacagtgatttgtgaatcacattatcctttggcaacatctccagcaatatctctagaaaatcattgaagctcttgtcagaccacccgtttttttgtcttaagtctaaacaaagatacaatagccgacaccttgctatggnnnnnnnnnnnnnnnnnnnnnnnnnnnnnnnnnnnnnnnnnnnnnnnnnggaactcatcttctttcttgtcatcacactctggaatctcactcaagccaaccttataagcaaactcttcatccaaaaattcagcagcttgatataacccaagtacctcatcattccattgactcactttggtatcactctcagccctaaagtttcattccccatgatgataccagtcacaccgcttcttatatgcctcatccattccccttgttacaagatgatcaacaacaacagaaactgaatgacgatctaaacagcgacaatcaatgcagggacatatattcatatctacgtctcccacagctgtagccacatcttgtacaaactttgtagcccctctctcataagcaggatcaac

SEQ ID NO: 23022 - DNA, 431 bp, Arabidopsis thaliana landsberg
  unsure (1)..(431): unsure at all n locations
gcggcaaactctgaggccaccgaggcaagattggcgagggaagaggctgagattaaagcctatgtgaataaggagaatgctctcaaactagccgagagcaatctgaggatagattccgaggtcgttcgctgtaagcgaatgtttgccgaggcgagggggcttagagacagcgaggtggctcgggttgcgcagaaagccaggcgagaggtttcagaggtctttctcgccaagtttaaggtgaccgaggnnnnnnnnnnnnnnnnnnnnnnnnnnnnnnnnnnnnnnnnnnntttgtcccaaactcgggctaatgcgcagctgatcaaggtgcttgaggatggtggatccttagaagctgagaagaaacaggtcgaggagtggctttcggacttcatggatgccgaggcaaaactcgtgcatattacgtccga

SEQ ID NO: 23023 - DNA, 1506 bp, Arabidopsis thaliana landsberg
cgtgaacacactcttacacagaagaagcacaggataggtgtcggacctattccaaagctcgtctctctgactgtaatggtctcggtcctcacatccactactctgggccaaagtcttatcaagaaatccaagatgaattggtaagtgtttctgcaaaatctcatgtcttttagtgacattctcctcataagttagagttttactatgtgtgatgttcaattctatagtgtgttgacttgtgaggatattgatatgtgtttgcatgaagagaaattgggaagaccggtccctcttggtgaggtgttaatctagacacacactaagtcggatggaacatatgttaatcggaaggcggagaagattgctctaacttatgagcagtatgtgagagataggctgtctgaactagaggcggctgcttctactgtctctgatgactcttcacgacctcaggagctcacaatagatgagtatacaaccatctttcttcaggtaagatgttgtagtctaatttagagtcttagagtccagttactattcagtcactaattatcttcctctttatttcttgtagtccacacaaagggattcaaggggcaatcattatggacttagatgtcttaaagacgctctaggcagtgccaactgccaactccccggagactcaacctttaaagccttagaagaacggctgcaggaagctccgcggcaaattgaagaacaggctgcatataacgagaagcgagatgctgagattgctgcccaagaagccgagacagcccgagtcataactgagcaaaaggacaagctcgagcacttgtccttagtcgagaagtatcttcgccaaaccgatccgcagttcttggacttcattgccacacactcttccacatccacaaagcgtatcccaattactcccccatctaatgatccatagaatttaggtttccaaacacaagttgtatcattcaataagttgtatgtttgaacaagataattttatgttttgaacttgattttcaatatataagcagtgttttcatattgtatagcatatcaataacaaacaagaacaatcgatgaacaaacaagaacaaacaagaaacccatcacctgatgaccaaatctttattcggaccaaacaattagtcgcaaaaaagtagtaaataagtagcagtatagtcgctgaatcgtcgtcaagtagtcacataaatttacgacaatcataagactaaacaaattagtcataaaagaatcgtaaaactgacgtccaatagtcgtatatacttatacgactatgttatgataaaaagtttcaaatccttggcaaagtacttgtaatcgtcaaagagtcgtcaaatagtcgtaaacatatttacgactacttcacgacaactggaaacatacccagggtttataataattaatcgcaacatggtcgtaaagtcgtcgtacacaattaacgactacgaaacgactacatgttctcacacgctcaatacagta

SEQ ID NO: 23024 - DNA, 702 bp, Arabidopsis thaliana landsberg
taaagcccataattaaaaaccctcgtcccctcaaatataattttttccccgggtaatttttttattttaatatgttcaaaatattataaactttatatgcttccaaaatatatctatcttaatatttatggtaaaataaagcagtttaactaacacctaaactaacccgtatacaaacttgtaaattttaatgcttgttaagtgaaggttcatgctcatttggacttggatttactttgatcttatttataatgtgacttttgaatcattgtctaaacattatagatgatgtgtgacgttgaacatattttttcattaattgggtaatatagtaccgtttttaaaattgtgaatcataatatatacagaaaaattggggtttttggaagtttatatactatatgattcttcaaagtagttaagaaaatatcaaacaaatatgaaaagagaatcataaatttaaatcagaaccaaatcttctacatattgttattataaaatatagacacataattagtagacacaatccaattttggtaatatttgtatccgacttttaagcaaaaatatttgtggaagagtcgtgttaaatataacccgatccaattaaatttttatgaacaatatatctagtcagaatgaaaattgacttaaaaaaaattactgtagagataatacagtttggaatttttagttatataa

SEQ ID NO: 23025 - DNA, 487 bp, Arabidopsis thaliana landsberg
tccccagtagtagagattttttggacagtgtctgcgacatatgtatgagagctaaacaaactcgtgaaactttttctctaagtgataatagaagcatggaagcttttggtcttatacattgtgatgtctggggaccgtataggactccttctcactctggtgctcgttatttcctaaccatagtggaatatttctcgaggggagtgtggctgtatttgatggttgaaaagagtgagacgcagaaacatttgaaaagttttcttgctcttgttgaatgtcaattcaatgtccgtgtcaaaactgtgagaagtgataatggaacagaatttatgtgtatgcgggattactttgaataacgcgggattcatcatgaaacttcttgtgttgggactccgcatcagaatggacgggtggaacgaaagcaccgcacatcttgaatattgctagatcattgccggttcaatcgcatttgccaattgaattttgg

SEQ ID NO: 23026 - DNA, 657 bp, Arabidopsis thaliana landsberg
  unsure (1)..(657): unsure at all n locations
gtcggcgagggtgaggtctcgttgctattctctttgcgtcctctcgtcatcatctctgttttgtcaaaccttagactaatgaacgagggctctctatatagtatatagtatatagagtttattgcaaataaggcatttgtcttagatatatattttattttaggcacttttaaaatgatctttagatttaggcacttctttccttgggaaagtcgtttttacccttacagagagatgatgttgctctttctttgttgatgaacttttacgttttacactagaaatcaaaaatacttgcgaccaacaccaacaactttagagtcattgattacagagtgatnnnnnnnnnnnnnnnnnnnnnnnnnnnnnnnnnnnnnnnnnnnnnnnnnnnnnnnnnnnnnnnnnnnnnnnnnnnnnnnnnnnnnnnnnnnntggaaaaaaaaacaagaaacaaaaaagtcccacgatttggtattacgatttgcacgtttttttgttcagtgatttttgtgcaggttaaggactcaagaagtgattgatactntgttgattctcaattgatgtcataatcatgtctacagacattgattttgtcatgttatggtgtcgatgataagaggatggttgagtgctggtattggtgtatgtagaatgtag

SEQ ID NO: 23027 - DNA, 1184 bp, Arabidopsis thaliana landsberg
taaacccaagaacccaacataattatatctatttttttagccacaattatacctaaacacaacgctagcttaagactcaaacacgaagtcttcttcttctctttgtcattctccttctcaatttctttctccacagctttctccttcttcccttttcttctagtttttatcattcaaaagcaatctcataatattttgttttaatgcatttcacaaactgtctctaaggaacaaaattcaaattcattcgaatcccaattgtaatcctaaaaactaagtcgtaatggctattacaagaggcttttaagggacaatttcgattttaaatagataattaattcaaatttgaattgtactcataaaaatctaaattataatcgaaatttcatccaaaatccatcattttcaaacaaaatcaaagaggaaaagagatcaaactatcaaatctaataagaaataaaactctaattaaacacaacaccatcaatcatcatatatggaatagagatagatctttggattgatagaaacaaatgaaaaggtaaaaaagatggatctttggattgatagaaagaatgaaaaggcaaaaagaagacgaaagattatatatggaatagagagaagagagtaaagagaagaagaagaagaagaaacaaatcaaaagttttgtttttgttgaattgagagaaaaataaattgagatgaaaaaaatttgatctgagaaattaaatttttttttgttgagaataaaagatccaaaattgttatggatctagatccaacatagaggttgggttgtaaataagtaaaaaactctagttttacttgtcttttattattattctgatttaaaataaataaataaacatatgtttttttataaggggctaactagagaatgtttgaagctgagggggtggactagattaaaatcctaagctaaggaagaagaaggttttgatgttagtgaaaggttagattttttattccgatcttggtcagtctcctccaatcgtgatttctcttctggatccaagctgatgagctctacgtcttcctcccaggtcatcactcttctctttttatgattgtgaacttgttttcgatggttttgatcgatttctggttcagttttttttttatccttcttaaaggattttatactatagatgggtcgatcaagt

SEQ ID NO: 23028 - DNA, 457 bp, Arabidopsis thaliana landsberg
atctctgagtgactctgttattttaaggatatgttttccattctaagtacttctctatgctttcaaggccacaaagctgcttcaccaccggcatagtcgctggaaccggtaactcaaaaccaagatcacatctttctctatgatcatcatcaatgcaattccatgataggtactgttttcgagcttctctaatggctgatcttgttgcacagtgcactgaagccgccacaagcaacggaggctcacctgaagctgtatcagaagaccatttcagctcaacaaaaagtaagattaaacaagataaaaaaaagagagagagagagcgatgaatctcattgattcttagctaaacctttagaggagagaacgcggttcttgtgatgaccactgttgagaatctgaacgttgaattgtttgggaattgtgtctattgtaggtattttgtagtccatgtacc

SEQ ID NO: 23029 - DNA, 565 bp, Arabidopsis thaliana landsberg
aacaaagatcaacaatgaaataatttatttgctttatttatctccactttaaagacatatatgataaataacatagatgttatggtctttgttttgtgccaaaaaaatgtataacctatcaaaaccacttaatcataaatagaattacaccacctttgtgaatcttacattttagtaaattctttacttacattaaattggaaaaaaacaccaaaaaactcaaactattttttatttggaagtttaatacgcaatactttttggttagaataaaaatacctcacttatatattgttggtctaaaaatatatcatctataaattgttggtagattcgaatcaacaacttaacagccgtaacggacgttacagaattgttggatggcgttaatttatctttgtgtattagaataaatatatattacacttttaccacgcattgcgagcttattactttagtctactggtaacaagtcgatacttgtaccacaacatacctcaacttttttttttttttttcctcttcctccttgttgcctacttaacaaaaaccctagggagcatcg

SEQ ID NO: 23030 - DNA, 1533 bp, Arabidopsis thaliana landsberg
ggctgagactggctgagacaaaagcaccaatatatcattaagaactcaaggctaaaaagatttaagcattaaaaatctagatttgtaaaatcagatatgattcttttggaagaaaagaaatgttcacggttctgatgctgtggatgccaccagaatcggaaaaactaggcggcgactcctttttttggagagaaggaagagctttttgtgtttagagagaagggatgaagacgaattctcttttgaaatcatattctactattttgaaatatttgaacctcgattacttttttattttttcatttttttttttaatactaggaggttccagaccgaaacccgtaatcctcccaaacccgaaacagcgacatgtaattaatttcgtcctaagcatcactcgaaccggtgacatctaagcttcgcctagagtctttaccaattgagctaaatcacttccgtggttgaaattttttgtattataatgacaaaacaaagaatgtaaaagaaatcctcttaaacatggataaataaaagcactagatgcttgacttgagctagcttttcatgaggttctcttaagtggtagtatatttcataaatcataaggaaatgataacaacgtcattaaacggctttaagatcttcattcttgaagctgtcattattccagcgcaatgacattttagtctgttaaccgcatcgccgtgttgggtacttgtcacattttcacagtaagcaaggtcaataaactctccactatatcaaaaaacaaaaaagagagagaaaatttgatcagcttgctcagcttattgtagacccgagaactatattcttttcaatatttttgatagttttttttaatataatctcttcagcttattataaataaaacaaacgagagacatttgacgaaggttgtttctttttcttatatgaaaacataattttgactggaccagaacaactgtaagtctgtaacaatgtttatcatccaaatctagtttaataattaagagtaaacagctacaaaaatggctcttctttttcttctccatatgcattttgcctctatctaaaatattatttcatttcatttttctcctcttcttcagttacatttgttactgagagtcacagtattgtggatacttacacctgcaagggtgatttctcacctgcaaaagatttgtctctcaatatcgcctcaagacgcatatacaagattgccgtgaaaatatgttttaccttccgtaatgtgaaagatacccttctagaacttcttctgatcactttatccttcaccttgtcaatctattagagcacagtacaacgtttagcaattggaagagaatgcagtaggagttatcctggtgagagcgaaggagagatcgaaatgaagattaccaaccttgtgatgtgggatgtagtgattccaagcatatcgagcttcaccggataataagagcatagaccgaggaggaagatataaggcctttttgatgcaagatgagtcacccgacttctcagcatcgg

SEQ ID NO: 23031 - DNA, 2935 bp, Arabidopsis thaliana landsberg
tgacgacaacaattcttcaagatgacaggcaaatgggtcatcccattcgacagattcagacacttcaacttgcagctgattagaaacttccccaaccgatccatttccgctcaaatggttctgaggtttcaacgaaggtaactcatatggagggaattcagtgagggaagaagcatttggttgagaaggatcagctaactttctcttgtttttccttcctttttcctgaggtgacactgtaaaggcttctactttgtcaacattgagaccacatccattcatctcttcttgcttttgaactatactcatcacctttttaatccattacacatgaacgacttaagttaaacacacacaaaaaagcgtagaacatagatacgaaattgtttcatatgcaaaaaccattaaagtatcaaagatgttagaccaaaatcatctaaattatctgtatacatgcaaaagagagatgatttcatctcctagttgtagctttcagaaacgtgattcaatcgcctaactaatgcaatcccagaaatacgccaaaaaaaaaaagtaaactttttgcctagtaaatgtacagagattcctcaaatctaaagcgtactactttctgattaagtgcttaatcgcaatgcaattcagaaccgttactgaatcgaaattaattaaaaaccccaaataatcgcacgatcattcaacccacaaacaatcacgaatacaccaaaatggatttaaaaaaggccgtaaactgaccttcaacgaagacaatagcgactttaaggagaacggcgccggaacaaaaatagcgggaaataagatcggtagcgacaaacagagagtgagaaatcgaagaagaagaatattgttttgggagtgtggagcgagcgagagaaattggccgtagaacactgtttcgtgaatgagagaagaggtttggtaatcgctgttattacttggattctcatgagggtattttagtcatttcccaattatcccttcttcgagctaaaaagggcagcgaatcttttctatgttgtttctgcaactgtagatcctttcacaaaacgaatttcagctacaaaagtcgaaaccgataaattcatgaatgaaagaagaaagccgtctccaaaagatttaactcgactaatctaatctgatgtacagttaatagtatcaaacacatccatcatactacatatctcaatcagattaaaattcgaactttcaatagaagctgagtaacaaacaagaccgaatgatctaatacacgttacaagtctctgatacatcagtgacaaaaaggggtagttttcactttttcctctttgtacgtcttctttcagcttcattctctgctaccacaacgtgaaactctgatccaagcatatcatgtatgtcaatattctttgagttactgaggttaacagtctccatgattacttctagtgtcacggtgaagcctagattagacaagacacgtatcgcattcccgattctgcatatggtttgtcgagtctcgagtggaatatggctttgctcttttcctgtggaggaggatgagatcatttcctcatctttctgatcatctattgccataggatctctcacttcgacatgttctccaacccatatgaaaccattgcagccaataatcaaatcaatcccaagactttctacgtaatgaaagtgatgtttgcttctcttaaccaagtaaggatcgaccttcagaagttgtcccttctcgagctgtagcgattcatggattaatcaatgttcagaggaagagactagcgaaaggtataactacatgagcatgtgaccaaatgaaaaccaaccttgccatacttctgacttctggcttgtaactgcacgctaccatcatgctgaaagttgcgtacttcagcctaagagtttgaacaaaccaaagagggaacccttttagtcaggttgacgtaactgttaagatatgtaaagattggaacattactaatcacaggacttacacatacgacatcatgctctacaaagatattccgcatattgagttcatccacagaggtttttcgcctctggcaacaacaataaacttatatcattgaagccaaaagcaatcatccaaatggtaaaatatcaagaatcaagctgtacctgaataccatcaggcatgttcatggaagaaagcatcagtactccatcctgattgaagttgagctccactctccaacgtttttgagcaacttgaataagtaaagatcaatccagtaactgtgcaatgtgattgaaacctttatgttactcactcaatccgatttcaaaaatccaaacaccaaaacaaaaatctacctcaatgacacggcctaccacaatatccccaacttcaggcttgtacctaaaacgtagatcatcaaaaccatcagttctacttaatctcagagtagagagtccattctattcacattttctgggaaactaaacaaattcaaagatcaatcacagacctggctcgcaaggtgcgtacatagacaagcttatccacacgctccactactccacagaccgtcgcgagcaactcaccatcgacctcggaagttccatgtcccctttaatgaaaaaaccaatcgtgaaaacgcaatttgacaaaaatttcaatccagagggagaatgagatgaaattacttgaggaaggcatcgtcatggttgacgggaatagagtcggtgacgataacagaagcgtcagagttagccgacgacgacagtgattgaagccgctcgattgctctctcaaacctaaccttctgcgtctggctcaacggtaactgtagctttctcatcaccatcacagacactctctctcttgctctctatttagcccagcaaacaacaatggcgatgcaaaacgagtttgggacttgggagagagaagagcaaaacttga

SEQ ID NO: 23032 - DNA, 558 bp, Arabidopsis thaliana landsberg
atgctttatttctagacattaactgatccaaagacccatgctccaaaaaatctgatataatcgctcttttttacccttcataacaaaaacctagcagagaaacaatgtttacatgagatgtttggctcatgctggtgactttgttgatgaaatcgtcactgtttcccttcaaatccttcaagacctttactgcaaccgtacgtccattagaaaggtttcctctatatacagttctaaaccctcctttcccaacggtgtgggaaaacgactttgtaatcttcaattctgcataagtgtactgtttcagtagtaacttgaacatgatgacactattctccttttttattcttcttcctcttcatctgacggatcaacaacatgacgataataatgaaagtcgctagcccaattacagaaccaacgactttgatgataataatgaaagtcgttagcccaaggttcgtcgccaactttgaatctgtcttcttcttttgctggagaataaggtccaaagcgacgaaccacaagacaaaaacacattcaaagctagcggagatg

SEQ ID NO: 23033 - DNA, 624 bp, Arabidopsis thaliana landsberg
gtatatgttccttttcttcttcgcggtcttgctcttcctatttctccctttttccgcggtctccttgatttctatcacttgaatctgacccatctgaaccctaattccattctgcaaatctccatctttgttcatttatgtgaggcttttcttggcatcctgccacactttggactgtggaaatatttgtatcactgtcggcctgggatggccggaggacagcatcagctggtggggggcgcgacgttggagatgcgccgcggaaggaaaactgattatctcgacatccccctcaaggacaacattaaaggatggcgcttggagtggtttattgttgagaatcacggaaattctctccccccacggtcagggagacaaccggatgttcgcactccaagctggaccaaatcccccaccgatcaggatgtggctgaggcaggagttctggtagctgaagttggactgttgaaggataggggtccactgcagaggctgtggttgctgactttatcttcaagaatgttcagccattgaaggacagggcatacctagcctatctgtaccgaggcgtagctgactccacccgggtcaccaatagaagaatcctgctgtggatctggtgac

SEQ ID NO: 23034 - DNA, 744 bp, Arabidopsis thaliana landsberg
ggcactcaccaccattttcctcctacttggagaagttgtttaaaagcttggccgtgatgacttcaagagctcaaaggtttgttcattcgcctttcatggcttatgaacatttcacctcagatcttctacagatccgagagtggaaaatcgatgtccaagcgatcaactatgaagtcccctcgaaggtgcttccggttattatcctagattttaaccttctatcttattttatctatgctttgtattttagctttgtatcaactttgaagtttcgagatgtggactctttggcaaagagctccttcattcctcgtattgtaaccgcatattaagattaatataagttgagtgacaaaaaaaaaaaaaaaaaaaaacttatttggaaaccaataatcaagccaatcttaaaacatttcctaagattaatgaaactctcaatgtttagatattacaaagattggaatcaaaacaaatgaaagatgagattagattctcagcatctcttcaaatctaatctctccatatgatagtctcatgttgactaatcctccacttgattcaacatgccactctccacagcatctcttctttatttatattcatcaatcccaaggcacaaccttaacccttcgtacgtgtgatccctgtcacatcctcaaccgccaaactcgtcacgtgtgacacattatccttcttgtttcttctgaaatacaccctatgcagcttatcaatacccacgcattc

SEQ ID NO: 23035 - DNA, 599 bp, Arabidopsis thaliana landsberg
agaaaaaactaatatttttttaactatatgtattttatatataaaatttaaatatattagatataataacatataaaagggtaagaaaaatcatatatttattattaatatagatagagagattttaggaaattagcatttaattgaatgtagtttaatgaatataagatttaattaaggatataaatctagaataatatattctttagatagatttgtagggactacaaactaaataaaggaaatagttaatttaactaattaatgcaaagtaacgatttgtaagtttttagttctaaattatttgtatgagattaaattcgtaaggactaatattgaaattagtaaataggtgagggatttttggccaaaaactctaccaaaaatgtatatgtagataagttcaaaataatgtgttggctctactaactaaacattggtctagtgattgtgagactctttgtttgagaagattgacccctaatttgattctggttgggagggatcttatatctcagcgaagcgatatatgggtctcgaccggtaattcctcgtagttgtaactaattaaaaaaaaaaaagatttgcatggatatttt

SEQ ID NO: 23036 - DNA, 1552 bp, Arabidopsis thaliana landsberg
cattgaaagggaaaggtgaacttggacgatgcaaagacttccactgcactcgagtattagtgtactcacttccaagttcatccttatgctcttattgcctttttgcttttaattgacatttttggtgaggcaatggggttaaagggccaagaatgatctcgttttggtgcttaatgccaaagggggagaaattaaagccaaagcaaatggatcagctaccacttgtgaattttgaaaacaatagagttagaaattttgatttgtccaaaatactcttattgcaaaatttggtctcttgtgggggagaattttgattatgggaaaaagggggagtttttttgcacttgatcaatttttctcttggaatatctctccttgtgcccaaacaagcgtgtttgacttagagataggaaattgagtttgatttgcacaaacaaaccaagtggtggcaaagaatgatccaaatatgccaaatttgaatcaaaacaaattcttgttctcatttgcatttatgtgcactactatatgttgttttttgttgtgttggcataaatcaccaaaaaggtagagattgaaagggaaatgtgcccttgggccatttctaagtattttggtgactaagtgaccaacacaaatggttatgtgttaaactataacaaatggtggacaaagtgcaaatcaatacaaaggtatgattctagacttagtacattggtttttgtgtactaacatatttgtctaagtgctagaatcagagaaaaaacaaatggaaaagacttggctcgagcagccaagactctgctcagtctgggtgcaccggactgtccggtgcacaggctggcgctggtcaactggccgctctcgggagctcgacggcggcgtatggctaaaaatcatcggactgtccgatggtgcaccggactgtccggtgagccaacggtcggtctcgcgatccgcgcgtgacaagtggccgagccaacggtcggaagggggcaccgggctgttcggtgtgcaccggacagtgtccgtcggccaacggctccaaagcaccaacggtcggcttcgcaaagaaggaaagaaatctgcaccggacagtgtcgatggtgcaccggactgtccagtgcgccacccgacagaaggcaagatttgccttcctagattacttccaacggctcctaggccctttgtggctataaaagggacccctaggcgcatggaggagccacccaagcttacaacaaacattctaagactccaagactccaacttcacgaattcgattctttgtgatagtgacttgagctccatttgagttgtgaactccgtgcgttgtgttttgagctcaagttgtgacttgtgtgcgtgattgtgctgtggatttgagtcttgtgtgtgttgctctcccctcccttacttctgtgcttcttttgtgatcatcattgtaaggacgagaggctccaagttgtggagattcctcacaaacgggagaaagactaagaaaggaaaaattgtggtattcaagttgatcatcggatcacttgaaaggggttga

SEQ ID NO: 23037 - DNA, 500 bp, Arabidopsis thaliana landsberg
  unsure (1)..(500): unsure at all n locations
taatgttgaatgccatctttttcttataatttttttttttttttttttttataaacttcaaactttaggctttattataatgatgaaggataatcctcatggaggaattgtacaacaaaagatggaacataagagaaaaatgaaaaagaagtattatttgggaatggagtcttcgccaaacaatcagctactttattacacattctaggcacccatgtgactttggcttgtatgaatttcttctgccagtattgtatatcccttatcaagtggtgtaactcaaaacttcgagctttgccattgacacactctgccacacttctattgnnnnnnnnnnnnnnnnnnnnnnnnnnnnnnnnnnnnnnnnnnnnnnncatggccattaataaaccttggaattccgcttctaaggccgagttgcattgtcgacctttactttgtgcagccataacaaaagttccagttttatttctaatgatccatccaacgttagtttctac

SEQ ID NO: 23038 - DNA, 576 bp, Arabidopsis thaliana landsberg
aggtatattgcgaacagtgtcttcaatgatgtagtcaaatgaagtgaagttgttaagcacaacggttttctttggtggttgaggaagtcacgccagtttgctccatgaacaaaatccgaaattcatgaggagttgttcttattgcttcgcagtttggtcgaacaataaaagtagtaatcgttttccattgattctctttgattctgtcataatagaaggcagaaaaacgaggcccgattgttgcctctatttgggtgccctatgaaaacaacattataggggtgagggattagaaaaaaatctgcaaattgcgaaaaggaatacgagaaaattgtataccgatttatcaaccaagagaagtcttagttcgaatgcgtcatggttgagtatttttttgtaaactctcactaccatgacacatatcgcccaaccagttaccaacggagacaactcatacagacggtggaactgaatcatggtgaaaagcggcagaattgaagagtaacgaaaaacagaggattatggaaacgaaaacagaggacaatgtttttcttttgtgatggggctgtcttggta

SEQ ID NO: 23039 - DNA, 794 bp, Arabidopsis thaliana landsberg
ttttgtggtgaggacaagggccacactacaagaatatgtcgaatcaccattcagaagcagaaggagatcgccaaagccgaaactaggcagaatcagccgaagcaggtcttgcacactacttcgtgccactctccctacataccagaatatgtgggtaatcatcctgcagcttctgttgctttggctagctattcactggcctcctggccacaactcccacccccaccaccactacaaccgacatactctcgaagccagcagctagaagggcgccagtacacccagcaacaatgggagctcagggaggaatcggaagctcgcacagtcaacagtaatgtgccagaatcaaagcacatttattgagcgatatcctaccctcgaaatacttttatcttctatgtaattttgtttttcaataaggaacaagtaatgtaaatttagttttaaatccttgtaataattttgcttctattagaatgaaatatatcttcttcaaaataattacgaagctcaaaaattgccgaagctcaaaagtcggtcctaagagaatgcagagctaaaaactgccgaaactacaaaaaaagtcgttcctaatggagcgcagcgaagttttgccgaagctacaaaaaaagtcgttcctaagggagcgcagtgtaagttttctgctcaaaagtcgttccaaagggaatgcagagccaaataccggcgaaatataaggcgaagaagttcaaaagatgttcctaaggggatgcagaacttacaccgaaaaataaacggggataagtcaacgtcgc

SEQ ID NO: 23040 - DNA, 1076 bp, Arabidopsis thaliana landsberg
gatcacgtggtgcatctccaccaccaatgttggcagggccattttgttgattctgttcgtcagccatttcgagtggttgcctaggtacaaagttaactgtatttctcctttctctgagttcgcgagctatgcggtcgatgttatcgttgaaaaggaggttctgattgcctgttgatcgagttcacatacagtagaggtgtacctggatcaagaagacaacatgaaaaacacacagttagcaatcggattgaaaattgaaaaagaacttgatttaagcaagtctgaaatctcaaatgtaacaaacaaacacccaattggtaacgacgccaaattgataataggttttcaaaaatcaattaatcctaaaacaccaatcatgtcgttgtagtattttaggttgtcaatccaaatgggtgtgatgctaacaatcaagatgtgattagaagtcactaagtcaagccaagcattaacaggttttggtgtgttctagcagtcctaagtgaacatgcagaaaacagaaaatcaagcagaaacaagaaaacactcgaccaacacagctctttgtagagcactgggtgtggtgagcactgggtgtggtcgagtgacaagtcaagtaacagacaaaaaatgtaacagggatactcgactacacagtttgttgccagacaattgggtggtcgagtatcaggtcgagtaacagtaaagaattgtagaaactaagcaacagatgacaagatgcagtaaatagcagtagagtaaacaataaaatcaatcagataaacaattcccgaggatggggtaattgaatagtttcgtttcctcagtttacaggtcattgacatgctcaataaattatccctagacaacaagttcatactcaatagagacccttaagttaacctagtcccatactcaatcaccattgacgagagctaacctaacaggcattacgaatcaacgagttaaagccaaaacgctccctgcaaccaataccttggtacagagccacgaatatctggaattagtggttcagacattttatcgaacaacttttgggcgcggaaatgacaggctcg

SEQ ID NO: 23041 - DNA, 772 bp, Arabidopsis thaliana landsberg
ctcgggaccgaagtttattaaactgaaccacggtacgtggcatgttggaccactcttcagtgacagctacatggacttctacaaccttgagctcagcaacacaaatgtgagtgagaatggttttattgttaataatgtatggaatggtaatgaatgtcctgtttttattgacgacattgttgttgttgatgatgatgttcaggcggtggatcgcacgacatatgatttcatcaaaaataaaggagtcaccatccgagttgaccccaacgatgttgacacatcgtcctcctaactcaatcctatcatcagtgtgtgcttctgttttcatgaataaattgagcaatcgtgaataaaatttgtatgcaactgtgtacaaattgtttttttttttttttttttggcaataaatatcgaaaatacttgttttctcatattttcatgttaatcccatacttttaaaattgacaagaaaacctaaatatactttggtgtcttctgattgattttaaaaacattttgagtggatacaaaaagagctcaagatacaatcctctttatttttattttcttgtggtgcgtttcaacgatggcgaaatctccggtggaagtgaatttgattcctatcgaagctactccggagaacttcgcagagtatggtcaagtcattgaagcctctcgtgatggtgctggtttcggtccccacgacgctcaactagatctctctagaggaaccccacggtactcttttccccgattctcttaaatttcgtta

SEQ ID NO: 23042 - DNA, 1521 bp, Arabidopsis thaliana landsberg
gttccccctttcttcttctcgaattgtttcgacttttggttcttcacgacatctctttttctcaaatcccttaatcttgttctctttgctcgtaatccgacgctaattttattcattctctgtgcaaattaatcctcgttcctttaattttggtttcgatctctctatcaatcgatttctatcaatcgatctctctatcaatcgatcgctgtgaaggcttagtagatccgaatcttttgaatcgtcttcatcggtctaaatcgaagttgtctggtcgaatttgggatctaaggtaatattagggttttgatttcagatttgggaattaggtttaattgataatcgatttctaatttctctgtttgatttgacttgtttttgcagttcagtttagggaagaattgaaaggtatgtgagattttggatttaatcgaattcactacataaaagtgttgagttttaatttttaggtagtgatgatgttgattttgttttgcaaacggttttcaaagatgcaaggatttgttgttggcgactgttttactctgtcagatgttattatcatactaatttgtttcatttcaagtatgtgttgatttgattgaaagttagctgagtgtattattgtttgaattcatcatcacaaaatctataataggtggtggagttgtggtcctattgtcgtgatatggataaggcatgggtgtggcttccaaggtataagtcttgttgattctaagtcttatttgattcattgattttaataataaactgagtcgaaaatatagtgatatgaactctctttgtctaatgaaacatataaggcaccgtggaaggagcaacaaattttgttactgttgcatcaaggaggttggggattccaactgaacttttctgtccctacatcgattgtcgtaatgtttgccatcaaaaagtagaaacagtattggaccatcttgtgatcaagggtatggataagaagtacatgaggaattcttgttggagtatgcatggtgaaagaaagtctgatattactgatggtccaacattagaatttgaggcttatggtttgctaaggacggcttattgtagtggtgaaggtacacagccatcagacaactttggaggagagaatttggatggtgaaactgtagaagactctgagtttagacagaaattgagagatgttgaaactccattgtactcgacgtgctctaatcacaccaaggtttctgcaataatgggtctataccgcataaaggtgaagagtggaatgtcaaaaaactactttgatcagttgttgacgtaattccatgacatgcttcctaaagagaatgccctgccacagtctactaatgcaatgaagaaattcctgaagatttttgggtttggatatgatgtcattcatgcatgcaagaatgattgtatcctctatcgaaagcagtttgataagatggaaagctgccttaggtgtagtgttccagatgggaaacagataagaatagtggtgagggtaagagc

SEQ ID NO: 23043 - DNA, 397 bp, Arabidopsis thaliana landsberg
  unsure (1)..(397): unsure at all n locations
agatgnnnnnnnnnnnnnnnnnnnnnnnnnnnnnnnnnnnnnnnnnnnnnnnnnnnnnnnnnnnnnnnnnnnnnnnnnnnnnnnnnnnnnnnnnnnnnnnnnnnnnnnnnnnnnnnnnnnnnnnnnnnnnnnnnnnnnnnnnnnnnnnnnnnnnnnnnnnnnnnnnnnnnnnnnnnnnnnnnnnnnnnnnnnnnnnnnnnnnnnnnnnnnnnnnntgaatgctaagttggattcggttcacaacttgcttacaaggaagaagcatgtccactttgcagctgaggatgagactattgagcctgagactgagtcaaagagggagtcttctacatagatggtctaggctacatcaagtttagacagccacatggcaacttcagtggccacaggtttacag

SEQ ID NO: 23044 - DNA, 643 bp, Arabidopsis thaliana landsberg
agaactctttgtaatcagtttcaccagtgtcagaatcgtcaaacatattgcaattgaggcccgttatgttctcaaactcgtagagcgaaaatcttattggcctgcgatcaatcaaacaccacatctcatgcatgttgtcgactcgcaactgattcgtgaggaagaaatgaactttctgggcagcccatataaatccactttcagtaaactttagaaaaagaccaagtgtagttttcttcatcatcccacacatctgcacctaatccatctttgatctttccaatttgagaaacatagcagctgtgggtcatactccttttttgcaacggtaattttttttcttcatacaagcgacgcagtaactgcggtatgactagaagacgccattcctaatcacaaaaaaaaaacaaggttgcataagcaaataacttaggatcttaggtgccttgtgagattggcaaactaaaatcataacaaatctgtcaaagaataatccagaaaattgattaaatctgtgagaacacaacacaaaatcaatatcaaaactctaaaaaaggcggaatttttttccaaaataaattcagccctaattggcaccataatctgattccagaatacaattctctttatgaaatgttattga

SEQ ID NO: 23045 - DNA, 692 bp, Arabidopsis thaliana landsberg
atctggttgatgtttctgtacttttgttcttaatcttgttattgcctgtgatgtttctattgatattttccagttgtactgtcttcaatctttggtcttctatcctcatctttctgctacctgactacctcagtacctacttaaggactttaggtttgatctgtttggaaaatagattaaggttcgggatttgtgacctcagggcaagtgcagctccatattagaccccaaaacaaatttatcactgttctgaaatacaaattccccaacatgcctagctttgaggattgattgtttctaagctatttattttctttaccaattccacataaatactttaggataaagtggaaattgtcaatattcaaacacgttctcttccctttgttaacaagcaaaatatgaaaataacatgtgctcttccattatttcattttttgcaacccttatgaatgggcccaaagcctgccacaaacatgtgcacaatattagaaaagaaactctaaaaacaaaaacaaaatgaacattcttttttttgcaatttgtattttaatatcaaaataatattttaaaactcaatttaatattggaaaataaaataaaatttggaaactaaacagttaccatagagaaagaaacggaccatttttaaattttgaatttcgagaaaaacaaaatcggcgcctcttatt

SEQ ID NO: 23046 - DNA, 555 bp, Arabidopsis thaliana landsberg
  unsure (1)..(555): unsure at all n locations
tcgaagatgatcggagctgtgaacttggtgttggctgtgataacgtcaatccaaggggtatgggggagtccannnnnnnnnnnnnnnnnnnnnnnnnntttgagaggagctcaagactcgctccgagccgaaccaggtgttaatttctctactcttgaccagctcgacgcctcgaagcactctctcggttacctgtatttcctgtgagttttaacctattggtagattaggtttttgttactagtttgtgtatactttgcggctgattgatgattttggttattggaacttgatgtgtgtgattaggtcgaagtttaacaaggagaattgtctatgttattcgatttctgatctttgagttttttgtatggcttgattgttacagtgaggttcttacctgtggtccagtgtcgaaggagaaagctgcttatgagataccgataattgcacggttcatcaattcttgtgatgctgggcagattcgtttggcgagctataaatgtcatttannnnnnnnnnnnnnnnnnntatcttgtcttaatgtggctttttttc

SEQ ID NO: 23047 - DNA, 455 bp, Arabidopsis thaliana landsberg
tttctaatctacatgcctgatctcataagagaaagatagtcagacggaacaagccaaagaaattaaagaagacgaataactttcaaaatagacatcctgacggtcatacaatcttacaacttgtgtgcatgcgtgttaagtttgtgtctatgcatatggctgatgtgtcacacagctataaaatactgagtgactaatggctacacatcatttccttcttgatttgactcgactcatctctagatcaacaatagtgacaaaagaaattaaattcacagcaagagaagatatacagttggcatttactgaatgtggggacaagtacaatcaaaacatagacgatgaccgattcctaatctctaaatatatagctacagcgtgtctcacccatatcacagaagcaatcacttggtagcactagtaaccaagcaatttgataatacgatacctaatac

SEQ ID NO: 23048 - DNA, 283 bp, Arabidopsis thaliana landsberg
gacttgttctttgatatccactgaacaaatctccatgaaacgctgtgagtatgttcagcatttatagtttaaacctaatgctcccaaaacggtattgcttaagaagattgggtaggagggaaatgaggaataaggtgatgatactgacgatgttgttgctctcgacgaataagaagatgctgctttgggtgaaattgatcaatgagctggatttacagtgatttctgatgaatataattgggttgaggaggatggtcccactacgatccaccagaagaaggcg

SEQ ID NO: 23049 - DNA, 767 bp, Arabidopsis thaliana landsberg
ctgcggaataaaaataaatctgtcgtaactaaacaatagactattataaaatttctggaattttttttaaagggtatttttgtatttattttatttttaacacataagaaaagggtattttagacaagaaaataaccaatttaaccccaatattttataagacattctagtaattaatctcattatttgggttaatctagtttttttcccaatataaaatataaaaatagataatcatttacttattcaaatttaaagttaccattctaaaagaaattaatacttttgcctttaacattaagaaggggtttatgaaattatacaatcaattaataaaatactataattaaggaaattatacatttttattattaatcctagaagaaaaatgattataaatactcacctctatataaacaaatagatagtatcatattttctcataacagtattaagaggccaatcctagaagatgatatattgatatctatttgtcataacggtattaagaggctaatctttgtcaatatattcttttaagtgtttctttgtttacataactagtctttgtcaatacataattgttcatatgtttacgtaactaagaccatatttttatgaattatatgtatattcttggttgttctttaaatttaattaccgctaattttatttttttattttaatttttagaatatctactatcaaaaaaaacatgtgaataaaagttcaaaatacaaacaaagaatttataacactagctcagc

SEQ ID NO: 23050 - DNA, 883 bp, Arabidopsis thaliana landsberg
ccatactaatattctcatcaagtattcaaaaaaactcttctaagctcattatataaaataaatatgtatatcatattttatatctaataaatattaaatgtaatcaacaaataaacaaataattagtaaaaatagaaatttacacaaaaatattttggaaaacagacatttaagtatagttttctatatggcgttatctcgacattaatgtaaattttcatcgatagtatttgaatttagaatagtaaaatagttatatacatatatatatatatatatatatatatatatatatatatttcttgatatttaatttaataatttttgtttttatttttttgtattcttatgcattcaattttattataattttaattctacacattcaattttaataatgatatttgatttctaaatagtaattaacacacttttctatatttaattttggtatttaggaaaaaaaaaagttctatcttaaacattcaattttgcaatacattttaactatctatttcatcataataattctattttaattcgacacacttcatcttaagtgataacaatttcatatcaaataaatatttatatcagatcaaatctatgtggcgtaatcttgtaagttaattttacctcatgcaaactaattctaaatgagttaaaattaaaaataaaatattaacttcgcattaagcaattgaaagtaaaatcctataagctattttcccaaaaattatgttttcacttatgaatacatgcgttaaaatgtctaaaataaaacataagtattagtttatagtaacacatccaaggatgcaggactttcaatcacgtgtacattaaaattcttcgaaataacataaaattcaacactttattc

SEQ ID NO: 23051 - DNA, 561 bp, Arabidopsis thaliana landsberg
taatcttcccacaaaattcaagaatgattacattctctattcataataccaacgagctgttggtcgaatggtgaatctctcagttagaagtactgggttcgaggcacgttggaagagatttctttttcaaaggagatgaatttaacctgcatcccgcctctagaaaatgaaaggcctttgaacttgaatttccagatattcaaaaaaacaaaaaaacaacaactcttaggcataataatttactcaaattgatatgtggtgaactattcaatgtgaaacgtttgcgctctattattggtatgctgtattattagtgtgacggtatgacacaacggaacttccaatatatatgttgtacaattctaaattggattttaccgggggaaaatatcttgatcaagtacgaaatatgagtggcttgagtgtattgtatatttgtatgtatatggatactaataaataatctttgttccgtgggaaaagattgtgtaatctttggttcatagtaacaagaataagaaatttaaatcggaaattagtaggtttaaatttaacatgttc

SEQ ID NO: 23052 - DNA, 448 bp, Arabidopsis thaliana landsberg
  unsure (1)..(448): unsure at all n locations
aaccatcgatatgtcaccgatcggagagaatctttctcgtgatcagaagcacggggtgataaatttgagagagattttggttcactggtcgaagtctcgtccgtgcttggagaggtggaaggagatgccaacgtacccgattctgctatatactccttatactctttgctttctttctaattgacccatttactctctaattagaagatagtggcgaaatgatacaatcgttaaaatagagcgggcaaattgtaatataaggaaagttcatcgtccagattaccaccatcaaaacgctacgttttgatgtggatattgattccccgacctcctccnnnnnnnnnnnnnnnnnnnnnnnnnnnnnnnnnnnnnnnnnnnnnnnnnnnnaactaaaaagctcataagactattacttagaagagagtcgatcagatatgattttagcgca

SEQ ID NO: 23053 - DNA, 1304 bp, Arabidopsis thaliana landsberg
tcttcaacgaatccacgtcttccagaacactatggttggctttagagaacaagtacaagactgatgagtctggtcggcaaagattctcaactacgaagtttctgaatttcaagatggtggactccaaacaaattatggaataggtggaggctcttcaacgtatcttccaactcgatctgttcacctcctcctctgaagagcatcccttttattttgtttagtatattctatgttttttaattgtaatattgtcttttataattgttttgatatatgaatttctgattttgcaatttctttttttttatgatatttaatccggtctcaacaatgcaaacgtatttattaagaatatcataaaaaatctcaaacaataaacaaatattataaataatactaaaaaaatctttatgatactatatgaatatcacccatgttcatgctcttatatttacgaaagcaaaaatatgtgatgtaaatatttagtggccaataagtttttaaaaaaacacatatgaccaaaaaatgaacataatcacaggtcatgtcatggaaaaagggttatacattagtacaattatatattcttccgggttggtctaaaaacacacacaaaatatcttagtcctacaacaatctattagctcgatttttattttcaatttttgacctgaaattgaattagtaggacgtttctataattgcctttactcctacaacaaagctaaacaaaactaacatttaataaatcagtttaagaaaatatcaatcgtatctacggttataacaaacaaatatttgacaatcaagttgtttcctattataatgcttacgattttgattatatttattccgttgtttaattctagccaattataattaagttaaaaagattttgtctgctcacaaagaaaataaaagacaaaattacgcgacatgttacttgataacaccaattttggtcgatattaatacaaggtgtataacacggatgaaatcctaaaattaatagtcccaatccgattagattattttagaaagcagaacgaaacattatatctttatacagaacgtggttatacggtaagacgtaatttgatcgatattaatatgagacggtatacagtgggtgaaattctataattaacaccaaaaatacaattaaaaacaaacaaaaaatattaataaaacaattacaacttaaatttagtgataaattaattagctcgggtataccacgagtagggatgtcaaaatgggcaacaaaactcaactcaacccatatctcattaaaaatgataaag

SEQ ID NO: 23054 - DNA, 3552 bp, Arabidopsis thaliana landsberg
  unsure (1)..(3552): unsure at all n locations
tagttgagacataaagagagttgttccaagagaaattgatcaaagatttcaaaaactccccctttttcccataatcaaaacttctccccacaagagaccaatgttttgacaataagagacaaacaagagtatttagacaaacaaaaactctaactctactattttcaaaattctcaagtggtagctgatccatttctggctttggccttattttctccccctttggcatcaagcaccaaaacgggatcaatcttggcccttaaaccccattgcctcaccaaaatcttcaactaagagtaaaaacgcaataagagtacatagatgaacttggagtgagttactctctcatcggagtgcagtggaagtcttgcatggtccaaatccaccttttccctttcaaacctcctttgagactaaattaagcaaactcaagcacatagttagtctcaaagggtcaagttgtagcacagctccccctaaatatgtgcatcacttgcaaacaggacttgtgaggtccagggagtgtttgtacaacttgagcaccataagtaagcaacgaaatgcataaggaacatgatcaagggcataaacacatgtatgctataaatcaatccaagtttcgcgaatctaagacatttagctcactacgcaacctacaaaaggtcttctcatctagaggcttggtaaagatatcggctagctggttctcggtgctaacatgaaacactttgatatctcccttttgctggtggtctctcaaaaagtgatgccggatgtctatgtgctttgtgcggctgtgctcaacaggattttccgccatgcggatagcactctcattatcacataggagtgggactttgctcagattgtagccaaagtccctgagggtttgcctcatccaaagtagttgcgcnnnnnnnnnnnnnnnnnnnnnatactcggcctcagcgatggatagggcaacggaagtttgtttcttagagttccatgacaccagggaccttcctaagaattggcacgtccccgatgtactcttcctatcgaccttacatccagcatagtcggagtctgaatatccaatcaagtcaaagttagacccctttggataccagatcccgaagcaaggcgtagcgactaaatatctcaaaattcgcttcacagccactaagtgacactcctttggatcagattgaaatctagcacacatgcatacgctaagcataatatctggtctactagcacacaaataaagtaaggaccctatcatagaccgatatgctttttgatcaacggacttacctcctttgttgaggtcagtgtgtccgtcagttcccattggcgtcttcgcgggcttggcgtccttcatcccaaacctctttagcaaatcttgtgtgtacttcgtttgggagatgaaagtgccgtccttgagttgcttcacttggaacccaaggaagtagttcaactcgcccatcatcgacatctcaaatttctgtgtcatcaccctgctaaactcttcacaagacatttgattagtagaaccaaatattatgtcatcgacataaatttggcacacaaaaagatcaccatcgcaagtcttagtaaaaagagttggatcggctttcccaaccttgaaagcattagcaattagaaagtctctaaggcattcataccatgctcttggggcttgcttaagtccatagagcgccttagagagcttacacacgtggttggggtaccgttcatcctcgaagccagggggttgctccatgtacacctcctccttgatcggcccattgaggaaagcgctcttcacatccatttggtacaacctgaaagaatggtgagcggcatatgctagcaagatgcaaatagactctagcctagccacaggagcaaaagtctcctcaaagtccaaacctgcgacttgggcataaccttttgccacaagtcgagccttgttcctcgtcaccaccccgtgatcgtcctgtttgttgcggaacacccacttggttcccacaacattttgcttcggacgaggcaccagtgtccaaacttcattgcgcttgaagttgttgagctcctcttgcatggccaacacccagtccggatctagcaaggcctcttctaccctgaaaggctcaatagaagagacaaaggagtaatgttcacaaaaattaactaatcgagatcgagtagttactcccttgctaatgtcacccagaatttggtcaacgggatgatccctttggatcgtcactcgaacttggtttggaggtgccggttgcgcttcttcctccatcacgtgattatcttgtgctcccccttgatcacacgcctccttttgatgaacctgttcgtcatcttcggttgggagatgcaccataattgaggaggaaggttgatctcgttcatcttgttcctgtggccgcacttctccagtcgccatggttcgtatagcggctgttggaacatcttcttcatctacatcatcataatcaacaacttgctctcttggagagccattagtctcatcaaatacaacatcgctagagacttcaaccaaacccgatgatttgttgaagactctatacgcctttgtatttgagtcataacctaacaaaaacccttctacagctttgggagcaaacttagaatttctacctttctttactagaatgtagcacttgctcccaaatacacgaaagtaagatacattgggtttgttaccggttagtagctcatacgaagtcttcttgaggaggcgatgaaggtagactcggtttatggcgtggcaagccgtgttcacggcttccgaccaaaaccgctcgggagtcttgaactctccaagcattgtcctcaccatgtctatgagcgtcctgttcttcctctctaccacaccgttttgctgtggtgtctagggagcggagaactcgtgcttgattccttcctcctcaaggtactcctccacttaaagattcttgaactcggacccgttgtcgcttcttatcttttcaccttgagctcaaattcgttttgagccctccttaggaagcgcttaagggtcccttgggtttctgttttatcctgcaagaagaatacccaagtgaagcgggaaaaatcatcaactataacaagaccatacttacttcccccgatgctgaggtaggcgacgggtccgaagaggtccatatgcagcagctccaggggtcttgatgtggtcatcacgttcttgctgtgatgagcatttccacttgtttacctgcttgacaagctgcacaaggtctatcttttttgaattgaacattagttaaacctatcacgtgttctccctttagaagcttgtgaaggttcttcatccctacatgtgctaagcgcgatgccacagccagcccatgctagtcttagcaattaagcatgcatctataccggcctcctcttttgcaaaatcaactaaataaagtttgtcgtctagtacacccttaaaagctagtgaaccatcacaccttctaaagacagacacatctacatttgtgaatagacaattatatccca

SEQ ID NO: 23055 - DNA, 598 bp, Arabidopsis thaliana landsberg
  unsure (1)..(598): unsure at all n locations
ttttatatttaatgcaacaacaccgtggtgttggtccttctccttaataaaagcacattctcctcctgtcatgtacttcttagacaaacattcattttcacaccaatgaggcacggcatacctcggacatggaccaatgcaacgagcatatatcgattgatcgctcgctgcacataaacaacccaagttaatacatttgataataaaaagagatgtgtacaaacatataaatagttactaccagatcttaaaatgatcaaaaatatataattgaacattaacaacttacccggaaatgccaaaacattgttgtcataaaacaaaattggaaacaatactacaagaagtaaagtcacgatgctctttgtgatatccattatatctcactatcaattctattgagaaaatatgtttttgatcaatttctagatctttaccaagaacattatttatatgattttttatcttgaaaaatctcaagtttcaaaacttattttatattttcctattaatggtctttcatatttngctattaggatgaggattgattaaaaactaaaattattatctatgaaagggtaatttgaccaaaaaaaac

SEQ ID NO: 23056 - DNA, 627 bp, Arabidopsis thaliana landsberg
aatgccgtgaatatttgggttactactatgcctttaccggatcaccacatcttgcctcggccgagcctcacattcattttgttgcgatttccataattctttagagtcaaataaaacgatccggccatgattcatggtgagcaattcccttaaaaggaaacaaaagtgtgatcacttgattcaggaaaattaaggaaagtaatcaaattaatttttaaattgtagaaaaatgaaaacaaaatatccagctggaatagctcagtaggtttagagcgtgtggctgttaacctcaaggtcggaggttcgacccctccttgcagcgaattttgattcttttaacctattaatcccccaatatgaaaaaattcattcaatataatccatataatgtcctactcgataaaagtgttgaccttccaaatttgccaagttttaatgagaagctcaaaaacagttaaaaacttgcaacacaacatatcagaagctcaaaagaaagtgtccaaagtccaaactctctagtttattatacaatctgcaaagcattattacttcattacacacataaacattgtttacactgtaacgacaaaccgaaaacacacacaaactttacaaactcttttctat

SEQ ID NO: 23057 - DNA, 418 bp, Arabidopsis thaliana landsberg
ctttttcttcaccgtagcaaagcgtgagtagatgcctattgtgcttgtagtaggcctcacaaggaaaactagcacatgtcatacccaaaaaggagtcgtcgcacttaatacattctactgcataggatgaacaaaggccccgcccatgtgagctgagcatacgtgccttggtcaaggcggttcgtggactacacccaacgcaataaccatgggtcaagttgaagaagagatcatgtggatgacagccatgaattaaaggatctggaagggaagcgcatctgacgtctatttgaaactcacaatattcctcaccgcatttgtacacgaaaccacaacttaatcggtagcaagctctacatttgaatatgtctttggcagcaactgcatggaaatcaaacttggagatcccaccaattgg

SEQ ID NO: 23058 - DNA, 648 bp, Arabidopsis thaliana landsberg
  unsure (1)..(648): unsure at all n locations
atgctgcaaaagcaatcctcagacccaaaaatcgggtaggtgtctatcaccaccaatacctgacagcagttcaaaaacgcgttttaatgaagttaagaagatttgcagattcgggccagaactttctcttattttttaaaaaggcctagcacgttttagaaacatatatatataatattaagaacaaagcttatatatatatatatatatatatatatgttttgttcttaaaattatatatatctactctattatttgaaacatatgtttaatgaggtaggcataaatttcgctgaaataacaagtttgccataggattaaaatttttatgtcatgaagaaaacccgtttagaaactcgcggatcttagtgacccgttaattgtgtattcggatcttgacaatttaatcctggctattgatacatgaaaatgactttgacccgatgtttttaaaaaacaagcggatcctccttcattaggtcaaaggttttgttaaagaacgactaaaaagtaaaaacctagcttctcatttcatttttattacacagatcagcctcccttttcaaactcaatcagagngttacgttaaaagttttagaaaaaaggttcatgaatatggtagtttcttgggtggaataatatcttcga

SEQ ID NO: 23059 - DNA, 592 bp, Arabidopsis thaliana landsberg
atatataacaataatttgaagttaaaaaaaaagaaagaattttaaaataattaaaatttgataatgtaacatgttccatatcacatcaataatgtagattagtgataaattttttttcatatttagtagaaaatgatttgtatatatgaatacataattaaatatgatacttttcacgataacaatgtgtagtgttttgacaaccaggaggaagatggtactggttgactggaactctgacacaatttttgggatcttgagtgcagtctggaactctatcttttgcaatagctctatattttatgtatcttccttctccgaatccgctgaacaatgataatacaatcactattgacacaaagaaaagactagtaagactcattttgtgtgcagccattgtttagaaaccgaaaaatgatgtatttaatcttcttggtctttttctttgttgttgtattttgcagtttgagttggtgattattggtttttttttttttttttttaaatttataacaagagagatgattctaaatacagaaggccagtgcataatgtgtgtgcataaggaatttagtggatcttatatttcaat

SEQ ID NO: 23060 - DNA, 1137 bp, Arabidopsis thaliana landsberg
ggatagattcctctgatattcacaatgatggcactaagttggaatctgtcggagacttgattaaacagaaatctggcgatagttgtcttaccaatcccaggcggtccccaaatcccgatcatccttacttcatccaaatctaggcgcaacaattgttccagcatatccatatgagctctcatccctactaacccgtcgaaatctcttgatggtgtgaaactatttaacatgtttgaaacatcagtggctattttctcaatcatgtctgcttcattcctcctgacattagaggatagatatcaaatcaatatacaaccgttatgacaaaatggtcatgaagatctgaacgaatacactttaacaagtaaatcttaattatggagagtagaaatcaagaggacaaaccagttgcgagaatgttctccggcgattgtggccacatcctccaaagcttttctccatctctcaacatactcttttgttttacctttacatgtttttgtgaaggcttttccaaattcaccggtctgtttctttatgtcagttggatccacttcatagaaaatagtcatgactatctgacccaacaattccctacacttcatgatttctgctaattcatcaaggcaccaagatgaagaagcatagttctttgagagcaagacgatcgcgatctttgatcctttgatagcttctttgagctcatgaccgatcgacttactcctctctatattattatcaataaatgggtcaattccctttcttctgaacgattcgaggatgtgactaagaatggtttttcgaacatctgctccgtggaagctcgggaagacatcgtgtttccagtttcgagacacagaagttgcaggggagggaagagataaagaagaagaattactttcttggttatcttgttggaatctgaattttgttaaagctgcggctgccactgagccaagggaaataagaataattcattagtatggtaaagagtggatcaagatttaagatggcctttatgtgaatggatacagaccactgatgactctgttggcacataaactccaagatgactcatcaggaatgaatatgcaattctcagcatcgtttgttagcatgtctttcgtctttacaaga

SEQ ID NO: 23061 - DNA, 500 bp, Arabidopsis thaliana landsberg
attaattaatgtaaaataaaattgataatttacaagagcaaacaacttctagaacctgtatttttaaaaaaaatcattaactcttaaaataagaattaggaccagtcttggcattaacaaaagggtaaagctcatatctaaagttacagctcctacccaaaaccctcgcaccgcgtttaccacttttccagcaattttgaaacttcaagacattagcaaccagacactcctcacaagccttaacagataagtcatctgtacactgaaccatttcgtacatctttttctttgtcccgagcctcttctcccccgccccgtatagtgccggtttgttggtatcttttaagtttttattcttttcagtgatagctatacgtgatatattgtcgaagagagtatcccacttcagtatgaaagaaaatggatcatctcccacattcttcgcgttggacatacagaaactatcaccgtaattgagctgccctacattatcgatcgaa

SEQ ID NO: 23062 - DNA, 676 bp, Arabidopsis thaliana landsberg
ggggttctttcgtgctccgtggcggggcctatcaagccttcccaggcgcgccccacttcgccccgcactcaccctcaccggccagccactttcccttagctccggcgagctcaattccgcccgccattgccgccagagcttcggccaccgtggacagcccactccagccatcctctgggcaagccagtgcttcggctagctccgccagtagcccgtgaagcttgccaagccctcggacccggccggacttcaccggaggcccgagatcgacctcaccggacttcggtcttccgccgcagcgcgtggaccgagctatccagtgagtccccgcccaattccttgcgctcttatcttctctggcatcccgtggacctccctgacccatttgattgaactatctcgccgtgaccaggccggtctcctcgccgccgacgagcatccccgcctgcgcgcgtggaccgaccgactccggccatctccgacggcgttccgcacaccgttgtgatctccgagacctccccttcaccctcgaccacttcaccggaacagtctcgccgccggtaagcccctccgccctttcttcgacgcggttactgtttaaggtagaagaaggactcggtgtaggatttgtagaacccgagggttttctgtgatgtcagtggctcatgtgaatagt

SEQ ID NO: 23063 - DNA, 673 bp, Arabidopsis thaliana landsberg
  unsure (1)..(673): unsure at all n locations
aacggaaactcataataatataaagtgtataaaattaaattgcatttttattgcttaatcaaattgtatttgaattttaggcgatgaaattaaattttatttgtattattataaagtatatatttaaattatactacaaaatcaaatttgtaagattgaaatttggtttaagaaaatattaaattaaatatttaaaagtatatcagttactatttaaacttcaaatatcgtcaataagatggattgtatagaattaaaagacattttattatggggaaatatatagttaaaatgggtagtaaaattgaatgtgtatgattaaattttatttaatacataaattactaagttaaatattagaaaaagtgtgtggatccctatttactatatcaaattaaaatattatttataaatattttaataattttcttatatcgtatatccacctatttagctcgggcttatttagtatgtatatattggaaaaaactataaatttatcatgtaggatcttttgaaaaataatattggattttagagacaaacgaattatattttcaataaaaatcctgatttagttaaaaaaaagagatcagaaacccctaacgtcgattggaaaaaaactgacctacatgatacatgataatcaacactacatantttttttttcgtc

SEQ ID NO: 23064 - DNA, 837 bp, Arabidopsis thaliana landsberg
  unsure (1)..(837): unsure at all n locations
gtcaaaatggtttagataggatcttactgcatggctatgacaagatcataagcaagaccatagatagattcttctggcagtttacagtcctgcagaacaagtgaatttcagaaaacctgtgaccatatattatcaaaagacatagccaaactacnnnnnnnnnnnnnnnnnnnnatgtcctgagatcaccaccaacgcaatattccagaactaaccacatgtgagcagaagtttcatacctgggaccacaacaagaagacgacaattagaaacaaatatatggagccaaataattgttgttagataatagctagtaagttttaccaagcatagaacttgagtacgtttggatgatttagcgagtgaaggatcctgacctgaaaaggaagtttatcattcccaaatttgtcagtgtctaagcattatcactaattcggcaacgagaagacagatctgctgattaaattacctcttgaagaaccttgttcttccgcgacttatcgacactcttgcaggcaaaatactcgatcgtcttcttcttccttcctttatacacagtctgcgaaccgatttgaacaagaaattactaaacaaaacacttaagaaagaaagaaaaaagttatcggagaatgctaaatcagattctaaattaccgagcatttgccatgtccaatagcttcgtagatgtggtactgattcatcgtcggagcttcatctataatacacaaaacatagttcacctattaatttcagaatctccattaatctatatgttccggcaacatcttacactacaaataacaatcctatatcaatgaaactcaattcgcnaaacat

SEQ ID NO: 23065 - DNA, 1690 bp, Arabidopsis thaliana landsberg
  unsure (1)..(1690): unsure at all n locations
aagagttgttaaccttcaattctattatataatttgttaacctttgaggaaaataaaaaatcgaaagacgttaggacaggatcgaaagacacctgcgcggaggagtaaaagcggctcgatgtattacagacctccaccgttttatttttctttttgtaaacaataaattaaggaaagtaaaattaggtgcattgtatgaataattagtgtttaaccaatcaacaaagaaggtttgaagaaaattggaatttctataatctattgaattatatgaccgttcacaaggaatcaaggacacgatcaaaacgtccctatatgaaaagacatcgaaccataaaaataaataaaaggtgaatcatataataagcaaaagccaagaatgattctgattctgattcaagagtgttacaaaaataaaaacaacggtcataagagttttggcacttgggaaactctgatgccgagtcttgttctaaaaagatcaaaaaacattttcaactgtgtttcaccaaaacggtagatattttgttttattccattcataaaattttttaaagatatgaaaatgtgcaaataaaaaaagaaaaatttgcggcaagggagaggccggaatcagtggtggtgctcatcgtcttcgtcaccgtgaccatccggaggaccaccaggaccaaccacttccagctgcaagcatacattattcaaccaattcaatattctgaattcgaaagcttaatgagttcttgctctaatcctttgacagattcgtctggcctatgactatgaaatgagaggctaggtcgatttatttactgagtagagtatctgatacgactttcacttacctcaaagtactgagtgcaaaccgggcattcaaaggactttcctttctccagccagaaccagacaacatcgtgctcgtcctctgcagttttcaggagaaagttagattggtaaataatgtgtcttgatatattcaatgacaacaacgattgccgattaaagattgtccataatatgcgactaaagtttgaagaagggaagaacttaccgccttcaccaccagggcagcccacaattcgcttgtcatagtaggacttcacaatagcaggagcttcctaaggcaatacaaaatgacatccaaatttgtgtatcaagaaaatgaaaaaataagtatccaattgtgtagccaaaagaaaatgaatactgctcactcaaaagataaaatgacacaagaaaatgaaaaaatcaaatgtcttgtcatagcatgcaaaacagtcatatactcctacatatcttcagtaatttggagcaagttttttatggatgttaagaactgaatttccatgatctacagacacttgcacatgttgtatgtgacatccgcaatcttttcgtcattatcgtgcacaaaagcatcataggcagtgagccaccgtaaattaacaaacacagcttagagttaattttaattcaccaaaaccaatatatgattcaaccccaagctagtgcttgattgaaggaaatatactaattacattattcacaaaaaaaaataaaaatccagaaatatgaccagtgtaatatcaagatgatttagctccaaaacgacataacaaagtgattgctgcatgatatagtaatcctgctaaagcaatattatgaaccatagcanagaatgcnaagtgatcga

SEQ ID NO: 23066 - DNA, 480 bp, Arabidopsis thaliana landsberg
  unsure (1)..(480): unsure at all n locations
attggaatcctcctttgtggactgaagttaaatgcaatattgggttttcttggtcaaaaaagctgagtctctctggtgcttcttgggttgtcagagatactatgggcaatgtgctacttcatagccgtagatcatatgctcaggtagtttctgtttttgaagctaagcttaaaagctgggaatgggctcttgaaagcatgcagagtttaaactttcagaatgtcctctttggtgcttcaacatatnnnnnnatctaagcgctgcatcaaccacttgcatggccttctcttgtaagtcatctttttcctttgcttcaactcagtcagaacaaggttggttggcaaatggtttttgaacctatgcattgcaattctggagcttctcgtatagcttctagtgtgataacaggttttagactctcatcttatgttgcacaaggagctccttcttggctaaagaccttctttgagaaggagatat

SEQ ID NO: 23067 - DNA, 635 bp, Arabidopsis thaliana landsberg
  unsure (1)..(635): unsure at all n locations
tgcctcgggtagattcttcctccgatgcctctggtcatttccgagaatctgtaagcttcctcccttctttggcggaagtcgttgtcnnnnnnnnnnnnnnnnnnnnnnntctgaagcagctttctctagagtttgtgggggcttcctagcgaagtactgagccgttggtcctggccgaagacccttaattatggtctcaatgacaatttcattgggcactgtgggcgcttgtgccctcaatcgcaagaaccttcggacatacgcatgaaggtattcctcatgatcttgcgtgcactaaaacaaggcctaagctgtgactagctttggctnnnnnnnnnnnnnnnnnnnnnnnnnnnnnnnnnnnnnnnnnnnnnnnnnnnnnnnnnnnnnnnnnnnnagggaagaataccatgtctagtccacgttccagactgccatggcgaaggacttagccatgacagctgcattgcctccgtatgaggatattgttgcctcatagcttatcagaaattgttttgggtctgaatgcccattgtacatgggtagttggggtggcttgtaggattgtggccatgggatagcctgcaattctgttgccaagggagaagcatcacaaaagtaaaggtatcatgatt

SEQ ID NO: 23068 - DNA, 586 bp, Arabidopsis thaliana landsberg
tactttcatttaaattgaaaaactaaaatgaaaatttgtttcttgcaatttgtttgatttgcttccgcgaccattatagataaaaaaaaaaaaaaatcttccttgtttagtttgttattagtttcagttttgctattctgtattattttgcaatttgtttgatttgcttccgcgaccataatagaagtgcacattttgttttgacaagtgtgtgttcttaggttttgtagtgagtaaacagggactacaagtcgataaggagaagatcaagtcaatccatgaatggcctactccaatatctattgcacacgtccgtagtttccatggactagcgagtttctacagaaggttcgttagagacttaagtatagtggctgcgccaatgattgttgtgataaaaaagaacgtgcctttctcatgtggagaacctcaagataagtctttcaacacgttgaaggagaggctcacgcaagcaccggtcttagccttaccagattttgaagtaatgttcgaagtagagtgttatgcttcaagattgggaattggagctgtactacatcagagaaagaggcccgtacctttttta

SEQ ID NO: 23069 - DNA, 1869 bp, Arabidopsis thaliana landsberg
  unsure (1)..(1869): unsure at all n locations
aactcataccttctactcttcctagatgcttttgatgccaatacataaactctgtcttaatgataattcagatacatataagggaactaaagttgtttattaatcaattctacatttattttgtagagcatacgatatatgtaggttgcctgaattttcaaccctctactagtggaacctcaactttccatcctaaactcttagtcacttgaaaaaccaccataaaaaactttaatctcgataaaactacacgtactttcggatttgttgttaaaactacgcctccaattgaaccgaccaggtaaccgataattatacacccggtttgaattacccaaaatttaaccgaacctattcgattttgactctattttaacccaattttgacccagaaaatatattctctagaagaagaatactatttatttaattttgataaaaatactaaattaattaattttaccaaaattcttttataataaaaatatataccgcaaaataatataacaaaatagacaacaagttctttttataaatacaatggcgttatatatataaatgtatttggtatatactctaaatttaataattcaaaggtcatttttcttttttacaaacaccataatcatatataaatatatatatatatatatatatacatatataactcatcttgaatatataaaaaaaaaactgaatctataaagaaaaataaatttataaataccataatatatactttgattgtggtgtttacggatatctataaaaataaatttggcatatattttgaatttcattacatatatagaattcaaaggtcatatattataatttcaaaaaaaatgaatatttttgtttaaaaaaagacatagctttaaatttataaaaaaaatataaactgattgccaaaaggaaaatgtatatgtttgtatattatcaaaagcttataacaaaatgtagcccaaaatataatttggggtatattttgtcatattaagttttgctaaaattaagtaataatttaatatttttaattatttatcacaaatacaaattaataaaaatacttttacttcttaataagacaatttatttacatttatgtgggtcaaaattaggctaaaatagagtcaaaatcagattagtttcggttaaataatgggtaagtcaaaccgaatgtataattatcggttaactggtcggttcaattggaggcgtagttttaagaacaaatccaaaagtacatgtagttttatcgagattaaaattgtttatggtggtttttcaagtgggtaaaaaagtttagggtggaaagttgagattacaactagtataggcttgaaaattcaggcaacctttttttatataaacaactatataatggtaatatgacatataataataatttaataaattaggtagtatttagattttagactattagtggaaaattttacaaaaaaaataaatcccaactatgatagaaacccaaattgagtgaaaaatagaagatgggctttaaatcggaccgacgcttattgcttactaatacaaatcgcccttccttaaggtctgaagacgaaacgaagaacaaacactgaaatcccaaagctagaaaccctaatcccaaacgaatcaatggagcgagacgaagaagcgagtggaccgatgnnnnnnnnnnnnnnnnnnnnnnnnnnnnnnnnntctaatcgaagacctatcataagtggcgaaccgctcgacatcgaggcctacgcggctctctacaaaggccgcacgaagatcatgcggcttctcttcatcgctaaccactgcggaggaaaccacgcgcttcagtttgacgcgttgaggatggcttacgatgag

SEQ ID NO: 23070 - DNA, 608 bp, Arabidopsis thaliana landsberg
actttgattgctgttttatagtttgtagccttttgacaaatagtttttctcaagttcactacgagtcaaacacttgaaccaaaatagacatcagtattatatatatgcttttactattccaacataactcaaccgtagtagtaggcatacacgcattacacacaccaacacatatatatctcttttctcttacataaagtcggacccgttcattatttattgcagtttcaaagacttgcttaagtttcaaagacccacacacagacgaggagtaattttctattcctcggccaagagatgttcgtcgatctctttggagatctcgacacagaattggagaagggtttcgggatgagctacctcctcgctaattttctcatactccaggtgccagtgcgcaatactccctgacccctcttgcttaggggtcacttggagtgtaaatgcgaagctcttgtactcattcatcagatcaccttctaaaaccttgaacgtgatcaggttcttctccggatccaccgcctcgatcatatttttccccactgttaactttccatctgcaccatttgttcaacattttacttccctaggtttaaattaaggaatct

SEQ ID NO: 23071 - DNA, 1520 bp, Arabidopsis thaliana landsberg
  unsure (1)..(1520): unsure at all n locations
aaactctcgggagtcgcaaaacattataaaaggttttaaaacgaccacagtagtcagttttgtgnaataaaacctttgtaaatgatttaaaaatctttaaaaagaccattgggaatctttctaaaaccctttaaaaatctcttagtaatcttttaaaaccctcttaaaccctgtcaaaatctttcaacatcctttgttaattctattttgcgcaaaaaaaaaattggcggaaaaaatgttttgaaaaacaaaatgggcgggaaatttattttcggaatattttaggcgggaaaaaattaatatttcattttattaacctaatcttttttccaattatgggtaaaatggtctttaaaaaataaaagagggtatacatgaaaatgacaaataggaaagagcataattgaaaaggagtagtgttaaaagggcatttttaacaattattcaataaattatgcatattattagaaatagtttttttcgtatcaatgttattattaatagaaattgtgggatacatgctttactctccttcctaattcggccagacaaaaattaactaagtcaaacagaatgctaacagggaaaaatggcccattagaataacggttcatcaggacaacagctcggttaaaatgaagacggctcggcccatcttggttcggcttaacccgacatattcgaagggataaaaaggagaaatcgcaagagagacaaaggaaattttaggtcacctataatagtagaagacactattgagaaaagggattcagacttaaagttattattcgtagaatttaagagagaattgttgtctagctctttatcttttactttctggttttccgttatgtacgttcggttctctgttctgtattttctggtttctcattctgtacgttcggttctccgttttgtccttttggttctccattatgtatttcctgattttccgttatgtactttcggttctcggttctgtatttttggtttttcgttctgtaattttattgttctccttcatcgataataaaaaatctactccgttctcctcaaactccttagttacttattgttacaacctcggtacaaacattcacttttttttttttttttattttttgtaatgagcgatcgtcgatcgatataaaacagctagctgaccacaacgatagtgattatgatttctcgacaacaaaaaaaaaaaagaagaaggaatattctatttgtatttttgtgagacatgctttttaatcgtattaccagctttattaacgataaagtgattatgatttctcgacaaccttaaaaagaaggaatattctatttgtatttttgcgggacatgctttttatcttctatgtgtttttttttttgggtgtcaaagacatgcttttaatcttaaattatctttgggtattaacaactttgttaacgataacgagattatgatttctcgacaaaaccttaaaaagaaggttaatcacggcaagaaactacatttccttcgctagctgtcg

SEQ ID NO: 23072 - DNA, 1217 bp, Arabidopsis thaliana landsberg
cgaagaaacgtgtgtattattctaatgaatagagaggtattttatatcagtgtggagagggaagggttttacttgggtgacaaagtaaaacccctatgtacaaataattttagagacttctataaaatgagccttataatgggcatccatctattatttagaacaactaggtgatcacccgcgctacgccgcggtttttttggattttttgtattgtttaacttaaatatataaataatttatttatctaatcattcactcatgcaataagcaattacttttagtatttaaaatattttttctaacaaattctcaccaatgcatcatgcacataattcataaacaacatttatcttaaaccattttaatagatagtagtgttggattctagaaacttaagaatttgatagtggagctccttacgtattcctcaccctcaataatttattatataaatatcaatttaggagaatataaatatcaatttaagagaataacttactcaaatcattaagtaatccacgactattatacactcatactttgtgtttggattacaaaaaaaaaatattcgagtatgagaaaactattataatggttttattgaaaaatcatgtaatattaaaataaatttagtaatagtacaactaaatatgtaaaataaaataatatctaaaattaaataataaatatatcattaacctataaattaaaagttgaagagattacattaattatataatagacacatggcaaatgctaaagtgatgatgtgtcaatcatatggagagagttgaccaactttcatatatataattagcaattaactgttttcttttatagtacaaaccttaaatcaaaaagatgttcaaaattagtacaaacctaaaatcaaaatattatggttataccatcatacttgaaaaaattattggcatgttatatccaactattccttaactaattgactaatattatatttaatttattcctttaagctactttaatgatcaccatctaactctaataagatcggaaagctaaactaggcatgatgcttaattgtcatatgacaaggctgctttcttatactatgtcacattcatcgtttaattttgattagaaatttataatgttttctacaaagacttgcattactttttaattacaaataataattttaccatatttatatcataatttcactacaaagactt

SEQ ID NO: 23073 - DNA, 543 bp, Arabidopsis thaliana landsberg
actcagcttcttgaaaaactattcctctctggctgttcagatctgagtgtttttccagaaaacattggtgccatgacaagcttgaaagagcttcttcttgatggaactgcgataaagaacttaccagaatctataaatcgcctccaaaatcttgaaatccttagtctaagaggttgcaaaattcaagagctacctttgtgcataggaacattgaaatcgctggagaagctatatcttgatgatactgcgttgaaaaatcttccgagttctattggagatctaaaaaatctccaggacctccatttggtacgctgcacatccctttctaagattcctgacagtatcaatgagctcaaatctttgaagaaactattcatcaacggaagcgcggtggaggaattacctctaaaaccgagttcactgccaagcttgtatgacttctcagcaggagattgcaaatttctgaaacaggttccgagttcaattggtagattaaattctcttctccaacttcagttgagtagcaccccaattgaagctcta

SEQ ID NO: 23074 - DNA, 871 bp, Arabidopsis thaliana landsberg
aagaagcaactaacaacttgaaaataatggattcaggtaaaccaactgactttctgtgtttgaccaaccaaattttttagttataattttactaagacttatcccaaaaccttcccgacttagttgttggtacaaaatatactcattttgttcctttttgcttgattttttagaagaaaaaatttgtttcaataatattgattttttaggtttttaatgcaatagttattagttataattgataaattgtaaacttcaatacaaattattgaatatcgttagtttagagttattaaaaattataaatcacaaagaacaattcatttaaaaataacatttaatatgtttttttaatatttatgtttttccgtaaaagatcaaacaaaaaggaacagagagagtattatgtactaaaaaattcattatgtcattatatagtgagtaactcaaaatttcatgtaatattcactgcatatgtattttaacacgtcttcatctattattttattttttaaaaaacgtcgtcatataatattccattaataacatttaatttaggttatttgagttttatatataatgatttgagttctctgttactaatttgaaaacattgaagagttttgggagaatcagttataaccaaaggatttgaagagacattgacccaaaaaaaagagccatcaaagagtaaaaagaagacagtaaacaatacatatatacaaatataggtagaggtggataccacttgttctactccggtgagatagacggcgagagaacacctttcctttaggccggagcaaaccgcggcgaaggtgaagtcagtcatcactggcttcaccaagaactcggagaatgccgtcaggaa

SEQ ID NO: 23075 - DNA, 586 bp, Arabidopsis thaliana landsberg
atctaaattaattctttgataatatgagatttcttataaatgtttaatattgaatctatattttttgttgtaggtacttactaaaatagctattactagagaaagaggatctaattctagaagtgaaagggctgccaaaagacaaaagcagtctgatccaaaccattcagtgattgcagttggagtggatagtgacaagaacatgaagggaattcaacggcaaatgatcctttgtgacataatgaggtaagtaatagacatatggatgtttgatttttttagtacaatagagtaccaatatgtacaactatgttgtgggactaaatttttgtgtgttaatattgcaggaaatagagattctgatgaggatttcatgcctcttcagcctgagagtttcttctttactcctgatgagtatagaaagactctgaagatttatacaaggtgtaccattgctaacacgctgcttgtcataggggcgacgcaacaacagagaaagagatggtttatagagatccacaattcaagcatacatggtgatggggtcggattcacccagagaccgagccaacagataagggtcata

SEQ ID NO: 23076 - DNA, 941 bp, Arabidopsis thaliana landsberg
gaccatctatgcacatccaccaaactttgaccacgtggtttgcataatagtaatttgcatacaaatgagaaaggcaaaatagtaatttgtatagagatcatcattttcttgaaactctagccgcctatcactctgcttatgatttttttttggtatttcttacgttttttattattatttgctcatgtattttaatgaaaatagcataagattacctttaaattacaaatttatagtaagaatatatgtttgggttcttaatttcaactctctctctttctttgaggaattttaacaaacacttggagggcaaatctaagatttgtaaaaagataaaatttgaccaagacaatgatggatacactaagagaagaagaaacctagcaaaaataaaaattttaaccttatgagattaattaaaaatggagaaactgaatcgaaatctggaaaatcttcaacttttaagatttaagaagaaaaagaaaaaaaaacttagatctagtttttggtgtttttgatgagagagaagaaagaaaaagtatggaacgattatcttttttcctagaagaaatattgcaactgttttgtatttaattttataaagagaaaattacaacaattaccactttttctaatttttataaaatctaccacatttctaatttccttataactcctaccacatttattattgaattaccaatttatcctctctatttatcttcttatttatctctcctctctatttatctttcttctctatttatttttcctaattatttatctccattctctcgaaacacgtgctctttaaccaataaacattatatttgaacaaataacttttgtttttgtctcgaaatcttgtccccaattggaaattctctgttgcgtctaaatcttgtccccgatttcatcatctttaaaaattatcatgaatc

SEQ ID NO: 23077 - DNA, 1183 bp, Arabidopsis thaliana landsberg
gtgcatgatgtggttgttgccactacggattatgctcatgtttagtttccttatgttggtcttcaccccggcttgcgctctgatcaatgtcatttgctgtcacacaaaaacaaaaagctttatgtttcagacaagaacaccatttctcccccttgttatttgcatcctagagtaattctgtataacagcacttaatgcagtctcacgcaacaaaatctagctgatgttctttaggtaacaaaaagaaaaactagaaacaaataagagcaatgttcatcttcaacatcatactctcctttataaggaaaccggtatatatagactcaatgataagctgcaaccattttgtagtgcattcacttaactagccgagattgaagatatatattcctacccagtacccaccagagttcagaccagtccctgcgtataagtctgaacataatctaaacagtcccttttatcaagattttcattggtttgtaagctatggtataatttatacatacgttgggaatgaagctgtagtttccacaaataatgacagccatttgaaacaagataaaggtaacccataactcggataataataagtgattagcctacagtgtaaagactaaaatgcatgttgctgatgtaaggtgtttacattcaactttactatgatggataaagaaagaactaaagcgacatctctcaacaacataccagttcatctaagaagtccctctgagactttgcttctgacccaatttcttgagcaatctgcatcaaaataagcgatcaacgatataacaaaaaatcatgagggataaataatgcgcaaaagtgcaaggtaaaacacaaggaattgtagagaatgtcgactgattccttcaagaagggtggtgatataaaacaataaccacagatgtatacaaaagacatcagacaagtggattcaactaattaatcgtggactgactgataagtattgtgaacaataacattatcatagtaccctgaacaaaaaaacacctacacaactaattagccaagctctaaccactgtcaaaaccgaaaagaagacaaatttccaaattcatatgatcaacttaaagcttaaagagaacaatgatccttcagaaccacaagaagacaatacagatggcactatagataaaaagtagaaagatcgaaatag

SEQ ID NO: 23078 - DNA, 1190 bp, Arabidopsis thaliana landsberg
aacacccactcatcaaattccagttttcctctgtgcgcacagatcagattactgatcttcaagtatcaccagctcacaattgcttatggtctttcctagtgctgcaattgatctcaaaagagcacacagaggcagaagcaagatagtttcaaaccatgacgacgttgtcaaaatctccgacaagaaccagatggctaagcccatgacatatattgaaccagatgtctaatgtctcttattgatatgttcgcgtttgcttatagatgcgtaaagagtctatttttctaaacgtcccacatcgacaagttagagagcattggtcataagatgtgtaatatataaagaaagctgagcccattgtccaattcatacctttctcggccttttggctaagatcaagtgtagtatctgttcttatcagtttaatatctgatatgtgggccatcggcccacacgatattaactctacttttaaagggagaaagcccactaagatagcttgctatcttgggctttcgcgagtcgcccatgcgttgcactactgcacgggcttggctcattccatcaacaaatagtttaaatcattcataattagtgaatatattaatctgaaaaaatatgattggagagcataccaaatgaaagctaaaccgaaatttgattaatcgagcatccatccaaacgacaccatatttcttaaaccctctagacattggcactgagcttgagacggtgtgagatatcataaatcagtgagtgagtgagtcatgtccgataatctgaagcatcctctcgattctacagctagtgaggaatcactcgagagactctcaaaggttgcgagaatcgagggatttagtgacgaagaatcagaggaacagcagggattggccgacttggagtccatgaacccagtaaaccctagagtgcagcgttacttggttgccattgagtacatcggaactcgtttctccggttcacaacagcaagctaaggaccgcaccgtcgtcggtgtattgcaggttgttgcgtgtctgtaatttcttatactactgctctgttccttcaagatttgcctggcattgattgatttcacagctaattatgtttcatagagcagagcttaggcctagtttatattggctgacaagtttcttaggaggattcatgtgtgaattgatacatttttg

SEQ ID NO: 23079 - DNA, 524 bp, Arabidopsis thaliana landsberg
  unsure (1)..(524): unsure at all n locations
tttttctaaggaggcggtgcaagatttggtttacagagctgtatattagtattgttttgcgaccgcaactataaagttggatctaaagcgactcatgnnnnnnnnnnnnnnnnnnnnnnnnnnnnnnnnnnnntggtatttacgatgtgcaaaagtaacgagctaaaattgtttcagtgttagagttcacaggaagatgcatacaatcaagaagtctgataagaatttaagcgattgttaacataccggcacaccacggttagccgcgtctcttttgcatgagaattatccaggtgagtttcaaactccaccacctaaaagcataatgagtattgttcggggaagagtgggtttgcattgttcgtatgctaccgcatggagaggaaaaagacaacacattagtgacgtgcggngtagtcctgaaaaaaactacactgacttgtactcttatttatacatgttaaaggaggtgaatctcgggacaatatcatatgtggaagtggatgcacaacanaagtttaagt

SEQ ID NO: 23080 - DNA, 909 bp, Arabidopsis thaliana landsberg
aaatggggttgctccaccagctgcttttcaggtgtctgaagtcactgctactaataacattgatcctactatctgctatgttcacaatggtcctaataaggggagatcgatgtgttctttctgtaatagggttggtcacattgcagagagatgctataagaagcatggatttcctccaggttttactcctaagggtaaagttggtgataaaacacagaaaccaaaacctgttgctgctaatgttgctttggctactacagaatctgatgatactcattctggtctaaagagtttggtgggcaatctgagcaaagaacaacttcaacagttcattgctatgtttagctctcaacttcagcctcaacctcacagtaattctgcagtagctagctcatctcaagctgataacattggtatttctttctctccttccacctatagttttattgggattttgactgttgctcaacatactctttcctgtaaaacatgggtgatagattcaggagctacacatcatgtttcacatgataaagatctgttgttgactttgaatacatctgttttgagctcagtgaatttaccagctggtcccactgtgaagattagtggagttggtactttgagactcaatgatgatattcttctcaagaatgttttattcatacctgaatttcgtcttaatctgatgagtataagttcattgacagatgatattggctcaagagtgatatttgatcaacatgcttgtgaaattcaggatcttatcaggggtcggatgcttagtcacggtgggagagtggctcatctctatgtcatggatgtagaagatacaaatgtttcagtgaatgcgggtgtggatatcagtacgtggcataacagactcggtcatgcttttctacaaagact

SEQ ID NO: 23081 - DNA, 636 bp, Arabidopsis thaliana landsberg
aacctcacacacctaatctttaaaacagtgaattgccatcagccccatgcatctccctcgtgtagtgaattgttctctgaatgatttcactcgtatctttagtcttatctcgttattacttataactatagtagtactttaaagatctgtttggcacaagttataatgttatgactatatgattaaacgaatagtattttttggattattattacccaaaaacatatacaactattataacgtcatttctaagaaagtttagcagtgttttatttttatttttggcttttagaaatcattggattcttgattgaataggaatagtttgcgtaacaaagcaagatttttttcaattttcttacaatgcgtgaattagaagcattagaataatcccaccgacgaaactatttgtcaaatgacacacattaaaagtggtccacccaattcctctgatttcggttaatatagtaaccatgtttatatttagtgattaattctgtcataattcaatttagcttagtgatcatgttaaattaatctggtttgactaaaccggttttgatggttcaggagcattcgaaacagcacagcgagaagaagattaggatacttctcatgctcaaccggaaatccgat

SEQ ID NO: 23082 - DNA, 1041 bp, Arabidopsis thaliana landsberg
  unsure (1)..(1041): unsure at all n locations
ttgctagattaaaaaaaaggcttgagatagattggccaaagagatttgatatcattcaaggtattgtacgtggacttctctatctccatcgtgactcacgcctcagnnnnnnnnnnnnnnnnnnnnnnnnnnnnnnnnntcttctggacgagaaaatgaacccgaaaatatcagattttgggttggctcggatgtttcatggaaccgaatatcaggataaaactcgcagggttgtcggaactctgtaagaaccattcttcaataacatattaaactagattggtaagtcatatactaaaatgggtacaactatttgattttttgaacagaggttatatgtctcctgagtatgcatgggctggagtattctctgagaaatcagacatctacagcttcggagttctactgctagaaatcatcagcggagagaagatttcaaggttcagctatggtgaggaaggaaaagcacttcttgcatatgtaagtcagcctttatgttttcttgcactttccgattttgtaaaaggtttgttgctcttgtattgttaagatctgaaaccaatgcaggtatgggaatgttggtgtgaaacccgaggagttaatctcttggaccaagctcttgatgattcttctcatccagccgaagttggaaggtgtgtccagattggtttgctctgtgttcaacatcaacctgcagacagaccaaacacacttgagttgttgtctatgcttaccacaacatcagatcttcctctgccaaaacaacccacatttgcagtgcacacaagaaatgacgaaccaccgtctaatgatttgatgatcactgtcaatgagatgacagagtctgtgatcctaggacgttgaacatcaatgtgtgatggaaaattttagaattggaattattctccaaaggatcaaattttctaatgttgctaacttcaacgtagattatttcattatgttaaaacttaaaagagaagatcccatccaaaattatgcaaaaaggcttgttcaaagagaagagagaagagttggtcattt

SEQ ID NO: 23083 - DNA, 1217 bp, Arabidopsis thaliana landsberg
catttgagttttgtgacccactcacccactctatagatcgtcttctcaaataccgaagtatcgaaccattccgaattagctaaaccaaaatttatttataaacagtttgatttaattatataaacttgaaaccaaactaaaaccttttctataacctaacggaatatatgtaaatttaattaaatttattttaatttagaaaagactacgaatttaaccatatacatgcatatatttttatttattcatatattgaggcttgagggtatcacctataagaggttttttaaaaaggagtaaatgtgctaaaggaaaatagaagaaaacagggcaaaaatccgaatttaatcgtttctactttttgtagtggggagttttcaacattttacttcatttttgtagaactgaaaaaaatatcttccatgttttacttaattggttaatgtgctaccaatcacattcttaagttatttaataactaaaaccagacaaaattcaaatagtatcaaataaatggaaaccaaactgagttaagaaaaaacgatctcgaattacaatttacaaacatgattttccatcacttgagtcttttgaataacagtcaataacaaattctaaatttttatttttaatattcattgttaacagtaacattagtaatgcaattggttgggcggtaagttatacctgacttacactcttaatttttcttaaaatcttaattacgtaccaatagtgtagtaactttacctttaaacttacagcctattttttttttctttttttctttaagcggtaagaaaataaattctcaaagccatattttattagttatagaaattttaattcattaaataaatacaaaaaattaaaattattaacataaatatataaccaaaaaaaatatttactatattttatttttctatcatcataatatatttatttaaattagtaatacaaactattttatttactataaaaaactattacaactattatattttactaatccattttttataaattatttaaagtcaaaaacttacgacaataattctacaataataactatttttcctgacatctaatcaagtttgtacagcatatattaaaacatttgttaataaaatgaccaaaaaagaaaaactctcttagagataatcttatttacttacaaaaaatatatccctcatgcaaagaatatacgaatagat

SEQ ID NO: 23084 - DNA, 556 bp, Arabidopsis thaliana landsberg
gaggaatccctgtacccttatttaaatcttctccttactctttaattcatttgatttgctttcgtttacctcaaaattttaatgttttgctctgttttcaagtttcgatttttatctgtttcattcatagattgctcaatttgaacaagcatgattgttacatattatgtatggttgattgatttacactctaaaggtttttttttttttagcttctgactttaaaaatggactctttttttttgtgtagagaaagcgttgtataagactagagatcgtcaatggttctttttcagcttaagggataggaaacatggaagtaggtcaagtagagctactgaacgtggctattggaaagcaacagggaaggatagagtcattcattgtgattcgagacccgttggagagaataagactcttgtttttcatagaggcagggcacctaatggcgaacggactaattgggtgatgcatgagtatacattgcacaaagaggagctcatgaggtgtggtggtgaagatgttaaggatgcctatgttctttacaagatttata

SEQ ID NO: 23085 - DNA, 845 bp, Arabidopsis thaliana landsberg
tgataaagaccggagaacttaagtcatagtttaatactaatatattgcaattagcatatgtataatcccgacttattgctgtcgttgtctggtctccagtgaaaggttatatatcgacaattagaccatctacattggacattttgattgagtgtcttctttataagtaaaatattaagaaaactaaaataagatttttaaaatatggcagtgtctttaaatgagagacattcaaaaaaaatgtctatgagaaaacattttggaaagaaaattttgtatgtaaagacaccttcttattttaataatcatatttgaatttatttaataatttattatatgggaagacattcaattaaactgtccaatgtagatgctcttaatacacgcacgttattaccacgtctactaaaaggaggacattaaagctttatatattctttgtatatgtattcttggtcatataaaatatatatgtgaatgtatacacgacttttaaaaaattacaaatcacaaggaatgcttctttcagccgatcttttacagcctgacgccactgcatacttccattgttgttcaaataaattaaagaatggtacaaaaaatttaagttttgtaaaactaagaaatttcacttgatagaatagttacctaaggttgacgttagtggttagcattaaaagaggatccgggtaaaatatgaattttgtcataagaaaatatgaatttttgaggcgttcaatttcgcgaagtcaatagtgtagtagttgaagtaaatttgtattcgtgctctctttccgaaattaaaaatcaatttttgtatttaggggtgacttttggttctaaca

SEQ ID NO: 23086 - DNA, 490 bp, Arabidopsis thaliana landsberg
ccatatagctaccgttttaacgaccacatatatttgtaacaacattttgctacttatcagttacaaattagtaacaaaaaacgatttaataaacaattttgctacgggtagctaatttcttactacccgtagccacttagctacattttgcgtgacaaatgtttttgtaacaaatttgttactacttgtgttaaaattttgttgcaaagttccacaatcgaaaatttgtcgccgattttgtaacaacagttgaatagaatattaattaacttcttacgactattagcaactagtaaagttgtatctattatcgatgggttatgacattccgttttagtattaaatttgatacgaatttagtatcaaaaactttgttgtaaattttcacaaaaccaggttttttaacaaaaatttatgataaaataagattactaatattgtttaatttttgcaacaattcattttgtaccaactagaagcaaagtggaga

SEQ ID NO: 23087 - DNA, 990 bp, Arabidopsis thaliana landsberg
tgggaagacagatagttgtcgagttacggggcggagagttcgtaagatcattaaatcgagattagatagagctatggcgaatgaggaatggcatactattttttcccacaccaatgtggagtatctcaaattatggggttctgatcattgacctctcctagcatcaatccaaaatagcccacaaagatactttaaaccctttattttcgataaaagatggcttggtaagccggggtttaaagaatcagttcatggaagatgggatatcccttcacaagaaggagttcttttcactcaaaaagttaaaaattgtaggaaatccatttctctatggaagaaatcgagttcctcaaactctgagaagaaaattttggaattacaaactcagatcgacctcgctcaagaagatgagtctatctccgctgaagatctattagcactaaagtggaagctttgcgatgcttatagagaagaggagatattctggcgtctaaaaagtcgggagttgtggtttaaagagggtgataaaaacacaaaatattttcatgctactaccaaataaaagagagcaaggaataagattattggtttattgaaccaagacggtctttgggtagacaaggaggtggatttggaaagacttgcggttgattactttaaagatttgtttaccacctcggagccacaaaacttccattccgctcttcaggatctgctagtgatgatatctgaagatatgaatcagagactcactaaagagatttccccagaagaagttaagcgcgctcttttctcgcttaatccggacaaagctccgggtccggatggtatgacagctctgttctaccaacgtttttgggatttgactggaccagatcttgttaaagttgttcacaatttccattcatcccgctcttttaaagagcatctgaatgagacaaatatctgtttaattccaaaaacagaccgaccacggaaaatggcggaatt

SEQ ID NO: 23088 - DNA, 540 bp, Arabidopsis thaliana landsberg
gtggacaataagtgatttgctagcttacggaaagctttcggggtggacaacatatggtcggttggcatgtccttattgttgggatgagacatatgcatttcaattgaagaatggtaagaaaataagttggtttgattgtcatcggtgctttttgccaatgaatcacagctatcgacaagacaaggaaaacttttaaaaaggaagagttgtgagcgatattccacttcaactgctaacatgtgaagagttgtggaatatagtaaagagtttgccaaacacaattgattgtggagtaaaccatgggaaactacaaggatatggttacactcataactcgcacaagcaaaacattttttgggagctaccttattggaaaaataataatttccgacacaatcttgatgcccactaaaaaaatactttttggataatttcatcaatacactgcttaatgtgcaagagaatagtaaagataacatcagacaacgacttgattgtgaagagctttcaactgttcacactactttaacagatgatgga

SEQ ID NO: 23089 - DNA, 1428 bp, Arabidopsis thaliana landsberg
cttggatttgatagaggagatggtagaggtattcatggatgatttttctgtgtatggctcttccttctcctcgtgtttgttgaacctatgcagggtactcaaaagatgtgaagagacaaacctggtgctgaactaggagaaatgctatttcatggttagagaaggcatcgtcttggggcacgaaatttctgaggagggaatagaggtggataaggctaagattgacgtgatgatgcagttacagccaccaaagactgtcaaggacatcaggagttttcttggacatgcagggttttacagaagattcatcaaggatttctccaagtttgcaagaccgctcaccagactgctcacaagactgctgtgaaaggaaaccgagtttgcgtttgatgaagaatgtttgacagcctttaagttaatcaaggaagctttggtcactgccccaatagtccaagctccaaactgggacttcccattcgagatcatgtgcgatgcttcagattacgcagtaggagcagtcttgggccaactgattgataaaaagctgcatgtgatctactacgcgagcagaacgatggatgatgtacaggtaaggtatgccactacagagaaggaactgctagctgtggtatttgcattcgagaaatttagaagctacctagtcggctctaaggtgacagtctacactgatcatgctgctttgaggcatatatacgcgaagaaggataccaaacctaggctgttgagatggatcttattgctccaagagtttgacatggagatagttgataagaagggaattgaaaacggggtagttgatcatctgtctagaatgaggattgaagacgaggtccctattgacgactccatgccagaagaacagctaatggcaattcaacaacttaacgagagtgctcaaattcggaaatcactcgatcaagtatgtgcaattgaagaaaagcttccgtggtatgctgatcacgtcaactacttggttagtggtgaagagcctccgaatctgtcgagctatgagaagaagaagttcttcaaggacattaaccatttctactgggacgaaccttatctctacacactctgcaaagataagatctacaggagatgcgtctcagaagacgaaatcgaaggcatcctattgcattgccatgggtctgcctatggtggccactttgcaacgttcaagatagtgtcgaaaatcctgcaagctggtttttggtggccatcaatgtttatggatgcttaggaatttatctcgaaatgtgattcatgtcaaataagagggaacatcagcagaaggaatgagatgcctcagaatccgatcttagaagttgagatctttaacgtttggggaattgattttatgggtccgtttccttcttcttacgggaacaagtacatactggtcgcagt

SEQ ID NO: 23090 - DNA, 383 bp, Arabidopsis thaliana landsberg
  unsure (1)..(383): unsure at all n locations
tggatctgcacaaagcacaaggtattatgtgttccaaagaagaagtttgtggctgcttaaaccaatatcaaatacgctttagtagctgatgataataagaactaagatagaatggcatgagaagaatttaaaaggaaacaaaatatttgaagtggctctacctgcaatagctcttggcagaggtctatactaagaaagccactggaaaaaaatcttccagcagaaagagattggaaaactggtaatgcaatttcatataactttagnnnnnnnnnnnnnnnnnnnnnnnnnnnnnnnnnnnnnnnnnnnnngattttagctgagctaaaagggattacttgcatactagaggctggatgcatccctttgaacaagacaagtac

SEQ ID NO: 23091 - DNA, 1198 bp, Arabidopsis thaliana landsberg
aactcacctagtacggatcccaatgacactcgaatgtcctaatagcagttgagcgtcgtacctacaagtttaggcactcttatcacataatacgccctctgccgtagcccaccaactgtcggagaaaaaaatactcataaaatgagttttctcgtcaccaccacttccaagcactcgcttaccggccaaggcaacttactataccctattgacaaaatgtcatcaactcgttattctcactagaacactaagctttcttgatagtaggtattatttttgggcatattaattaaccaagctgaaagtaccaaatcgagatcaaactgaaaatactaaattgaaattgaaccgagaagaatcaaaccaaaaatttaaatactcgaatggattcttaactctagaaccaaaaatatcggaagcaacccaaaatattttgaatatcgaactacaattatatatccaaaaatattagttatttagaccgtatatatctgaaaatatcaaaacaccccaaaatatatatatatatatatatatatatatatatatatatatatatatatatattaatagatcttaaactcaagaacgaaagagccggagctgaacccaaaaccaaaccgatatttttgatacctatatagatcttaaactaaaatcgaaagacgcaaaacctaaccatttttttttatacatatgcatattacaaactaaattcgtaagaatcaaagccaaattaaatcgaccttaatatctagatgtccaaacgtaacaattattgtagatgttaagcgatcaacttataagaaagtggaaaaagacaaaaagttgcgcaatgctatcaagtaaacaaacccttttaattttttttaaatttacttcccagtaaaaaaatcaatgctaaatgagtttatcaaaatacccgaaatacataaaaataaataatattccaatagatcttaaacagaaccaaaagaaccggatcagaaaagtttttttagatatctatattgatctgaaacgaaaattgaaagaagcagaaccgaacagaaccgaactggcttttttcgacatacatattttaaactacaatcgagagaaacaaaacgaaattaaatcgacctgaatatccaaacgcgtcccctcccaattattgtaagtgttacgataaaaacataatgctaagtaacaagaccac

SEQ ID NO: 23092 - DNA, 662 bp, Arabidopsis thaliana landsberg
  unsure (1)..(662): unsure at all n locations
gatgccgcgagacaaannnnnnnnnnnnnnnnngatgcaacacccatgacacttaggttttggtttatacataacacggacatctgtcgctatactggtttgaaattgggaagaaggggcaaacggggaaaagagaaaagagagtaacgcccgaatttggtgagagaaaagaagaaaaaattctacccccaaattcagggcgttacagaggtctctcggatctcgaccccagaaggcgccgccgaggtccgcttcgccggcagtttcggcaccacccttgctttgggcgctttggacgcccgggaggcggactgcctaggcactgccatggcgacctgagggtccgtctcctgcactgccggcgtgggcgacacgtctcggggaatagacgcctcggcctggctccccggggtcacctcaactcccccggccgaggggtcaagtaccctctcggtctgcccccgctcttcgggccgggacctcggcgtcctgactccggggactgacggcgtcaacccactcgagggctggcttgacggctcttggcctaactccaagctagggctgaaaccgaggcgggcaacattgtcgtcttcatcggcatcaactcaacatcggcgtcgtcataggcgtttccggcaaggttcctcgggacccctccc

SEQ ID NO: 23093 - DNA, 548 bp, Arabidopsis thaliana landsberg
  unsure (1)..(548): unsure at all n locations
cgatcattggatcacttgagaggggttgagtgcaaccctcgtccattgggagccacaacgtggagtaggcaagtgttatacttggccgaaccacgggataaatcaccgtgtctcttgtgcttgttttctttgtgactattgtgtttcacaagagcttggtccttagccacttgattccattgtgctaacacttaaccaagttttgtggctataagttttaagtttttacaggatcacccattcatccccctctaggtgctctcaattggtatcagagccgttctcttcacgaaagggactaatcgctcgaagggatggatcctaagggaaaggggatggtggtcaatgacaaggagaaggagtccttcctcaatgagccaagggacgacaagcccactgactctggctcaagtcataagaagaaggacgggaagaagaagaggcacatcaagaagatagtctactacgactgcgacgagtcttcttcttccaaagagacgacgacgacgagaanaagaaatcggttaactcagacttttcttttgatt

SEQ ID NO: 23094 - DNA, 720 bp, Arabidopsis thaliana landsberg
agttttctctgaatgtctcattttactcccacagccactaaagaatggatgatatgaatccattttatgagttttcgagtttcatcaaactattgcatagtaaacaagaagacatcaattggtatgcgagttgatcatttgaagtcactacctttagtgcacaattatctaatgaatgaagtgaagatgaagccacattcatggtaatgtaagttcccaaccaatcaatgttgaagatgatggaataatgagtcgcctccttgtgtgaaggcaacaaaagcgaaaggaaaataattatccactgttaaaggagaagcaggccagtcagtggaataatttcaaagtttatggaagtttaagaagaaggattgagatagcaaagagaagcacatcaagcatcagatgcttgaaagtctactttcaagaaccgatcctctattagacattaacttggccctaaagaataagctaatcacagatttttggtcctaaattttaagttttaatttggagctccttctttgttaaatgtcttcattagttttcaatgtctatgtagtctattgtctgatgtagtatgattatatatgatgttgttttagtgttgcacttggatgatattgcattgtaatgtatgatatgtattatgtgttaatgcacttggcttgatatgggacaaggtaatatttcacttgtccgcatatgtaacttgtcttgata

SEQ ID NO: 23095 - DNA, 1019 bp, Arabidopsis thaliana landsberg
  unsure (1)..(1019): unsure at all n locations
ctacagcacgcaaaaacatattattttcgacatttaagaataaaattagtattatccaactatcagttattaataacgaacacttcacctcttttgcgcttattttctcttatagtttttaaaatctgcatcctcttaagcctcgccnnnnnnnnnnnnnnnnnnnnnnnnnnnnnnnnnnnnnaataatacacaacacataattcagtttgtataaacaaatatatatacatgtacatgcttagtggtgattgataacttttcaatattgtatattacagtaagaaatatattgaatcgaattaaaaacacggaccagttagcaaacttttgtctaacaaatataattaaacaatcaatttaccttagacccgaatcacgttccgattgaatgttctttgttaagagtcaggaaacatatatatatatataagatttttatgatatattcgaatatgacataataattaatcatgattataccaaatttttgctaggttttatcctaacactttaatatgtaaaattacaataaaaaggaatattacatttaatcgtactaaacgaaaatagaaactaaccaattattaaaaataattttgtatggggtgaatatgtgaatatatcgatattatttcctaaaaatactataattttctatactgatatataggtttttataagattcttttagtgtgaataacagcgaagaaacatagataatgttatccgtataattgtttgttttcttagtactaaagatattttgtaaaatatattgttttaatgtttatgattcacaacaaacatcaatatatttgtttgaagaaaaatacagacttaattaaagaaaataataataagcgcatattgtcatgaatgagatacagacaaacgattagcaatcatacatgaagaataaaatatgatgataaacagaaacatctagaataacgatgaaaataggtttataactatgtagcaagtcgcaggaggggtgagcgaaaatcctagacata

SEQ ID NO: 23096 - DNA, 635 bp, Arabidopsis thaliana landsberg
  unsure (1)..(635): unsure at all n locations
caaatgcttgtccgatgtttcaacacagactgtgagacaatgttttaggctggcaagattgtatgaaaaggcacaatttaaaaagccttattctgcacattggacacctaaaacagggggagctactttgaatatgaaaccaatgcgagagcctgagtcacaagcaggtcactatactaacaagactgtttctaaacaaccaccaaatactaagaagttgtcgcagcaagaaatgagtgaaagcgagctatgggactttgctatttttgtgatgaaaagtacactctggagcactatttggttcacaagaacgcaactgttttgtatggatgtagatgatgagtttgaggatgcgagtgaggaattgttgaatgaggatgaggagaacatgcctcagatttttgtgaatgcagtttcaggaatatcagattacacgactatgagagttaagggaatgtatgacaataaaattctctttattcttatagattctggttctacattcaactttattgattcttctatggctaagaaatngcgttgtaaggtggaacctacaggtttgacatgggtatctgttgcagatggcagaaagttgagggtagatggtaaaatactgattcacatggaagctg

SEQ ID NO: 23097 - DNA, 741 bp, Arabidopsis thaliana landsberg
tatatgtgggttgcaaaacatgtcaatgtatgccctcttggcagatttagaatgccagttttgtccacatggcacataagtgttaaaggttgtacagaaaaaagacttggtctggttaggatagtgcagttcctgttcaatatgtataagttattgaatcatatcttcttcagtcagtatgtctatacataggtcatgcatcgtttgaacatctggtcttgctgggtatttgaaactaacattacgaagctcaatgtctcctttaacattatccaacactcttcctgattccacacttgggtcaatctttgattccctgtccattattgcgaaaatcgaggcagcagctacatcggctttgctggaatctggagataacgaactcgattgagatatcgccattgccgccattgtcaaagcaaagaaaacctgcattgttaaacatgacaagggatcaagaaactctcaagggaaggcatttatcatcaacatgttgtgtgttttgtttccgtaccctgaaaacagagtcgaaggttgttttgccatcatcgacaaggcgtgctccaacgtagaaactggcagcgtaagaagagaagaggacgaagaaagagaagccgaaaccaataccactgactatgccttgacgaatcccattcttcattggaccttcacatttctttgagtacatgttcatcaccttgtcttctgcacagaatgaagcaacggttcttatgctcccta

SEQ ID NO: 23098 - DNA, 458 bp, Arabidopsis thaliana landsberg
  unsure (1)..(458): unsure at all n locations
ctgttctgtttaatctttaatagggtttgttttggattatgtttatttttgatggtttgaagtttaagaagatggagaacggtaaacgtcgtcggcgtttgattccagtcatcgccggagagaacaaggcccaatcgtcgtttacaatcaccgttcttccttgttcaattccattagggctagggatgatgcagtaacaccaatctcataaagtcatagtcctctctttcttgacctgtaacggtaagtaatttccaaaatcctctatgcttttctctttttttttttttgtctactgtctctaaatttagccctaaaccaaatattcactcctttcttcgttggattcaatttcagcctattgaaagttatcgcctactagatttgtggacaaacactgttcatcaacaattcaacacttattccatgtgagntattattagtattactattattat

SEQ ID NO: 23099 - DNA, 808 bp, Arabidopsis thaliana landsberg
ccatgtatttatcgagagaccctctaagtatatcaaactacatgtctggctagataacaattttgtacccatttaatcattttttctaattttaaccttttgcttcctctgtttttttcaacgtcctttttctgtatttttgcatttgtcattcaatagagacctaaattagattccaaaaatgagaaaaaaaagaaaagagaagtgtcatttcaaagatacagagagttttacaaaaatggaggaaatcagatatttgtccttaatagcactaatcaaactgaaaaataaagtcaagaataaaaaacagagtcattgcataatgcaaaaactttgttagaagacttgtccgttctaaactttgaagtaactggtctaatatagagatctttaaagagtggtttgaagccatattttgatgaatcgatcaaacgggaatcgtcttcagtcctgcggcgattggcatacccaagaaacctatgaagatactgaagatccattgtgttattgtgagtggtgttgtgcttgcaaatgtgcccaacaactcgatgattatgatctgaaagaaaaccgttgcaccgatcacaaccacaaagacgtagttgtccagtattcctttgaaaacatcgatctcttccatctctcgcgagcttatctcgttaaacacctggatggaattttaagaaccaaagtcatgtcaagaatctatctttatagctcgagtattgatatcatgtttttgttgtactatatacctgaccgaagacgaagcagttgaagataagaaggtttaaccatgagagttgag

SEQ ID NO: 23100 - DNA, 513 bp, Arabidopsis thaliana landsberg
acgacgtcgttttgtgttttattataaaaaaaaaattcttttcatttgaaatgattttaaggccacctcgttttgtgtttgagcgcattgttttggttctcaataatggtggcttaatgccatagtctgagtttgaacacttaacccaagagctgaagaagctagaggagaagttgatgtcttccaaagatgtttcagaggcgaatggatttgcaagagaatcaacaaagtctaacattcttcatttgtgggacaggaagtctacaccacccaaaataataaaccctaggattagaatttctgagatgtttaggcctctcttgaaccaagcaagggttaaggttggctctcatcttattgcttctttacacatatgaatcagagtcttttagattcaatggctttcatttatgtattgactctcgttgcattttgataatttcatttgacttgttatctagctcttacattttatgaaagaacatatacactttcttgtctgtaatttatatc

SEQ ID NO: 23101 - DNA, 2826 bp, Arabidopsis thaliana landsberg
  unsure (1)..(2826): unsure at all n locations
accacaatacgcaaacgcatcgagccagtgccttgaggaagcaaatacgcagtgtntacatcccaataccgccgattccagtnnnnnnnnnnnnnnnnnnnnnnnnactagtagatacttcacttgtagacgatgaggagaggaagacagcgacggtgccgaatcctcaccgttttccggctcagatgaagaacatttaatcggaatcgcaggaaatctccgatcagagacctaattcagaacatctgacttcaaatgaccgatcacacactactgtcactgaagaaaacacatgacaagaatttacctcgaatcgtctaggataagaagttaccgacggaggagaaacctcacggaagccgaaatgaaactgacaagacgacacagaaacaaacctcgccatcatcgtcgtcgaagaatcgctattccaccattgttaacttcatcatcttctctcctccgctccactatctcagccacttgtttcaatattgggcctaaacgaggcccaaatacgataatttggatccataattagtttatcacaattgggccttacggtcttcttatccgtccgagtcagcaagttatcctcttcaacacgactcacgaggcaccgagttggacttatcatgattcattatctacgcattgtttacattttggaatcgactttggtacataattgaatttatccatagaaatgatagagactcgaagatcggacataaaacttgctgacgtgacacccatacctttgtgtctgtatgtattatataaacgctatagaactaagagaagaagtatctaagtagcatcaaagcattctaaaagaagtttcaaagaagaagtgaaaatggaaaccactgcttttaacacaacatcacgaattggaaactggtcatcggctatttctccacctctacaaacatgtggatctttcaagtgccaattaccaacacgaagaggtgttattgtagctgatcttcgaaactcaaacttccgatggtaagcaatcaacgacgagaatcgccttctctatctgattttagattatgaataaatattaaatctgagtattaacttcttgctcaaggaggaaagcaacgacaacaagcagaggaaatgttgcagcagaggcagttaaaattcctacgtcagtaccagtaagagtggcgcgtgagctagctcaagcaggataccgctatctcgacgtgaggacaccagacgaattcagcatcggacatccgactagagccatcaacgtaccttacatgtacagagtcggatcaggttttcatcaccgaccttaaggttcctcttatgagaaagagtgaaaatgaaaaacaacttaaaactaacaccaagccataaccgttgcaggaatggttaagaacccgagttttctaagacaggtctcgtcccacttcaggaaacacgatgaaatcataatcgtaagtttcagttttgacattcagagactaaataaacccctatgaagacaatcccttgtttcacaaaatctctgatgcacgtaataaactacttctgcagggttgtgagagcggtcaaatgtcatttatggcctcaactgatcttctcactgctgtatgtgtgtaatatcacttcaatttatatagccgttatccggtttaggacaagcgggtttaatgtcgccacatgtacagggcttcacggcgatcacagacattgctggaggatacgtcgcttggacagagaatgagctgccggtagaagagtgaaaacaatcatagccatatcacctcctgtaattatcaataaattctgtagatgttctcaacgcaagtgattctgtatcaatcatcattattattctctaaaaaatagtttaactgtcaaatctatattgggtgaaaagctttaccgaacttcgaacaccacaaagtttacggaccaattaaggacggggatgcctacacacgtttagttttcgccgttttaaaattttaatacttaaactaatttttaaaagtaataattaacatggtcttagttcaaaattattaattatgtacttaaagtttatcgtctctcatctctttgtctctcgtagttggattctttgatcaaaagttgatcgtctctcatctctttgtctctcgtagttggattctttgattgggggttttctttctcgtagatggattctttgattgggatatcttcctcatgttagagttcctcctaggtcgagatcggaatctcaaaaaccttgttaggtgcgaggagaagatgtgggagaagtaattcaattaatcacgaatcatcattcatcggcgatcagctattaaaaagagatttttgttgtcgtttctcgaagaagaaagaggatgaatagagaattttgatttctcaagaatgatgaagaagaagaagaagagcgtgacatatttttataagcaaacaaggttctcttgggttatttcctttttttcttaagcagagtatctttgcttcacttaatgatgatttgatattaatctagccgttgggatttttcactatttgtaatcaaaagagatctaaattagatcctatttccatttactaatctcaatctaaccaataaggaaatttcgattggttgtttccttttttcgatgactttggtttgttttccattcgttaatataacgtttacaaagaatcatcttttttttgctaaaaaaaattaatatcaaaagataaggagaacttggtgaatgatgaccaattaataaggtggagattcttcaactccattactagttttattctaattggtttgtatacaaaacagatatg

SEQ ID NO: 23102 - DNA, 2548 bp, Arabidopsis thaliana landsberg
atgtaataattttattttcgtgttactttttttgttaattttttttttttttacgtaacggaaatgtagtaatcggatatgtgtacgattagagttgaaaagtaggatgatatgactgcgttaatcgtaataatcaaactattcacttaataaattttgtttccatgtataatattgtaaattcgtttaggatgatatgactgcgttaatcgtaataatcaaacttattcacttaaattttgcttccatgtataatattgaaaattcgtttgggatgacgtaagtgaatatgtgcgttacaaaaagtttaatgcggatgaaagtttgagaaaaaaaaaagttgaccaaagaaaaatatctctaactatccgaataggataaccaaaaaccagtacatatgttattaaactggataagacctaacataagtcctaagaaatatctcgtggtgattacattcgcatctaatactaatcaaattttgggctcaatccaactttccggccatggctataaatttctcatatcttcgagttaacaatatcataaattcttttttgactgttttgtttatatgtagaaaagaaaacattgtgaaaagtattatacataataccacacaattttctattcatcgatctgtagttagtttttttttttttttttaatcaccaaatcatcgaattttctatttatagctgtttcatcaacttgcaattaagaaatttcatacagtccactaattatccttaatctaatactatgagtgggcttgagatccattgatcattaacttgtcatgggccttgtagctgccactagttttaaaaagaacatgttttccccttaaatgtgcctttttcttgataataatatacaggcagttacgttatggttttagtactacattatcatatagtacaaaaatatgaagatgcttaatattgttctataaaactataaaaggcatctaacaaacaggtttagcgtaagatgtactttcatctaacctatacatctactgaatctagatctaccaccaactctaaacgcgtgccttaccaaaacttggaaaattttcaattttgattatcatgtgggtgaaaaacatcaaaagattatgttgatgtattatctaaagtcattcacaattaatcaagaattgtacttgttgtgagactgagagtagctttcacttgtcaatgagtaggtacctattcatttggccaataacaaaatgacaacaaaaatttacctaaaacttaaataatttagtgatttggtcagtaagcctaattaaaccctcaagcagtttacatcacaatcaagcttgaagcttttatttgatttggccaatgaaggagtttataaccctaaagcagttcacatcacaacaattctcatttgactcgttttctgattaatttggccaatgacgagtcatcttgggcttcacatttggacattgatgttgtgtccatattacgacacacctttatcattttccatttcaaaaaaagaaaacaaaaacacccatgcttttttttaaaacacacttaagaaacaaaaatcaaattaaatctttaacccatgatatctactaccaacaactaacaatattttacatcaagtgtgtcgtcaatagtagcactattatctaatttagatctagataaagccagataacactcttttgaactttccatgcttgaatatttcttctataatatcatcattaagaaatcttctcccattctttggcttcttttagaaaagatactctattagattttttagcgagtgaaagaagaataaaagatggaccagtcaacaaatggagacgaacaagtctttatacattgttgataatttgcgtttgcgaaggatgtggtcacaagaaaagaaagtattccgtccctctctctagctaatggcgtgtgatgtgactactacactctctcttctatatatgtttattttttccagaaatgtctgtttgaatataaactttttaagtgaaattgttgggcacaacagaaaactttaacaccaaaaaaaacgcgacataacatgttgcattgttgattagttcctttctactagagattggcattctcagattccgaacggtgactgcgttttgcagtgcgggaaaaatacggtacggtttaaatattaacaaaaatacatagatacatatgtatatatagagattttgatactgttacatcactgttacagtacggttttgggtgcggttttggtcaccgttcacagtttctctttattcagattagatttctgtaggtaattttgattaaaatcttttggtgataacgcagtcttttcgtctggactggacccacgcgaggacccaaaatttgaccaatatgcgatccaataaacaaaaaaatggtaatttaaaatgaaataatccacatgtatcatgtcaaatgtattattttacattcacaattaaatacaggtcagcgaagtaattgttttgacaataaaaatggtaagaatactgggaacgtcatctaacatc

SEQ ID NO: 23103 - DNA, 1009 bp, Arabidopsis thaliana landsberg
  unsure (1)..(1009): unsure at all n locations
gcaggtcgactctagaggatccctctgtgttggtgactaatcatgtcatgttcaaataattaatcgtggttgtgaataaactagttctgtggaaaagatcagtgttaaatggacttttcattgtgattccttatttttgaagtctataaagtttgactctgtttgttcacccattggcttgaggaaaaaatatgtcttctttttgatatgcgtgagttcctttgtgattattataagctgtgatttagaatgagtatcaaacgtgtcttcctcatttttctaatctgttataagcaatcaatacaaatataggatttgtttactcttagggtcaactttatggtgacttttatggttgtttatcaaaaaaataataattcctgtgatagcttggatcacgctctcaaatgatttcattcttataattaaatgttggtttatgtgttatataagggtctgttttgctcacttcttgtctaacacttgcttgtttggtctttgatgatctcaggttacaaggcaagtgttttgagaaagaagatggctaaagatgtaagtgtgttgggttttaacttagtgctctgttctgatcttagtggttttggtttcagtgggggtaatgcatcatttttagaattggtccgatgaggaaactcgctatttttttcaactctatgcggatgagagaagaaaaggaaatagaacaagtataggaatgaaccaaactgggaaagattgcatcatgaagaagtttgaagagagatttcagagaggttatcagaaatggaacccttttaagaataggtatgatgcatgtaagaaaaaaaaatgttatgaatgtaaatatatttaaattacattattttttattcaacatataattatacaaaattttaaaaataaaaaaaattaagtgaaaactaacgcagcggcgacaaaacgaacataatgacttgtggnagcggtagcggcagcggcaacggcagcgtcaactaaacaaacataaatc

SEQ ID NO: 23104 - DNA, 1000 bp, Arabidopsis thaliana landsberg
  unsure (1)..(1000): unsure at all n locations
aaaatcccttcttaaaattttaatatttacaaaaagtaattataaagtattttatattaatattttaaatttatttatagttttattttaaatataaaactaagtctgcgggtaagtccgcaaactcgtcggacttaccgggacatgcttggacatagtttctttaccctcggtcctagcggacaagcccatcttggtccatcaaaactaatgtctataacggccttcgtatttactatgctcaaatttgacacaattatgatgtcaagcgggcttctgacccacagactttggcccatatagtaccatgacgtggcgggtttggaaattatattacatgaccgtaaattaacgtaaaatagcgggccggcctgaaaggattacgttttagcggattcggcccgcgcattggggggtatgcccgtacaaatattcagtaaaaatgagtaaacaatttgtaaaaataaataattttatttaattatggtactataatatataaaatatgatataatagaaaattaattttttaaattgtaatatttacaaaatgtaattaaaaaaatattttaagttgaaaataatataaattaatatttataatatttttttattatcttttaaataataaaactaatctcgcaggcctgtccacgaacccgttgggtttagcgtggtgggcctggacattgtttctttgccttcatttttaacgggccgacccagttggaggtgggccaacccgtttgacagaactagacataatcagtgggttctgttacaatgtcattagaaaaaatgtaagcacaaatttaattctcctcattaagggttatatataaagtaatgttacttttgaatccaattgtgttaattgctaattatggatctaaaatacggggctataaaataatatctgttatttttaaataaaacacccnacacccttcggtgtgaatattttactattattaataatttgaaatcttgcgcccccaaa

SEQ ID NO: 23105 - DNA, 643 bp, Arabidopsis thaliana landsberg
  unsure (1)..(643): unsure at all n locations
aagaccatctcatgtttccattaattataacaaaattccttcattatcgcttttaatgcacgttatttaaaatgattataaaaactgaatatttggcaacccactaaaattaatatcgatttattagtaacaaataaatgtgtaaaaaaaggacgcaaacatgagacatcactatataatcaacaacaaaaagttctcaagaatattgtttcatgttggttgattttttttaagcgtcaattgcaaaactagccatatttgataacttaattaagaatatagcattatatacatataaattaagaaaataacatataagggttgggaaaagacaattttgatgtggaatagttaatgagagatgatttagtaacacttcatttagttttcatctatttgtatgtttttgttatatatcttttccaaaaaatagattctaattatgaaatttattagataaaaatttctgtttttttctacatacaacatagtttaaatttttcaaatcggatttgtatttataaaatagtaaaaaatgtttgtaagtaaatatatattattactattatgttgtataaaaatagatgttngactatactattttcataaatcattggaattcagttttaaattagtataaaac

SEQ ID NO: 23106 - DNA, 1011 bp, Arabidopsis thaliana landsberg
gcctagatagtataactaaaaatggacttggtgaaggagtcatacttgcaaacaagtatcaccaggctttgaaagcttttatttcaagaagcttccctgtcaatggtattatcgcttgcatgagtcataacacagatggtctctacaggtaagcatcgagacctacaatattgttctcactgttaatcaagaatcattgtaatcccttctgatctcttcttgtaatgatacttagcgcaaaaaagacagctgttctggcatagagatccggcttcacacacgatccacattgcttctgttgcatataacacacttttccttggagagtttatgcagccggactgggacatgtttcatatacgttaaattgattcaacatcaacaaaatttctgaacttgtgaatgaatctatttgtttctcactgcagagtttgcacgcagcagctcgagcagttggaggatgtgccatttatgtcaagtaatcataaggttcactaacattttacaaccaaagtatcatagtaaattgagctgcaagttaataaactctagacattgaaacttgttaaacagcgacaaaccgggacaacatgacttcaaccttttaagaaagctagtacttcaagacggttccatactctgaggaaagcttcctggaagaccaaacattatttgtttttgttcaagcaataattagtttcctcgtcacttgtacaatgagccgtaatagttgctttctcaagaaaaagtaaaattgagtattggaaaacagagttgatgtctgcagcatttataacttggaaaatgtaatatttttaaacggctatgattaagtatctcttgaccttcctcaagagaaaacaactattaaaccagttataaatactcgcacttagttaatcgccactctcatttcacaaacaaactttttaaaacctctaaaccaaatcgatatagtctttagattgacaatggcaccaaagcagttgaaaaaaatcgagaatccagtag

SEQ ID NO: 23107 - DNA, 858 bp, Arabidopsis thaliana landsberg
ctgcattctgatgatgtttgatccatcttgtaaacatggaatgaacatatctgcaatccccgacgttcgactttgatcaacaaaacctctccggacaaagttataacaagatggtcgaaagactcgaaacgtaatggtccatatgatgaatagtcatccggcgatgtgaagcttgcacattcctttggagaatcaccactagagaaatcaaaaacagtgatgtctagacttggactaagcacgtaaagcttgctttctctaaacaccatatccgagcacccttgattctttaattgaaacactttccaggtcttgttattatctcatttcttatgatacgcaaagaagctctcaaggttccacacaactaagtaatctcggcttctttcatcgacccacaaaaccgctttctctattctaattttggtgcttatacgagaagaataacttgtatagccttcacgataagtgaatgtcttcaagaaatcagactcaccaaccctctcaaacttcatctgccatccatcgattgcttccaaagtcggaagacaaatcctctctcgagtaaacagattcaaaagataaaaatcggttctatgatctaacatcaacaaccagctaccagaagtatccaaacaacgactccttggtaaatcaaaccctaggtctgttattacataggtttttgcatgaagaggatcaaacaatgaaacatggttgtcgtttgaaaagcggatggtccatggagttggattttgtataatgcataattccgaagaggaataccaatttaaagagatgtacctagctcgatgaaagtctataaagttcaagcgttctaagatcgatcgaatcaag

SEQ ID NO: 23108 - DNA, 1715 bp, Arabidopsis thaliana landsberg
tttaattgtagtaaaaataaatgaaaatacattaatacggagagaagagcttttttaacttgaggagcatgctacgtggcaaactataattaatctgtttaaattttttaacaattttttttttgccttttattctttttttattcttgtgttctgttatggatattattctgttggatctcgtttctaacgttatcaatctcaatagatgcatcatcgtatcatcaatcaacagaacaactgatcgttatttcaattttcttttttggaatatctattttaaaatatttcaaaataatgtatttttaatattttatgatttgcaataattattattaataaaataatagtaaaataatttcctttctttagagaatttgtgtaagagaaactattattggagaatgaaaaactaaaaagaaaatctaaaagctctcttataagtttttttaaaaatttaatttaaaaaaatgaagagaaccatagaaagagcttttccatcggagatgctcttacctatggaagctacaaagaataataaaacacatttatccctttattttgaataaagctatgccaataattaactacaaataaatgtcaacggttcatctggaagagctataagaaaaaaaaaattaaagaagtaaagaaaaaaaatctttgtcaataatcaatagacattaaagaagtgcaatagcttccttgatccttgtgaagttgtgatcctattttccacattagccctcttcttttcacatactctacttcaaaagagaaaaactaaaaagttgaagaagtaaatacgtgtatattaacatgtatgggatatgggaacaaatgccacatttacttttttatgtgacagagacaacaacatataaccaaatgtctttctcgttacagtccctcgatttcattttttttctatttaattttcccattcttgtaagagcaaccccaattggttcttaattttcaattttaacattattttaaattaaaatattatttttactaagttaagaaaagttaggaagaagctgaattaatttttattccaggtaagaactattggattcctaaaaaacaacaattcaaactatttcaaaacaatgtatacccactcaaaacacaacacatatactcttcttagttttaagaaaacatcttaactaagatgtttatcttagctaaggtttgttgtttcattaaatttaatcacttttattgctaagaatagagttgcttttatgtacctttaaattaaggaaaatgacaagtccaaagaagtagtgagaaagatttactacactaaaataaatatctaacaaaataccaaacagagagtttggtgagttaatatttttttacagcagttttatggaactttttgtttgttggttacaaacattgcttagtagaaaaaagcaaaagattcgaagaataactcaataacaacaaacgatccttgtttcttccctttctattgcagatattttttgctatttttagtcactacccatttcttaaaattcttttttttttttcattacacatttcttaaaattctaagcttcataaaattaaaattttcagatttttcttaaaagaaaattgcataaaaaccctagaatatttatagcttacaccaaaaaaatctaataatcagagaaaaacaaacggaacctcatgattatcttgttcacttctat

SEQ ID NO: 23109 - DNA, 575 bp, Arabidopsis thaliana landsberg
ttaaatggagtacttgtttgattgttaagtttataatactatgtgtatatgtattaaataagaaaggttgaatttgagggattaaagtaccaataaaaaaagttgaactcaaaaataaagttgctctatatatagagtcaatctgcagaaatctctgagtcaattataaagtagggttggagaagaatcttcaatttttactctaaaatagaatagggttggagatgccctaactctctatattaaattaccaaaacgggtaagatttgttattttttgtgtaggaagattgaaaaaaaaacttgaattaaattatatatatgattggattggatgattcaatctagattgcgcccacctatcctgaactattaagattgcatcgtactgcatttgactaatattttaggttttggggcaaattgggtactgacttccagttaacaaacaatgtactacttatctattaaatatttgttgaaacaaccatacggtaaaagggaattcataaaaaaaaagaaaatgaagtacatatgaaatcaaaatgaaacatctttttgtgtgaaatagatgat

SEQ ID NO: 23110 - DNA, 271 bp, Arabidopsis thaliana landsberg
gtctctttattgctactgtttctccagttataagctgaccttgtatgagttttacacagaagcattaaaccgtttttgttttgttaaagtatgactatatgatcacaagtcacaagacttagttaccttataaacttcaccaaatccaccatgaccaagcttgttactttctgagaacttatttgtcgctgcttcgattgcgctaaactggaattgcagtgtttctgttgacgtaataccatcttcatctacattaagaaaggaaaattct

SEQ ID NO: 23111 - DNA, 1650 bp, Arabidopsis thaliana landsberg
tcatatacacatgcttcatgctaaacttcaaccgcaaactatctatgtttttacaacaaataggacaacctattttaccctttaccttacaaccagttaagtttccataagccggaaggtcacttatagtccaaagaagcattgcctttagcgtgaatgtgcttttactgtaagcgtcataagtgacctctcccttcttccacaaatgattcaactcatcaataagaggttttaagtacacatcgatgctattaccaggctgttgtggaccaggaatgagcagtgtaagcattatgttctccttcttcatacataggtcaggaggcaagttatagttaactaaaagaaccggccaacaactgtactgtgtattcttcatattgaacggattgaagccatctgtagacagtccaagtcgcatgttccttgcttcagctgcaaatgttggatacttatcattcattttatccaaagtcacagaatccacaggatgacggagttttccatcactactcttgttagtgaaatgccaccttaagtccttcgccatttcagctgtcctgaacattctcataagtcgcaggataatcggaaagtaccgcagaaccttctgtgggacacctttctttactacaccactgtgagtattaatcttccaccgagaagctttgcatttgggacaattgtccagcttcttgtacttctttctgaataggcagcatacattcacacaagcatggatcttttcatatcccatgtcgaagctcttcaaaactttcttgacatcataaaatgatgtgtgcagcacattatctttaggcaacatatttggcaatgtctcaagcagctcattgaagctcttgtcagaccatccattacgtgttttaatcctaaagagagacacaatcgtcgagagcttgctgtggtttaaacaactcgggtataaaggggtttcagcatctgctagtttggctaggaattcatcttctctcctgtcctcgtcttctgctatctcagctaagtcacccaatggagtgtctactaagtcccgcttgctagccagctcttcatcaaaatattcagcagccttgtatagctcaagaatttcatcattcctctgatttgtggtacttacgccttcagctgaagccacagagtctccatgatgataccattcactttgcaacttgtatgcctcatccatccctttggttaccagatggacaaccacatcactgcttgactgccggtatacgttacgacactctttgcagggacatataatcatatcaatatctcctagagccgcaaccacatcacgtacaaaactccgagcacctctctcgtaattgggatcagctcttcaatgaataaagaaagccaaatagaagcctcttaaagtatccaaaacccatttgtaaacctaacctatattagataattccttacctgcatagctgcacccatgtcttgtccaacattatataagcctaaacctttttaacaccaattcaagccataaccgacattaaaaagaaagaaagcacattcactcacagctacatcttatgtgcaaacatttctaatataaacacaattttaaagacaaccaaagcaacgcaaataacggatgaatcacaatcacaattg

SEQ ID NO: 23112 - DNA, 593 bp, Arabidopsis thaliana landsberg
taccttcgatgtgttcgaaggctcctggcagatcttcagccgaagaataaattcttcactactggccccgactgaataagacaccttcttcagccgttgaacacattgattgctgaatttcaagcatttgttttgaaggtccatcaatgattttttcaaagctaaaccattctggatttcaacctcaagttttccattatgtttcagcttttcttgttcggaaccgagaagcttcgtattcagttctgttattttagcttcggcttctgatagtaaaccttcagttgtctggagttcgaactctttcttctcaaaggcagctgtttgatcttttattttattttctaaattttcaattataacctcgtgctttttgtcttccaaatcctgttgcatcctcaaagctttgcttaatagcatactatgtagacgaataaccttcgttacaaaacattttttgtgaaaataaaaagttagagggagattgttaccttgaaattggaatacacaaactaccgacgatgtgttgcgtcggtacggctaatatcggttcgacttcgggaaacgatctcttgatagagaccgataccttt

SEQ ID NO: 23113 - DNA, 324 bp, Arabidopsis thaliana landsberg
tccctcaaggtatcctcgatgatgttcctctaaaacttggtaaatgcctcatccttgctgattttgtggtcctagcatatgatgaagaacccaaggatcctctcatccttggtatagcttttctagctacaccatggtgcataggattgagtgtgaagaagagataaggatctccccttaacatatgcgatgtcgagatggagttcggcatggatggttcagaatttatagtgcatatcaggagtattcccaccaacaaagacacatcttctatggctgctaagatttcacctccaagctcgcagaatgaaagctgcaaggaac

SEQ ID NO: 23114 - DNA, 1410 bp, Arabidopsis thaliana landsberg
aaatccacattcgcagaatagaagagaccttgaccaactgttcccttcaagtagtagattatcttgtagaccgcttgtaaatgtggagctctaggtgcagatgtgaactgacagagtttatgaaccgcatatgtgatatcaggtcttgtgaatgtgagatacatgagcttaccaaccagctttctataatgttctgcatcatcgatcaactcaccatcttcttgagagaatttctgatttggttccataggaacaaaacttggcttgcatccaaggagaccagtttcagccaacaattcaagcgtgtattttctttggcagattgagataccatcagcatttctagcaatctctaggcctagaaaatatttgagagttcccaaatcccttagcttaaaggagcgctgcaaaccatttctcaacagttctgtctctctatcgcagctactagcaacgatatgctgatgctttctctctataaccgaattctgttctggtgtttcaggacatgagtggtatgctacaatcccttttctcctgtatagttcctcaaatttaagctctggagcattatcagatcggacgtctttgacttttgtttgatattgtgtctctaccatcgtgataaaacaagggaaaatggtgagaacatcacttttaaatttcatgagatagacccatgtcacacgtgtgtaatcatctactatggttaagaagtaatgatatctttcctgtgttggttcagaaaagggtccccagacatctatgtgcagcaaatcaaaaggtgctaagcaaatattgtgacgactagggtaagttaacttcttttgtttagcacgctgacaaatatcacaatgtaacaatcatttattcttggttttagaaatcccaagtacatctgtgagcaagtctatgcaatcaaaagatgtatgtccaagtcgttgatgccaaacagatgcatcaacaacagagtttgcaacaaaagaagtagatacagtgtcttcagatactgaatcttcaacgtccagaaggtatagatttccaactcttctacctcttccaatcgttgaccccttggtaagatcctgtaccacataacaattcgaatcaaacacaactctggcaccaatatctatggtcaatgcactaacactaaggagattcagtctgaactcaggaatctacagaacattcttcaatatcagatcatcatttacagcaatgttcccaacacctccaactctaatggtattgccgtttggcagattcacatgatgttgaactgaagtgtcaagattaatgaacatatctttgacatgacaaacatggtgtgtgccaccagaccccacaatccatgtactttgtgtcatttcagaaacaaagacagtgagaataccaacaaagctgata

SEQ ID NO: 23115 - DNA, 464 bp, Arabidopsis thaliana landsberg
gtttgattgagaagagaagctcactcggtctaagtgaccgtttgagagagggaaagggttgaaagagacccggtcttcgtgaccacctcaacgggggagtaggtttgcaagaaccgaacctcggtaaaacaaatcatcgtgtctcgctcttcattcgctcacgatttgttttgcgccctctctctcggactcgtttctatttctaacgctaacccgacatgtagttgtgcttaagtttataaatttcagattcgccctattcaccccccctctaggcgactttcacgaagtcttctactaactcatcaggtaattgggtgactatagctgcatgaacatgttccttctgactcaaggcatctgcaaccagatttgccttgcccagatgataatggatctccaaatcataatctttgatgagctctaaccaacaatgttgcctaaggttgagatctttccaggta

SEQ ID NO: 23116 - DNA, 754 bp, Arabidopsis thaliana landsberg
atgaaagagatattgccttccttgatgccgagatgttttttctttatgtatattcgatgataacgtcgtgtggcggccggaatctgaaatccgccggatatttcattcttatcgaataaacccataaagttaaaaacaatagagagcgatgaaaaatgcaaaatagggtttacaatttttatatgtaggtaatttagaaaaacaaaattctttttttttgggcaacataaaaaaattccttaattctgaagaagatataacgaataaggtacgtaatttgatgtataataaacgaaagcaaagtctttgaacgccgaaacagaggaattaacaagaaacagaatgaaagtgatgtagaagaaaaagaaagattactaaaattacatgatataggataatgtaaacaaataaacaatagtctaatgggttttggatttagccatcaacatgacaacatgcacgtgtacatatatgatgtagacttgaaagtccaaaaaaagactcttgacattactgaaatgaagcatcttaatttgaaatttattcttgttttctttcgttgaatggaatttgtttatggggttaggtaggactagaatagtacttcgaggttgattgatacttgatagggtacgtcaaataaaatttgagcatttggttagctgtatgagcagaaattatacaactttgtcttcacaatggagcatacatacaagatgagaaagtaacaaaacaagatagacattattatgtc

SEQ ID NO: 23117 - DNA, 502 bp, Arabidopsis thaliana landsberg
tttttctattggttattcattttcttgcactatgtttggaatctgatcagaatatatttctttcatcagtgaagcattcagcaaatatatttcactatcgcaaagaagaccagacctcatcaccaagaacgtgaataccaatacacgaacatcagtggatgagacaaacatcagtcaacagctaagtactaagaatgataaagaggagaacaaagatgagagtttggatgagtcttcaacggttaagcccattcatcatacaaggagacttagcgtacaagataggattaacctctttgagagcaaacaaaaggaaaactccaactctgcaggaaacaaaccggtggttgttgcgaaatccacagaattgaagagaccttcctctgatacctcatcaactctccctgcattccctgagaagtctgttttgagaagatggagtattgttagtgacatgagctttgatttacaatggaaaataagaatctgatagtggtagcaa

SEQ ID NO: 23118 - DNA, 1229 bp, Arabidopsis thaliana landsberg
gaggatccccacttttttatgaaaatgccaagaataataacattaaagagaagaaacaaactagggatacatcggccgacttatgttgaaaatactataggcctcataaacagaatgggccgtggctttaagcccagttaataactaatgaaactcgttcagctggggttgaacaagttcttgatgttggatgtggagttgctagctttgcagcttatcttcttcctttaggtataaagacaatgtattttacccctaaagatgttcatgagctctgccatagccaccaatgtcttttgatatggttcactgttcgagatgtagtcttgattggcatgaaaatggtacgactcttgtgttcttctttctgtttctaaatgccttgcttggttttgtatcaattggaactaaagacagtcatctgggcttgattctgcagatggtatcttgatattattattttgtttctaagatttgggaaattctttttttgttttgttttgttgtagagaggttggtccaggagcagtaaagacaaacataatgcacgagctccttcatatatatacaagccattgcattttgtggtctcaagattcttggactcatgcagtcttcggaggatgcagctaaatctgtcattgatgatgtagtagctccacctgtaagatctgctctttaggatttcttcatcttatctacataatgtggttgatctgctccattgtatcttcagtactttcccgtgaacaaaaaattgctaaagaacgttgggacacatcatgtcacttatttaacgaattgcagcaaactcacacttgaagatcaaagagcttctagtggttgcttgcttatgacataatcctagcatccaaactctatcaacttctggtttcttgtagtacttgtaaacaaacgcacacctgcttaagtagaataagggccaatgcttcaccactaaaaaaaagtttagttaaagttttgatttgatttattataatattttgtatattgattgatgttagaaattagtaagattcccatttagtgtatgccaattttttatgattatgaccaacctccattttctaacatattttatttagttagactttgccattcttctactcaatctcttgctcactattagtattactttttttttctattgcatgagataatttgtctgaatttagttagtaaaaacacttaccaaaatctagacgtta

SEQ ID NO: 23119 - DNA, 514 bp, Arabidopsis thaliana landsberg
atgaaaccaagaactatagagttaaacatcaatcccattgcaccagattggactccaagactgtatagtttcttcgatcgttcatttccatctgaatctccaccgaacacttcacgacccatccaatcagtatcgaacaaaagaaatgggaaccaagcgatccagtttaaggccgtgacgattagaagcatccacatgggacgtttcatgactttgaatgctccaaagatttcaccgaacaaaggaacgcttgaggtcttctcgtcgtcgtcggcatttcgcggcggcggagaccattgtttgtcattaacgtaccaaagagacgtgacggtgacgatgaggaggagagtgatggataagaagaaacaagtcttgagattggcgcaatagatatcgcaagcttttgtcattgtgaacggaaacatcttgtggaggttagtgtacgaaccagccgcataacccataacgtttccaaccgccataaaaacagagaaaaacgcgtttgcgactcgcg

SEQ ID NO: 23120 - DNA, 1819 bp, Arabidopsis thaliana landsberg
  unsure (1)..(1819): unsure at all n locations
ttcgaatgagctgtatgtattatatgagatcactttttttttctgttttgtggtttcgaattgncctaacggtctttttcaaaatcncgaaaataaccaacancttgattggtgtattttaaataatctatatggatttttttttttaatatggattttcgaaactataattcacctaggatttgtatttttgtattgtagtttcagaatttctacattaatcataaactgacaagatcctagacaagaaaacgagatcttatannnnnnnnnnnnnnnnnnnnnnnnnnnnnnnnnnnnnnnnnnnnnnnnnnnntaatcaacgtccaagtacggtgtacttattcaagtggctgaagaagcaattgtagcaaaacctgtcttggcaacaaatttggttcctgatttgatcattttgctcttcatacttgagtttcaaaatcagattcttactgagtagaacaaaacacaggttttgattgtatcgagcatttctcatgaatgtaccataacatgtaacacttttattgattggatcaatgtcatcacacaaaattagactttgagatatattacaagaaatcgaaaggtaactaaagtagaccaaacaacaaaccagattcatgtcaaaagtgctaagtacatacgattataatgatctgaaacaatagaaggaacaagttactaagaagaaagaggaacccaagtttctttagtttaactctttcaagaaattactagacaaaagaatcttcagaatctcctgaaaatcactgtgcgtgttaatgaaccaagttatagtcacaagactcacaacagacataagatacttagcagagacagagagcaagagaagagctactctgttccatggcaaagcaaaggactccacgacacctgaacgaccaaacactaatgttgtcgccttctttcaatccgttagcctcaacgacatcgttccacccacaaatcagattgtagttccagcttccttttcctgattccttcttcagctcccatcttttcaacatcacaccccactttacagaccgttgatccacgagaatcgctcccactccaatcttcttattgttgatgatgtcttcctttatgattctggactccacagacgtcaagaaatcgttttggagtaagttgttgaacggcattgagagacggttctgtgttgggtttatatcagtcacaaacagagtcttctcaaagatcagtttagcatctttggcttctttcatgtctctcatcaccttgacaagccacttaggcgtctctctcgccgtttgtgaaaaaggagcaacctttgctttcttgactccaccagtacgcttcctctgttccacagcacgtctcttgcggtttttgttctccgttaggcacaaagacagaggacatgggaaattagggtttggtgggtctttcgtctctgtcttctcggacccagccgtcttgcaatcaaagagtacgagtgaggaacaaggttcggaactagggttttgtagtgtctcgaaatcagcggcgatgaaacatgaagaagatagcaactgatgatggtttagtgtgtcttcgatctcagaatcagaagggaactggttaagatcgataagcgatgaagaagctgaagttaaaaaccactaagcttttgttgtctctttaccaaagacgatgttgtttttctcgggaagagacaaaagattctcttctgtgtttcttcttcttcttcagagacaatcttacgacgttgtttttcttcttcatataacatcacagccgtatcaaccagtacatagaaattcgaccacat

SEQ ID NO: 23121 - DNA, 1209 bp, Arabidopsis thaliana landsberg
cagaagtgctttctattggatattgataactctgggaagaaagttgcagtaagtcgggtgtcttcaactgatccatcaaagaaggtccatcacgtacctttaggcttccaacagctagcaaggcactgggtaagaggtttccaagtttgatggtgcacgagtgtggaggccaaattccgaagtagaattcatagctgatgcattaggaaccacagtggcttggcctaatgacaaacttgttttcatttgatctctctactggaacttgtgtactatagtacttagagctcaatgacttttataacttgttatgtcttagtgtgaagtcgttgtcagatgtaacttgttatatgatgttcttttcaagttaatgatcagtttcatcaaaagatttgttcattattaaaagcaggtttctatatttagcaattagagcgatccgaacaacagacatataacagcgatccgatcaatgagtgctataataaatactgctgtatatacagaatataataactcaaaagtagcgctattatatatttaataattgcacttaaataagcgctattgtaaatttttgtattatagcaaaacacaaaaccgttatctaaagtgtctgatctattatgacgggggtagatagagcgcttattaaaacgctatgaaaaaaataaatagcgtttatcggatgctatgaatactccaatttcctgtagtgtggatttccaaaattggtgagtactaactaaatcagcatccattttctttttaaaatttttattatagatttatagtaataccaaaaaaggaatatgaagaacaagaacatacgacgtttaacatcaaaagccgtttttatattctccaatacaaagatgtattcctaaagcttctcccctatatttttttaacaaatatttttccttttctacggctaaaaacaattgaacataaccaatgtttgtaatggttagatttagtcgaagcatgcgactagttttgggatggtatatattttgataaatatatttccgtaaacccaccatatgtataacgtttagacataaatcaacgtaaccaaatgacccaatcaaactcataatcgtaaagtctttggccctagaccgaatactagtgccgccatacaataacatttaaagtaatatggatagcgttcatctgatttgattatgtagagatattagatat

SEQ ID NO: 23122 - DNA, 274 bp, Arabidopsis thaliana landsberg
gaacaataaattatataagatatgttggctgaagagttcaactcggactaatatactaaagctttagaataataaagtcaagtaggaaatcataatgccaatcattcgtttcggaagtgctcggaagtttgataattatgtgattaaactcactcggactgatctgtgagagatctctccctctctcttatcgatttcattttttctttctttccaatataatcggtcatgacattgaatatccatatgtccatgtgatactatctggatgttg

SEQ ID NO: 23123 - DNA, 378 bp, Arabidopsis thaliana landsberg
taatgctacgactagcatgaggtcacgagtcacctgaagatcatcttggtacctggaatctcaagtcccaggcaagttgtgcccttgatcacttcttttacccactcatgttctaattaatcataatgatctgcataggttaattttgatgggatctaatacgttatcctagtttgactatccttataccttgttcaccactgaactttttgggtagttcttgctagtgctatatgtggacttggatatagagatacacattattcatgattagatttttgttatcagttgttatttactgtgcatgataagatcattatgttaactggagcatggagcgacaaccgggacaacagtgctacacaagggtttatggac

SEQ ID NO: 23124 - DNA, 619 bp, Arabidopsis thaliana landsberg
tcaaaacactaacagacgcaataaagagcgttcctgcaggaaacacaaagcgggtgatcataaagatggctcctggtgagtacagagagaaggtcactatcgacaggaacaaacccttcattacattgatgggacaacccaatgccatgcctgttatcacctacgacggtaccgccgccaagtatggaaccgttgatagtgcctctctcattatcttatccgactatttcatggtcgttaacatcgtcgttaaggtaagtgatcctactaatatattatacatatatatgagactagtcgactatttcatggtcgagtgatttatttttttgtatatgtagaacactgcaccggcaccagatggtaaaactaagggagcacaagccttatccatgagaatctccggaaactttgctgctttctacaactgcaaattctacggtttccaagatacaatctgtgatgataccggaaccatttcttcaaggattgttacgtcgaaggaacattcgatttcatcttcggaagtggaactctatgtacttggtacgtaacatctcatacatattttcttaatacataaagtgtgaaatctctacgcatgcttgaattcaaaagg

SEQ ID NO: 23125 - DNA, 560 bp, Arabidopsis thaliana landsberg
  unsure (1)..(560): unsure at all n locations
tagcccaacagtgtgagccctgttgactccgcactcgtatgggtttggatctactaccacttgtaacgccctcaccgcccctaccagtgggcccacaacttctctcgtgcgcttgggtccacccttgtttgtcggtcagtgggccacgtccatgaggctttaaagacttgttaccgaccctacaaatcaccatatgacctttctccatgctttgtcctcactcgcatggttccaccaattagttcccggaaggttacccatcttgaaactattatagcccaagcacgcttaattgttgagttttttcaaaacgtgtgaccaaaaatataagtgcactttggtgacataggtggtcaattcaattattttaaacctctctgcatgcaccttcatatnnnnnnnnnnnnnnnnnnnnnnnnnatttaacagcaatatgatattgcatatgatactgaaatacatgttgttactatttaactgagatccaagagcatcttttttaatgggtttaggtgaattataataaatcaaaataactaattatgtcaagaatcgagctc

SEQ ID NO: 23126 - DNA, 573 bp, Arabidopsis thaliana landsberg
  unsure (1)..(573): unsure at all n locations
atctcatctcttctccttcgtttattgggcagactttgctacggaccttgacctctacgtgaatttgaaggtaatgcgccaatacgtgacgtaaccggggattggaacgattcaccttgtcccctgattagaagaagaaaaagaagaaccaaaaatagtaccagagcaacttgtgaagttattttaaacatttttatattgccctcatcacgtacataaactaatgatatttataataaaggtagtgtgactagcaagaccgaaaaaaaaagacagaaaatgaaaactttttaaattattctatgtctccacgtctccacacttgccaagtagaggcactacttgacaaattgcattgggctaacaaggtctataacagagacattgtgagtggtaatggctagttcggaaagtattttccttgtaaccttctaatttcatttcatattattctaacaaattagctttagcctttaatatcctttggcagnttatatgtaagtgcttgatcgcattctcattttcctctctggaagagaatcttttaacaacaagccaaacaatagcaatccc

SEQ ID NO: 23127 - DNA, 496 bp, Arabidopsis thaliana landsberg
  unsure (1)..(496): unsure at all n locations
aaaatgtaaataaaataattataaaaaacaaagttttttaaactttataaggaaagaacaaatacatatcttatattaaaaaaagtttaatgtaaacaatataattataggaatgtaagtatatattcatatataatgcaaaatgtaaagaagataattatatgtatcttattaaataaaaatagaatcagttactaattcttatttgaaactactaattctaaaagaaaaaatataactttcttccttcaaaatttaaaaagaaatgaagaaattatacaatcttgttatataaaatacaataaatgaagaaattttacaatcgaatattaatcatagaaggaaaatgattttaaatattcacctctatataaacaaatcaatattctcttattttcaccaaacaaaaaaaaaaactctttaataacaccaccattgctttaacgtcattattgntaaaacattttttttgttacataattctcaaactgtacta

SEQ ID NO: 23128 - DNA, 1139 bp, Arabidopsis thaliana landsberg
aaaggagcaaccttataccaccattggccatcggaaacaacatcgtcaaaaacgttcgcaaccgaatcacccttcttcagaaacaaggaaacccaaaatatgatgatttgtttgtattttggctttccactaggttttaattggcatagctaggacaaagtatgagcctaacaactcaaacaagaagcacttaatgtaaccatggtttttttggtgaataaaattttgcattcattcaaaaaaaaaaaaaaaaacacaaaatctaaatttattcccatttgcatatatatttttcaaaaagatatttgattgtacactgtactaaaatattgattttatagtaactatgatagtgggaaatataaattcaatcgcatacaatattttttgacctcgatataattggtgatccaaacttaatgactagtctatacttctactatatatatatatatatatatatatatatatataaaatggcaataaattgtttttttttttttggggtataggggatctgaagtttgttgaccgaaaactaaagctaaccaaatagattatgacctgaaagctaattaatccatgcatacgacagagtttaactaatacaaaaaatttgttcacatttcgcttttgttataaatttttattgtgaaacacacacacacattatacacgcctttgaaattttgatttgtatgcataatgtattaaaaaaaaacattattatactgccattatagaaataataaattggtcgggtaaaacgtctctctactcaattgtgttttgtttatatcaatgacaaaaaagaatcaagaagaatccccataatgtgagtacgtaaaagattccacttaattaaaaaatgttggttgtacaactttacataattcaatggctaatcaataaaataatcagtagttaagaaggcaaattaaagaagtgttgaataaatccaagcaccggccatttattctcagcgtcggctaaagtgaaatgagggcacaccgtcagcatccatgtaacgcgaagcagaggaacaaccactcggaacttgtgttacgtgtgaggtcgcacgtgccgcaagtgtcggtggctgcacgttcaaaataatctgactgacccgaaagagggtg

SEQ ID NO: 23129 - DNA, 449 bp, Arabidopsis thaliana landsberg
agaaacaattcatgcatatctagtaagtatttatattggctcaattccaagcaacctttgcacttacattatgcaaactagttcaattatgcacttctatatttgctttggtttgtgttggcatcaatcaccaaaaagggggagattgaaagggaattaggcttacacctagttcctaaattattttggtggttgaattgcccaacacaaattgataaactaactagtttgctctagattatacgttctacaggtgccaaaggttcatctacaactatactaattcgactgtccggaataccgtagattattccggacaggagaagctttttggaaaaacaggccaagcgcggaccgtccgggctcttgcggcggaccgtccgcgacatcgggatacccctcggacagaaccaatgcaagaacacaagtttccactacagactgtccgg

SEQ ID NO: 23130 - DNA, 603 bp, Arabidopsis thaliana landsberg
  unsure (1)..(603): unsure at all n locations
tgacccccggtgcacttctgccttggcggcctccgtcttctcatcggacatcttgcgacgcgctgctttttcggccgtaccgaagggtacgannnnnnnnnnnnnnnnnnnnnnnnnnnnnnnnnnnnnnnnnnnnnngatggccgaccaggcgaagacatctttgttcttggccaggcagcagaggagcttctcttcttcatgcgaagtaaggtcttcgctgataatgactgtctgcctgggcatggcctggtcgagggggacaatcttggtcctgtcgttgctctgcagctgggccttgtcgtgttgcttattggttgggctggcaggcgcggggatctcgcgttgggccgtgacgannnnnnnnnnnnnnnnnnnnnnnnnnnnnnnnnnnnnnnnnnnnnnnnnnnnnnnnnnnngccgaagactgtgatgacgcctaacggacctggtatcttcatgcataggtacagtccgtggatggcagcttcgaacttattgatggagcccgacccatgatggcgttgtatggatatacatgtcgacaatatcgaaggtgacttgctcgcttcgggcaattgggtctacaccgaagagaggggc

SEQ ID NO: 23131 - DNA, 1153 bp, Arabidopsis thaliana landsberg
tcgggttagctctcttgggtgccatcgtgggtggttttttcgtagcacgaacggtgggcgccaaatgttggaacttgctctcagtcgcaaggaagccaacaagagtgaacagtgttgataacagggttacatgctggaaggcaatagctctgttaaaaactgccctcccacgggcactgtacaggggtatttataggtacctgggcgcccagccgttgttgctaaggacgcatgtgccctcagctacctaggttatccccagaatattcccataaagcggggttacagactgtaattacagggatgcctttacaaattaggcccgtaacacgcggcggccaccagggcccgttacaatgggccggatcgcacgtgggcctctgagctggacgaggccgcactgtgggatgacttcgtcgccggtcttcgtctggtgccgatcaagcgaagtgtgtccctgcctgttttgtctgttagaccagcggctgcagcgaagacttcgagcgaagggtggcgtctttgccttcgccccaacagctgacaatgaatccgagcaatttccttgctggcactccaaagacacatttttctggattgagcttccaccggtatcgcctcagactgttgaagaccagctgcaaatcttcaatgaagttttctgagttttctgtcttgatcactacatcatcaacataagcttctacccgcttgccccaatgattggctaagcatgtttgaatggctctctggtaggttgctctagcgttcttgaggccgaacgacatggaggtatagcagaaggctccaaacggggtaatgaatgttgtttttcctcgtcttcttttgccaagctgatttgatggtacccgaagtagcaatccaagaaggacaacacagaacacctggcggttgagtctaccacctggtctattctaggaagttcgaagggatcctttggacagtgcttgttgagatcctatagtcgacgcacatgcatcaatccactttattctttttgagtacaagaacaggatttgctaaccacttaggatgcagtacttctctaatgaaccctgctgtgactaagcgagctagctcgacacgaatagcttctctcttgtcgggcgtgaaacgatgcaacttttgtcgtatc

SEQ ID NO: 23132 - DNA, 619 bp, Arabidopsis thaliana landsberg
aagggccatcaggaaagggcattgttgcaaaaggttattacaaaaatggcatttttgcaaatctcccttttgattgttatatctatgatttcacctgtagaatatcatcccgtattaatatcgatccaaatcattctgaccatataaccccgtcctatgaaattaaacattattttgtcttagttttatataaacttcaaatatttataataagagaaccaacgaatgttactgtaaatgataaccaaaacatagaacaaatagtttggaaatttaaaacgtgttcacctaaccggcgaagactcgcaactccatcaaaaaatttgccacaaaataagttatcgtcgcaagtgcgttgcaatttgcaggggaactcagtttcccgcaaaccctcgcaaatttgcgacgtttttgcagggaatcatgacttccacgtagtttactcgcaattgtcttgcaaaaggttatgttccctcggagagatctatttttcggcgaagaagaggtttgtcggagagatctattcgtcggcgaagaagaggtttgtcggagagatctattcgtcggcgaagaagaggtttgtcggagagaacaattcgggggatcctctagagtcgac

SEQ ID NO: 23133 - DNA, 1284 bp, Arabidopsis thaliana landsberg
tccgattctttggtcataatcacttgttgagtgataaactttgtggtttttccaatggtgaccacaacatgattcctgaagaatgttctagcgagacgctccacactaggatgcatagtggcactgaacatatacgtagttctgtaaattttcttttcctcaagctcttcatattccttctcggttttcaaattagtcgaagacattgcatctaatacttctgaaacctgtggctcaaaacccatgtcaatcatcctatcagcttcatcaagaactaaatagttacattggttcaagaccacgtaccttctctcaaggcaatctagcaatcgaccaagggtagcaatcacaatctcacatccttgtgataacttaaagacttgtttctcaattgactccccaccagtgatagagatcgccttaaaccccaagtaacgcgaaaacttaaccatctcttcttctatctgatgtgcaagctcccgtgtaggaaccataacaagagcgtaaggaccttctgtctgattctcttccctcattggtggcaacctagatatgtaagccaacattggcaaaaaaaaagccgcggttttgccagaacccgtagctgaaataccgataacatcacgctgttcaagtcctaaaggtatagctgccatttgaataggtttaggtttgtcatatcctgctctttttactgctttcattagctcataactaagcttactctcttcgcaagtcctcatcggatgaggaatctttgatcctttgtcagaaatattgaaatcttccttgaaaatacgccaatctctttcattcatcttctctcacttcttctcactccaatgcttatcttcttcctcacgcttctctctctcgtgcttacccgtcataagttttctctgctcacggcgatctattcccgcgcgacaccctctcccaaacaaaggctgagcttcatgagggttttggtaaagaacattcatctctccactcgaagtatcttcagtattctcccaatcgaaacgaaaattcttgctcggcttcatgatgactctcttgttaggtttcgttgttcctaagtattgctctttcattgcgttaatctatttctcacgctttaccatctctaatttcttaaccctagctttaacgtcacgttcacgaaactctcgatcgctctctctgtttcggtcatggtcgtggcttcgatgtcgttctcgtttcacatctcgggaacggtttcatcgccattatcgcagttggagcgagagatctgaacgatgc

SEQ ID NO: 23134 - DNA, 572 bp, Arabidopsis thaliana landsberg
gaaattgcacatggtaaagcgattcaataatattatggaaattaaatatattgaacttattttggatataatactgcattgtgatacggaaatacatttgtgggttttgttcatatatatatagccgttatcattgccattatgtaacaacgactattgagttatacatatagttttagtttagactttagattaattttcaggttcagttgaccggttaagttagatacttgtatataaagaacatattgtactagataaggacccgtacgatggacgggtttattttcttataactaaaatcaaatttaataaaatataataattaacaatgttgtaagtataaattatctttcaaaagtaaagttttttttttttaatgttgtattgtttccttcaccactaaaattgttgaataaaaaatgatttgaatgaaaaatatagcaattgctcaaattatttgaatgaaaagtatatcaaatagcaataactcttgatatacttatatgaaaaactaaaattaaaattattcatcataaagttagcgaatgatttcaaaatggttttaaatt

SEQ ID NO: 23135 - DNA, 528 bp, Arabidopsis thaliana landsberg
  unsure (1)..(528): unsure at all n locations
cattttttattttattattacattaacgattataagcgggagcgtgaggcgataattataaagtatatagcaaaacttatctctagaataatccgtgagtgtgatgtgtgatcggaaaacgtaaacgttagaaaaagggagacaatgtttatctagacaagtgatcggagatcagagataacgtccgctaatgattttttattcagtcctcttctacaaacctcgaagacggtggttttctatcgatgggaagagtgaagctgtaagtccgagacatcgtcaaagaaagaatatggcattgatttaggaactcatggcttagtcttagaactttgtttactagatctggtagggtttggtcagattttcttttagttcaagcggctagctaacgtgttgtgaacaattaggttttaaggaattgctttctctgttactaatctattcactacgttgatgacgtgagtctaanatatttgaagattatatgaaaagaaatactgattgagaagataacattcaaaaccc

SEQ ID NO: 23136 - DNA, 574 bp, Arabidopsis thaliana landsberg
tgatgagcaaaagaagaagagaagacgcctccggcatgtatccagctttgatgaggacgtcggtaccttagctcctgctgctgaagaagtgcctgcaactggccttgctgacacttatcccaatgggtgtgctccatctgctgctgaccccaatgggggtgctgcttgcgttgttactgtggaagatgaggaggaagaaaatgaagctccattaactcggaaaaacagtcggcagttcatcgccagcggcggaagtagtggagttccttctcctgcattgtctgcccttattggtctgcaagaactgtccctggccaactttgatcaaactctagaggatatggtcccggaggacttgttgtcagagcctgtggatgatgatgcaacagaggcttgtgctgccgtgcccgatgctgggttgaggtcatcccgtgcctcgtcgaccttagagcatgatctcgagggtcgggatgctgacttggattgttctagcccatggaagtagctgaaaaccggtcaaccttagaggtggttcgacagagagcttggacccttgaatggtgctgcacgtgcc

SEQ ID NO: 23137 - DNA, 1312 bp, Arabidopsis thaliana landsberg
aggaccgctaacctagagtagaatggtcgttctaaggattatagacccctattcctaccttgactttggtatcccttcaaaagttggtcatatcgaccaaacctatgttttactatatattataccttgctgaaaattgtgttttattctaaaccttcatttatttatggttaattacttgctggccatattagttttgttctcactcttatgcttacggtgtcttttgtagatggctcgtcttagacacactgcatggaagtctgtcatccccttcttaccctctcatctcgctgagcgtccgcttcgccatccagtgaccggtcagtctagccatttggagaggctacaccaccacctgcatgaggagcaggaacgtcgacgacaggagcaggagcaggagcagcatggctcttctttctcgcatcagcaggagatagagtctgtgaggagctgctcccccgagcttccgctggaggcgccccctgcaccaccactgagcgccccagccgctggagtagttactggaggagacccagacgacagaggtggcgacagcatcttgagcttcggcaccgacctttccgccgaccaggagttggaaggatgggttgctcgacccatcactcgcgacgctgctcgcgggtgtcacttccacgatgagctcgacaccctgctacgccaggcactcgaccagcgtacttggtccatcgagtatcgctgtgtggtcttccagcatagtcgcggggtctacccggaccgctgggaggcgacctgcttggtgcgccgtccggagaacagtctacggggtgcagaggtctgctcagagcactattccatctctgagcgggactcagctaaggcggccatgcaagatgctgcacggcgtgcgctttcgcactactgctcagtgctcggtggggtagctgacggtctcaacctaaagtattaccccgccgtccatctggtagcataggaggcgtggttgtctcacctgttggtgaggacaatcctaggttgagcagcacagtcaacctagcctccgtgctaaacacggagctggaccatgctttatatgagctgagtatgggttgaaactagcccaagtcggcccacgcacaggcgaaagcgcgcccgcggtgttagatttgcatggaggaccctggcgatttgaaaaacccttaaaaagcccgcagcactattgctttgtctcactgacattcgcatcgaggtccctcccctttctatttcttcacacgtcgagacccccgaccatggacggcagagcagtggctccggcgagcctgtaccg

SEQ ID NO: 23138 - DNA, 1092 bp, Arabidopsis thaliana landsberg
atgctctcccaggataagaggatccttgggttccttatcgtagtccaggaccatataatcagcagggattagggagttaccaaccttaacagaaacatcctcaagaattccttcagggatgcgtttggaacgatccacgaagaggagagtgattctagtcggcctgtagttagtcatgcctagtctctcatcaacaaacttaggcatgaggttgatactcgatcccagatcacataaagagctgctgaacctgcctgtggagatagagcaatcaagaacaaagctacctggctcagggagtttctcagtggtctgatcaggagtgatggtgcggaactactcaacaatgtccactctctgtgccttctctttcttaaccttaggcagcatgattgcactgatgtcccttgtcagcagcgaggcttcatctgatttaataccattgtcaacaagtcgcttgacatacctgttgagtggagcagaggatgtctccgaagtatccttaggaattgaggtgaggatcttttccatgatggttgtgcacttagcagcatgaatctcctgcttagaacgacgcttccttggataaggaacaagaggagtgtaggcagattcggtctgcatcgggattcttacctcatatggtgcagtccggacccagtgtcgatcgacaccttcgtatggaatcgtctcagaaaatagtgttccatagggtgtcgatcgacactggtaggtgtcggtcgacaccagctctgctgctgcgagcttcaactcgtcttcagtgtccaattcctcccattcatcatctccatctctgaccaagatgacattacagctcttcctagagtttgcatcagggtttcaaggaagaaaaccttcttgtcgcttgatggattgtgcagtttgagctacttgtacatctagcttcttcatgtgagagctcagattgtcgattttcccattaagatctatgtagacagcatcaaacttgccattaaactcaataacaagcatggattccattcggctctctaataagggtggaggggggcctggtaagttgaattaccataagtcctctagaagttgctc

SEQ ID NO: 23139 - DNA, 1055 bp, Arabidopsis thaliana landsberg
cattcatttattatatataccattttgtatggtgagattttatctcctcttaaataactaaaatagctattctgtttgagcgaaagagaatctataaaaatgtacaatgaggtcatgaactgatgatggaggtaataataacagcattgacaaaaaaaaatttgcacgaatcaaatattttcttaatttacatgcattactatgttccaaattactttgaggttctacgtatctacagaatgggaaaagaaagtcagattttgaatatgagcaaataaaaaatcagatattttgtagaattataaatattcaaataataattaaagtcaaacaatttggatcctcttcacgtcattctaaaaccctataaataagcacatcttctcttcatttcttttcatctctctcttcaaactcaatcaataatccttaaaacactaaagaaaataccaatggcttcaaagaactcagcctctcttgctcttttctttgccctcaacatcctttttttcaccttaaccgctggtactaattgtagatgcaacccgagtcctaagcctaggccgctcccaaatcctaaggtcccaagtcctaaggtcccaactccttcggtcccaagtccatatgttccaactccttcggtcccaagtccttccgtaccaactccttcggtcccaagtccttccgtaccaagtcctaaccctacgccagtcattcctccgagaacccctggttcatccggaaactgtcctatcgatgctctcagactcggtgtatgtgcgaatgtgctaagcggtctacttaacgtgcagttgggacagccatcacctcaaccatgctgctcactcattcaaggtttggttgaccttgacgctgcggtttgcctatgcactgctcttagggctaacgttcttggcatcaagcttaacgttcctatatcactcagtgttcttctcaacgtgtgcaacagaaggcttcagctaatttccaatgtgcttgagggatataattaacatacgagcacacagttacatcttaaataacacagtttgaat

SEQ ID NO: 23140 - DNA, 2962 bp, Arabidopsis thaliana landsberg
  unsure (1)..(2962): unsure at all n locations
caggattactattgccttattccaatgggtatgacttcagaaaatgtatcccaccgatttaatgttttaaggtaggagcaggaccaacctgctggatgtgagctatacattcttaggtctaatgcatgtattacattttgccctacataccttagttgatcgaggcagatgtgtgagatgagtctcacagnnnnnnnnnnnnnnnnnnngcttacggaaagcataaggatgagataaccccagtgaaaaccaaggtacatgctggatttcaccttgcaacacctgacaacatgctatattctgtaggatgcatgaagtgctatctacccaatgaaatgaatattgatattacatttcagattggagacccaaagacaggtgatgagaaacccataacagtttctgtggatgatgggattcgacctaacacaaccctttccggacttgcaaagctgaagccagtgtttaaggaagacggaaccacaactgctggtactttccccagattaattggtcattttcagagaaaaatgtttgtttgatccatctttttcccaaatcccttgtttcctttgtgtcaaacagggaattctagccaattaagtgacggtgctggagctgttctccttatgaggagaaatgtcgcaatgcagaaaggccttcccattcttggtgtattcaggtgggcttgatagttgatactctatattgacctttctttgcttcatttagtaacagcactcttggacacattacaggacattttctgcagttggtgtggacccagccatcatgggggttgggccagccgttgccattcctgctgcagtcaaggcagctggtttagaactcaatgacgtcgacttgtttgagattaacgaggtttaagataatagaacaactcttcttcctttacatttactccagctcatagtctattacttataggccttatattctttgtctaaaatcctactgtgtgttcaggcatttgcatctcagtttgtttattgtcggaacaagctcgggctagacgcggaaaagatcaatgtcaatggaggagccatagccattggacatcccttgggcgctacaggtatgcttcctctttgttcacatatcattaatttccttcctcatctaacaactacacattctcaggagccagatgcgttgcgacgctgctgcatgagatgaaacgacgtggtaaagactgtcgttttggcgtagtgtcaatgtgtataggtatgtaatatgttcactctcactctccttttgactcccactctctcgtacacactaacactctcactgtgactgggaaaccgcacaggttcgggaatgggagcagccgctgtgtttgagagaggaggcggtgtggatgagctctgtgatgtccggaaagtctaatgacaataaggccttttgaccaaggaccctagctaaggaccaaattagaacacagtactacaaataaacattatcacaaataaatgcgttctagatgaataaatcataacgatagtacaatacatgagggaaaacttcttgttattttttaactctcttttgttatatggttggaatatatacagatactctttgagaacatatcataatctatttggtttgtcatatgtatgtacacaattgtagaactatattattgaatcacgttgcatagtaatgattaaatcaaaaaggaaatgtagattacaagtgtcttttatcgaaacgaagaatcaattattaacccttgtgacaatatcacaaaaaggggtggtggcgcagttggctagcgcgtaggtctcatagctacagagtgatcctgaggtcgagagttcgagcctctctcaccccaaattctttttatttctcaaactgattttggagttcgaccaattcttctactacatagtctacattcaaatgcattgaaagataaagatattgctgatagaatgcaatgcaactacactagtcattagaaagtttatccctcgaagatatatcaagcatggggtttaggtttactgtcaatgacatatatgttgtattgtgtaaaatatatagtaaacaagatttccaacgaaaaaaacagtgggtatttacacaattcattttctctcttacttggcttttcttagcatatgcaaacattgtcataaatcagattaaagcttagtatgtaactactagtctactacgcaccaatctaagactggacttcgttgcagaatcatagtagaaactcccgcattctaacgggtctcttcacagcatttgtgaaaccctgtacgtataaagcatacacataacatcagtgtcaatatttcgaatttggccttaagtttgaatctcataaggtttgtatatagttatcttagaatcatcctttagaggagcttttggttggttgctatatcccggaggttgtgacatacctcgttaaacttgaagagaagaggacgtgaatctctttttgcagttgctcgattttgtacatcctctggatcttcataatctttccttgacttcctaaacctgtttttaccagacaaaatgcaattagtcatgatttctgtcactgagctgtctggttgaaattaattccgatgaggcaagtcatccaccatttctatgggtgataatagcttgggatataatgaagttctagttgagaaaaatgacatccaatcctccaattacctgtcgaagaaattaagggcgttgcgagatgcctttttcacatcactagaattaggttttgatgttgtcgcagtcccaactgaaaccgacggaggtttacaggtaactggggttctttgactttcatttgctgcagcattggttttcttcgctaagtcttgatttattttcttaatttcgggtttgttcaagatcccggactttcctccacttgcttgcagtatcttttgcttctcaacctcagtttttaaca

SEQ ID NO: 23141 - DNA, 872 bp, Arabidopsis thaliana landsberg
  unsure (1)..(872): unsure at all n locations
caagaggctcgaagccagaagaggaaagccaccagtccaatactctaggaggaggagttggaccaatagataagggacatggagatcatccatcagcaagtacaaagaaagaaggagatggcgcgactggttgatcttcaaaggaagatcgacgaagccactgaagaagtgcgtcatcttgttcaagatgaacaagatcgaaggccccaacacagggagcttcgtcaagaagacttattcaacgaggatgcatggtatgatgattttaatcatgatgcctttacttttgatgatgcttctcccttggtagtagaactgcaggctaccccatggcccccatcatacaagccacctcagctccccatgtatgatgggcactcagatctaaagccgtttctgatgagctacgaagcaaccatatcttcgtatgggggcaatactgcagtcatggtgaagtcttcgtcatggcagtccagaatgtacccaaacatggtactcttctcttcggccagggacaatcacgtcatagaagaagcttaaggacatgctggtcacccgttttcaaggatttcagacgaagccagtcactgctcaggcctttttctagtgcactcaagaccatgaggagtaccttcaggcatatgtccgaaggttcttgcgcctgagagcacaagcgcctacgatgcccaatgaaatcgtcattaaagccatgatcaaaggtcttcggctagggcctacggcccaatacttcgctaggaaaccccccagactctggagaagctgcttcagtggatgagtacatccgggccgacaatgacttccgccaaagaagggagggaagctacaaattntatgagatgactaggggcttc

SEQ ID NO: 23142 - DNA, 3382 bp, Arabidopsis thaliana landsberg
  unsure (1)..(3382): unsure at all n locations
tcattcgaaccacgagcattttgatctatacttaaaaggcagcatgtgttaaaacattgtacagaccacagtagttaactagatgtcaactccaagacaaattcacgtttgtgttactggtaaaaataaaatgcctcgaatactgatgataaaaatatttcaacttcatcacttggttggtataaaactagccacataccaggttcatgtgagttctctgtgatttcttctatatgatagtaggtttttacggtcaattaatcctaaaatactatcctatcgttgtagtattttaggtgtcaatccaaaagggtgtgatgtagacagatgagatatgatcagaagttgctaaatcaagccaagcagaatttgattggttatctaacagtcctagtgttgatgcaaaaaacagtaaaaagtcacagaaatgactgatatactcgattgcagggtcgactgccgtaagggaccctgttagaggtgtcagacgggccggcccgcgcccatctagcccgccccgcagtgggctttctttttcgggccgcggcgggttggcccgtttaggaccgcggataaaattatcagtgtccaagcccggcccgcaaagcccagcggatatacgggtcagcccgtgggcatttctctgctacgcatcaaggatttttgagctgtggcattgtctgtacaaggcaatatctcgtccagagccgtattgcttgatggtctctcaacccattcgctcattgccacacatgtgtctgcagtacaaatcgaagaaactgcaggagaagaaatgataacaagatcactaaggtcaatacattagttgatagttgagaaacatgtannnnnnnnnnnnnnnnnnnnnnagaccaagaaaagtcaccacaagcatgacgattgaaactacgataagcgccactctcctgcgagtacagaaatgactattatacatttgtttttcaaaatccaaagattctgtaacagatagactgttaggaggagtttgttacacagaatcaaggaaatgtcttatgtgattggagttactagtcgatttctcagtgatagtagctacagaagaatccagtttcactccgatctgatcgatttcagtttgtacatttgcaggtaaaagaacctgaagaactgcagcctgcttggctgaagcaagataatctgagatagctctaagctgcgaaatcgtgctatctgcttgactcatgacatactctaatgtctctgtcgtgcttttattataccttatctgacccgagtatagcagaacacaaccgattctacataataagaactcaaaatgctaagcagagaaaacaacaaagccaaatcataacttgtaatattttctcttaactcacattgcaataacagtgaagatgaggaggaagatgagggagacaacataagcaactttagagtacccaacagaattggttctatggcaaatgtgacacatacagatgactaataaacaaatgccaaacccaagaaaccaaacagcagcaagaacaaagagaggaacagctgtatagctnnnnnnnnnnnnnnnnnnaacacacaaaacacacaaaacacataatcaacaaatcatagcaacacacaaagaaaaaaacaacaatctaattgaagtggaaagaatcttacagcccagtaatgttggttgctgatattccatcctccagtatatttctcaaaaccattgagaggatcttttctatatgttctttgagcagctaaagctactgaagcaacttcaattacttgagggttgttgaaacctgcaggtcctaataatggtgcctctgctactataaatttcattacagaaccggttttctctgaagaagctgaaaagagacgaatcagattgaaattcaagaaacaaataaattgtagtagagactgaaactcctttttgttatgtcaaccctagaaattgcaaatagtcaatgttcaagactcatcaagttccagaagctactgagaaaattcagatatagacaaaccccattgtgaaatactgaaattagtcgaaaatctgtaaagttttgagcattttcagggaaacaagaaacagagaatgtagaagaagagaaagctttttcaagaaagaacctacaagagagaaaacacaaacctgtgggaggctgagtaggagaaatgtgaataatggaagctccggctccatgagaatgagaaatagaaagagaggcaaagaagcaacagaagaagagaagaagaagaagaagaagagacattactactactactacagtgacgcaatcttgagtgaaagtgagaaagagttgcagtggagagagagagagagagaaggaggacaataaacttaaatgtgtctttttagaaaatctatgacccacaaaagactttttgcagtttttctgtaatgagtttagactttgatgatacacacaaaaccaggttttctcttacaatttctgaagtgaattattggacaatggaatctttgtagatttcacttttaccgcgtgagttaattaattgttattgttctaaactttaaatattagtacagttatgatttaggaaatttacatgtttgttttaatcacacaaaaaaaataattgaacttttaatgttttacggtattaacatatgttattattaactttttaggtaattatagttatgcaatggaacagatacaagaaagaagacaaacaaaattgaaaagaaaaacaaggataaaataaaaatattaatgtacagcagattctcctatatagacatttatgtttttttttcaggtttaggacacgtaatccttttatgtgtgatattagaatagatgtattttataacataaatgtataagaaaattattagattatgtgtattagaaatttagatttgttgtcttaaatgtgtatatattatctaactagattaaagtatatgtagtggtaaataagggttactttccggtttttgtttcaaaaaaatgtctaaaaatagaaacaaataataattcactcaatattatatttatataatatggttatatctctcatacaactaaaataaattttaatgaattttagtttgttagattcagttcagtttggttacataaaaactgttttagttatttatttattttgtattttaagattatgaaaccaaaaaattttattagaaattttgtgtaagttctatatgtcagttttgttctgtagtgggtgagtaaaataaccgaaaaccgaaccaaaccaaaccaaaccgaaataaatggtttggtttatttatgcgtttagcaaatcatatgctcaatcattttaatgttaattgaggtagcagcaacttcctggttaaccaaaa

SEQ ID NO: 23143 - DNA, 1694 bp, Arabidopsis thaliana landsberg
tttcttgtggttattgtgttttgactcctctctagccacttggccataattgtgctaacacttaacaagtttttgtggcttaagttttgaagttttacaggatcacctattcacccccccccctctaggtgctctcaattggtatcggagccgttctcttcaagaaagggactaatcgcccgaagagatggatcctaaggggaagggaatcgtgatcaacgataaagagaaggagtccttcgtcaacgagcccaaagatgacaagcctaacgactctggctcgggtcatagacggaaggaaggaaagaagaagaagacaaggcgcatcaaggagatcatatactacgacgatagtgatgagtctacttcttcccaaaaggatgatgacaacgactacaaaaagacggtcaattcaaacttttcatttgattattctcgtattcaacatagttcgaattcgcatttgctttccattcctcttggaaacctccacacttcgatggggaggactacagattttcgcccacaaaatgcgtagtcatctattctctctccatccaagcatatgggagattgtagagaatggaatgaaatttgatagctcggatagccctatgtttattaatgaacagattcataaaaatgcacaagctactactgtattgctagcctctttatgcagggacgagtacaataaggtgagcggcttggacaatgccaagcagatatgggacaccctcaagatttctcacgaggggaacgacatcaccatgctcactaaaatggagttggtggagggcgagcttggaaggtttgcaatgataaggggcgaggagccaacccaaacatacaaccggctcaagacccttatcaacaaaataaggagttatggaagcacgcgatggacggaccatgacgtcgtccgactattactaaggtcctttaccattcttgatcctcatttggtgaataatattcgtgagaatcccaggtacaccaaaatgtcgcccgaagaagtcctaggaaaattcgtcagcgggcgaatgatgattaaggaagcaaggtacgtggacgacgccttgaatggaccgatcaacgagccgcaacctcttgctctcaaagcaacaagaagcaaggaggcgctacctagcaaggtggcacaaattgaggcagccagacttaatgatgaagagatgctctcatcatcaaacgcttcaagacggtgtaaaaggtcacaaggggcagccaagcaagaccaaggcaaaagggaagcgctcatgcttcaagtgcggtaagattggtcattttatcgctaactgccccgataaccatagtgaccaggaacaggggaacaagagggaaaagaagaagaattacaagaaggccaagggcgaggcacatatcggaaaggagtgggattcggattgctcctccgactccgacaatgaaggactcgccgccaccgccttcaacaagtcatctctcttccccaacgagcgtcacacttgcctcatggcaagggagaagaaagtaagtactcgaaactctacttatgcttcttctagtgaggatgagtctagtgatgatgatgacatagactattcatacttatttaagggcctagatagaaccaaggtagacaaaataaatgaattaattgatgccttgaatgataagaataggcttttagaaaa

SEQ ID NO: 23144 - DNA, 592 bp, Arabidopsis thaliana landsberg
  unsure (1)..(592): unsure at all n locations
aggatcttgctgaactctcggttactgtgttcttctttctctctgttatttctgtgttcttctttctctcggttggtactgtgttcttctttctctgtgacttctttgtctattggcttttggtataagagttctgtggcgatgtgccacagtagaatgctctgatcgtagtccttctctgtcacgtactgcagaagtttcgtatggtctgttccgtcttctttctttttgcttgacgtttcaagtagagtccagtttcctctagctgaagatataccctttgcactttcttggtcttcagcaaatcggtgtttttgttgcacctctgtgaatatgaactcccatagttctctggtgaggcgatcactgaccgtgaatcttatctcttcaaccaaatctttgataccgaaaaagtcgaggaagttgtagatcaaaagtccgaggagttgaggaaaaaacagaaaccatcgaagacctgtacggattaccgaattgtctctttnnnnnnnnnnnnnnnnnnnnnnnnnnnnnnnnttatgaaactgngcgagtcctctggtggcattttcgatggcagtatctatgaaaaaat

SEQ ID NO: 23145 - DNA, 2052 bp, Arabidopsis thaliana landsberg
  unsure (1)..(2052): unsure at all n locations
atgttgagttcgtgaagattgatgtcgatgtcttaatggtaataaataatcattctccttttcttcatcttttttctcaaagtctaacaaaaggttaatttcaacaaaatttgtgtttgcttttgagttataaaatagtgtttggttgatatacagagcgtgtggatggagttcaaccttagcactttacctgcgattgtattcatgaaaagaggccgagaagtagacatggttgtgggtgtgaaggttgatgagttagagaggaaactcaataaatacacacaatccttcttctgaacgttgaattcctaacacgccaaacaaaactcctcatcaccttacgccaagaatatatagtttactactatgtatagataaaatgtttgaacgacgattcaacaaaataaaacttgtttgtgttgtaaaaggaattggatgttggatttgctatgtacgtgtctcatgtaatataaaatatatgatcagcgatttgtatcgttttttctatctttcatataattttttgaaataagtcaatagctctttagtagaagaacaatttagtaacacattttatcaaagtgggaaagttggtgaagacttgcgcaatgattgggttacgctttaatatttaaaaaaaaaaaaaaaacttttatagtacaaacaattttttatggcgaattcacataaaaaatgggaggacgaaacttaaatgcttcgtttacaaaataagcttatgtacaataaaatgaaagattaaatcaaatccacaataatagtctatctgaactttctatgattaattccacactcgtatctaatggaggcaactaggcaaggaccaaactctcaatcttgagcctaatacttcaactactagtctacttatataatacattcgaaataaaggggaaccacacagcttgccgttaagtacttgagggtactagaatgacatgcattgttccactattaggtggaagttgcaaacgaagaggaaacagcttgccgtttgaaggatggcgtgtacagaccacaacatcatccatactagtctcttcttgcaacgcctgcgtcaactgttccacgctatttcctttgaaagtcaacgcatatccaacggctgattcttcctccacgtgtccttcttcgtccgcgatgtggtagtaaataggcctcccttcagatttcggtggcggcacggtcaactagtcaaaccaaaaccaaaaaatgttaagacgataatcttgacaaaatctgatagaatttttcgtaatacagcttactaaaatctttggatattctataaatatctaaagaacaatcatttaataccatcccttcactagttttttcagatatttagaattttggatattattttcagtttttatttccgcagataaatgttaaaaaaagaaagtgaaacagtgtaacggataattttcctagtcgaattaattaatacctcttcttcggatttttctgaagatgttctagaaaccggagaatacgtgtacgacgnnnnnnnnnnnnnnnnnnnnnnnnnnnnnnnnnnnnnnnnnngagccggagtcgtcgttcccaccaaaatctcaaccacatcaacatcccacaagaaagaatccaatacatgagaagtgtcatgcgtgacagagttacgccatggaggaagtccaccgttggctcgaagcaagtttccgtatctagtcttgagcttcattttggaaccttctctcaccggttcccactctacggaggagtcgagtcgagccggtttagacaagaccactttacgtccagtggctccgagcaagaaccgctcattcgaagcggtgagatagttaccgtagcagctccttaaacggatcacttcaaaggaaccacgaaccggctcgacaatccatctagctctcttgtcggaaccattcctgtcttgagtcaccgtttcctcgtcctcatccgctgttagatacttatcatggacgttacgcatccttacggctttagcttgattgaaaaaatccatcttctgatactatgcgaatacta

SEQ ID NO: 23146 - DNA, 3290 bp, Arabidopsis thaliana landsberg
atttgattgatgctgtgcattcctttactggcctgaactggtattatatgtaaactgtttttaaactcattttatttggctatgtttttttgtatgtatcagtggtaaatttcttttcatttttttttggcaggtgggcttcaatagccttgacaactgttcttatccgtggagttacaatacctattcttttgaatcaactaaaggctacttacaaactcaatgtcagtttttagatttttgttctctgattgcttttttcagtcactaggatttgcctcttttccatttgtgatttatctatcatgttcttgcaggttctgaggccacaactggaggagttaagacaagagatgagcactaaggtacaatctgtttctgcgccttctcttacttcatctttgtgtgcagaagagcgtttgtgagtttgacactgttcaaggccgtgaaaatgccttctggataaatataaagataaactcagtttgtcatagttagtaattggatgattccttcagggttttctaactatcacttgtgaactataatcttgattgagtagctttctcgagttttctgtttggttaggaattgtcgataaagttccaactagcgtttctagagtgtcgtggttaagaccttttgcatgtgttataatattttttaggctcaggatcctgaagccatggcagaaggtcaaagacggatgcaattattgtttaaagagtaagtccacttttatggatgactggtggagatgatttatctcttcaaattaaacgtactactagttcctcatccactgatatgcttctattgtttcgtggactggcttagacatggagtaactccatttacccccctcaaaggacttattattcaaggtcccatcttcatcagctttttctttgcggtaagatgtttatacgtatatactcaagtcttttactgtttctgattattattgtctatgtgttcactgatgtttgtctacagatcaggaatatggccgagaaagtcccatcatttaaaaccgggggaactctttggtttactgatctgaccaccacagataccacttatatcttgccactcctcactgcagtgactttcttgattatggtagaggtaagagcttatactttcttgttggcctattcatgactaacttttggtagttggttatatttcatgactaatttatctaacccaagtcttgtttctcttttcacatagtcaaacatgcaggaaggtcttgaaggcaatccagtagctggaactatgaagaaattctcaagaatcattgccttcctttctattccagttttgattggcattgaaaaggtaaagcctaatgttcctctattgactttttgatgttcataagcattggaaacgtaagaaaaatgacattttgcttaccacaaacgaatgattttttgtctgcaggcattgttttgttactggcttacttccaacctatttactcttgtgtatggattaagtaagtcccctgaacattgttcttactctttgagacgtgagttttgcaaatcctgaagagttttttttatttgtatcttttgcttgtgtatatatgcagcattaagacgtcctgatgtgaggaagctcttgaatctcccagatgttgtcaactcttctactaggcagccatcaccgtcttcgcctttgccattttcctttgccgagccaaaagaccaaagtgttgttgctcaagaaaaacctcctatgtcctccgagtcatcttcaagtgttccagatagaagaatctcacggagttcagttctgaatcagagaatcagaactctggagagacaactcaaggaccgaaagatcaagaagtgagagattcttttatgtcagtgtttttttgctaaaactagccgatactgaaaaagaaccaagtatcctcgggaaattaagattttgagttaataggaaaaatttcagttgaacctttgcattgaaatgaattagcttaattttaacttgaagatgaatgataaaagtaaattttcccatgatggtcgttttagattttatactaatacagaaaaaagaatactatatatttatataccaaagaaaaaaaatagatgtatatttgtatacctttttcttttgacgatcagatatttgtttacttagaaacgtatatatatcgataacagaacttagggcaaaactgagaacagagtaaaaccctaaccagatatacaagttatgacagagctagaaaaacaaacaagttgatgaattcgttgaatttggatgtattggaaattatactagcgaggttaccgataaagagcatcacaacttgcaacttggtttgcaaggaatggaaatcaatcgtagaatctgagtttctccgggagcttttcctttctcatcatcaaaactctcattcttcgtggtcgctcatatgcgccgaatatcaaaactatccaagtggttgtatcacatgatttctatgctgaatctgatctatgccaagtcttagattttcccgacttggataacaaagcggatttcagaagaccttgcacaagttctcaagggtttcttatgtatatgaacataagtctagagcataagttaagtatatggaggctagagagcgcggaatggaaattagtagctcaaatatctccaatgaccgctttcgattacattccgctggcagtaaacccttttgattctaatacagtatacgtgcagaggaagatgcacccctgtttggcctctgctaacttgcacaatggcaagtttggggaccatagcagcgacaatggcactctgagttttgctggcgagtgggactccgcggttaaacgtttatatgaatattctacctttgctctcccgcgttggctctatcggatcccttcgccactttcttgagcaagtttagtttttgttttggatgttgtttgatctatttttagtatttttgtataagaacataagtttagagcatatgttaagtattttgattgcttgatggattgttaacgatacaattaaagaacacagcacattcatttcttcatctaaatcaactttgaggctaatcttctgtagaagtacttaaagcagtaactgaagttttttctgtgattctgttgtaatcaggaacctgttcgataactacaagatcgtgtacacacataaatgtgaaggcaaccttatatttcatatggatcactttgaagtatttattatatacatgaatcagtacttacatgtaatgtgttatgtatgtacgt

SEQ ID NO: 23147 - DNA, 652 bp, Arabidopsis thaliana landsberg
  unsure (1)..(652): unsure at all n locations
catgggatcacaaacaagagaagaagaagatcattccatgtcgtattcggtcgaggaatggaagagaggatagtaacgaacttatccctctccgtcaacataagcagatcatttagagactgaagtgtgtcctcctagagatccggcgacagaggtggatattcttcgaagttgttgccttgagaggatgggtgactgtgagcccgagactcttgaactggagaaggcggagggtcttgctgaggagtcagagggacaagctccggagtcgttgtcgcttaagtcgaagattgttctagacttctacggaagcagtcctttgcacttcaggttgtcgactgccggagtgctagaataattgttgaggcggcgggtagttctggacatgagctgtcgatgactgtaatggaggaacggggtcttctgttgtaggcggctatagctgagtaggccgttgtgctgccggcgtgaagtcatactgagccagaagagaactaggtcgtccaccagccgtggatccggtggctctctcatcaaggttaggagtggtacgcctcttttttcctcgcccaaacatcgtgtgaaggagagatcgagatgagacggaggttgaacttgaagaaatccgagaaatcgaaggacangctagggt

SEQ ID NO: 23148 - DNA, 564 bp, Arabidopsis thaliana landsberg
cctgtgtagataagaggagccgatggtcggacctggaccagctccacgaggcaaacgcaagcgtccgcttcaattcgagcaagcttatcttgattcgcttccttctgctaatatgtaagtatgtcttatgctttggaaccctctctgttcctaatcgaatcaagttttggggtttagggttttaatttgagcttattggtttagtattgttgttggtatatatgagcttattatctgtgaattggtattgaaaaagtaactcttgtatattttttcactaggtatgagaaaagttatatgcatcgagatgtagttacacatgttgctgtttcagcagctgagttctttataagtggaagtatggatggcaatgcttctcatctttgtgatatttatgatttcattctggttttgtaatggcaaagcataacatatgtatattttgcataatctaggtcactcgaaattttggaagaaaaagggtgttggtatcgagtttgctaacatttccgctcccatctcggtccaattgaaagtctagcggttagtatcgcgagtggtttt

SEQ ID NO: 23149 - DNA, 622 bp, Arabidopsis thaliana landsberg
  unsure (1)..(622): unsure at all n locations
tcgaaactgtccnnnnnnnnnnnnnnnnnnnnnnntctaggtgctatcaaatgtgaaggctaggcgaatggtaaacaaaaaagatggccctctaggcctaccagtgcgtactatacgtgtcgtcatgtacaatatcggtttctccattagattgacgtgcagaacaagtaaagctagcaaaacagagtccaagtcatttttacgtggtcaagtgagagcacctagaggagtgaataggtgatcctgcaataatcaactctaaacaacacaaacttggtttataatgagtgttagtggaagctaaaaccaagttggtatgagtagagatggagagaggagcacttttcacttgattgctccttttagatgtgtatcaaacttaggagcaataatctaagtgaatatgagaactctataagataataatcgcaataaattaaatagacaagagacatgatgattttatccatggttcgaccaatgcctactctatgttgtggtgccttttttggtcaagtgttgcctcaactctctcaagtgatcaaagataaacttgagtacacggttttctccttatacaaattcctttgtaaggaactcacaagttggagctctcccctta

SEQ ID NO: 23150 - DNA, 578 bp, Arabidopsis thaliana landsberg
acacgaagagttcatctacatgttgttcttaatctctgaggcttatcttgccaacaagatctactttgcttcagtgctatgctgtcttccgggagttataggcgtttctctcaagcatgcgtagttatcagaccacatatccgtcaacatccaatctgccagctttcagatcgatttcccggcgacctaaaaggaaccaggacccgatctgcgcatcattatctttctaaagaatccaactttgcctcttttgttgcagtcttgtaagaattctcacagtttttccgcgacgagcgcatcctggccgaaaccatagagcggagttccgctgttatcagatcagctgctttttagatcgatttctcgtcaatctggtagaatataagaatcaaccttcacatcatcatgaagccccaaggcttatctttctatagagaccaatctcgtctctattgttgaactccttctaggttggggaacctgctacatcatctctgctaccattcttcgatcgcgtcattgttattctcacttgagatcaccaactcaaagttcaacactatcaaccaaagatttca

SEQ ID NO: 23151 - DNA, 1666 bp, Arabidopsis thaliana landsberg
  unsure (1)..(1666): unsure at all n locations
catacattaagcatttcatattgagccaattatcaaattagaagaatgtagatgtcttatcttttacttatgagcaaattaaagctattaagtttttacttcttttttttgttaaaatgatggtggtcttgacacaagcactagcaaataaaaaattgcttttaactccacccttttttgttgtcaaccatgctaaataaactgatttgaattgagtctcaaaaaaaaaattagaaggtttatcactaaaagtaacatagttttattattatagagaaatacactaaaatagcattaaagctaagtttttgttccaaaaaaccataaatagtttttttctttccaaaatgcctctacaaacgttttagtacaaaaataccacaaagtctaaaaatgatttctaaagattttaaaccttcaaaactaaatcctaaaccctaaaatttaaacacaaaatattaaatgcagacccaaagtttaaattataggtgaattttagttttgtgggattttcaaaaaaattatcttttactggtactgtacgaaaaaaactgatggtgttacttttggaacaaaaaacttatcttagtggtagttttgagaattgtctattattatatcttattatataaagtatggtttttgattttagattttgacacatgtaatcttattatcaattttattaaatgagtaaaaatataaatataaaaaccaaagtaaaatattaatatatcttatataaaacaattttaaaaaattgaaagaagataaatattcgaaaattatatgtatcttatcaaacaaagatagaaaatataagattacatattattttaaagaaataaaaatgtaaagaagataattatatgtatcttactgaaagaaattataaatcaattactaattctaatttgaaattactaattctaaaagaaaattgattaccgtcttcctaaaaattttaaaaaggatttaaggaaacgatcttattatattaaatataatacataaaggaattttacaattaattataatcttagaaggaaaaagatttcagatactcacctctatataattagtagccggattttatgcggtaactgatacagaatgtacagtttttgccgcttcttctcgtcttaagagagaacgacggcgatcaaacaaacgtcgccgaagtttaggcggcgagtgagagtatatgagtttatcaagcagagatttgtaacttttcttgtttttgggggaaaaagattaggaattataataactttatttttttaatttatatttggaactataatataaaaatcttatttacatttttaaaactattttgtttctttaatttatcttattttatattaaaaattttaaaatttataataaaattacatgtaccaaaatctaagatctacaaaaataacacgtgtaacagtcatatgaattactaaatttgaaaatcatgctttatataataaaatatcttttattactctagaacctctaatgtaaacaatattttctaatttgatactactaattaagattttgcattgacaatatgaaagaaattccgctatttggaaattagatctcataccttggtgtattttttttttttttttttnttaaaacaacaccttgttgtaaaaaaaaaata

SEQ ID NO: 23152 - DNA, 952 bp, Arabidopsis thaliana landsberg
  unsure (1)..(952): unsure at all n locations
aatagtttcgtaaaaattttcaggatacgctcgtgtattttaaaattttggttcgatttagtttgaatttttgtggatatgtttgacttttgttataactatctagccatacgaataacaaaaaaaaaatataaaaaaattggaagataattctcaaaaacagattccaaaaagaaaaaagaaaatttgttagtaataatgctttctctatcacgtggagtaaatctctctattacgaggagtaaatctctctattacgaggagtaaatctctcactatatatatacaatagagagaaaaaaacagaagagagagttcataaacaatgatcttcaaaaaagaggtgtctaaagaagatgtcgagtgtgtggaaacattactgatgatgagtaactcaaagccaacgcgggaggagtataacaaacttcagttatgtatacttcgaagaaacaaaagctcgacgattactactccttctaccgtcatggagtctaaatcccatattcacgaccactcattaagagaatctccaacaagacgcagtagaaacagacatgatctccctcctatgtctcctcccatggaacaacgaaaatctaagaaggcaaaacgcagtacggatgcttcttcttccaagacaagagagccgacgccagggtggcttatcagcttgatgagaagcaagaaccgtggagacgttgaagacaattcgaagaagatcatagataaagaattattccaaaccgatgtcgatccacaccaaagtcgtctctcaatacctgtcagccagatcgtggagttggaattcttgaaccacgaggaaaaaagggccatagaagaagatgccaatagggttcgcaaagaaagagtagacgcgatactcgtggattctcatctaagggaatttccggtgaatttgaagttgaaggacatgangggcattcttctatac

SEQ ID NO: 23153 - DNA, 709 bp, Arabidopsis thaliana landsberg
ttggttgcatgttcttcaacgctccctttgtatgctgcacacttaagtaccctcttttttttgtcattagatattatttagggttcatacaaaccaaaattgcggaaaattgtttacataagtaacatgtagcgtttcgacacaaaatttttgtgtcaaatagtccgccttaacatttgtaaaaagaattatagttaaaaggaagaaaaagaaaaacaagaatacactaacggtgcaaaataatatcaggtcatatgcttgtatatcactggccatcttgatacaatcttctctcaggagcatcgcaaagagatgttgcgtcatatgtaaaaccattaggtaccttactatataatttctctttaaaattttcattagaaagtataacatccaaatttgagataactaataaaatagtttttgggggtgaaactgttattgaaaaaaattgattatgtctcttcttttttttggtaagattgatgatgtctcttatgaaacattagagacatattccctccaatataaattatatcatctgggagaaagaaaatagaagaccaacgctgatttctgaacacaacactctctcttatatgtacacacaacacacaagaactacatacatttgcctcgacgaaaataatcacagacaatttgaattaaaagccagacatgactcattatatccttcaatcttatccatagt

SEQ ID NO: 23154 - DNA, 768 bp, Arabidopsis thaliana landsberg
attcataaaaaaagtgaatatttaaaacatttaaattgttttttaaaaagtttaacttcttaaatagtgggaaggtttataatttaacttttaacaaaattaaaatattataatattttgtaattttgtaaaattttaattctttaaaatatagagcaagagtaaagatgatgtactattaattttagactcttaataaatcaagttttctgctcatttgtattcataatcatttttttatagtacaactttgaaccatcatctaattttttgaacaatgtgggacattgtaaacatattctttttgcttcatcgattaagattatatatgtctattttaaaatgtttgaatcacatcatatgcaaaaaaaaatataatatttaattatttgtatgtattttgtagaaattcaaaataaattaaatataatatcaaataaaagtgaaagaaaaaatatatattggtatatatttatgtataaattaagtagatagatttcagaaaattagtaaataagagaatatatttaaggaaatataatatttaagagagaattaagaatacaaagataaggtatcttttaaaatttcgtaaaaacaatatgtttattagatatattttgtagggaccgaaagtgaaaatactaaataatttaaggactcttggtaaatggtcaaccaaaaatgtatgtgtacagtcatttgacaactatcaattgatccactaaaactctattaaatttaataaagaaagataatctataagaa

SEQ ID NO: 23155 - DNA, 702 bp, Arabidopsis thaliana landsberg
  unsure (1)..(702): unsure at all n locations
atcgtcgtaaggtttgaaattctctgtgaattctttttgttgattgatgattgtcttcaaaaacattcctgggtttgacttttttttcatcggagcttcgtctgtgttgttggttgatgtcaattggtatttgtattaatccgtactttttcaatgattgctttcttaagttttttaacatttgttttttggcggcggagaaatctggagtaatgttgaaaaacaatgacaattttgtttctttcaatcctaaattttcgatttttctcactacccttatctctatttgatcgattttttgttattgtttacaggttgggactgcagttgttactgggaaaggtggaagattggctcttggacgtttaggagctatctgtgaacaggtattttgatatactcaatatatgttcttgctttaaaaacagaatcgaaaaaatggtttttgaaggacttgtgtaatataatatcagcttgcggagttaaactcagatggatttgaggtcattttggtgtcatctggtgccgttggtcttggtcgacaaaggcttcgatacagacaattagtcaacagcaggttatattattggaacaagtttaaagttttttttggttttagtgtttctgtgctgatttttgttctcttcggattttcaagtttgcagatttacagaagccacanatggaacttgatgggaaggc

SEQ ID NO: 23156 - DNA, 1121 bp, Arabidopsis thaliana landsberg
tcatctaaatagaagtaaatttcataagagaatacttaatatattgtttttaaattatttaatgaaacattgttaaatgaccatacaaagtaggggtgataattctacctcgtggcatccaagagcctctaaatttattgcgcttcaagtgacttccaaagcctgtgtaaactccaataacagctagcattttcttccctgaagaagagacacttttctgttttttaagatagccttgactctttgcctgtgccaactccatttcagtttcaacaattctcctctcaagatctctataaaacagttacattgtgtgttagtatatgcagaacaaaaaaacatcttattgagtaagaaattcagcttacttgcatccaaggaccacaagtttgtcctccaccgtaagaaccttaggcctctatactccacaagaacatgatcaacattaaagacaaaacatttgattagtgaaaatgacgcgtttaaatggatactagtttcttctattcaagaaagaccaacctgatcataattcatcttaagcacagtattgagtgctgctctgtactgcgcatcttgccataacctaaacgtaagaaacaacaccattatagagatcagtatcagttaataagatccagggatcgaaattgagctcgttattggtagattgtacgactatttactgtaatggaactcaaacccaaaatacacattgcaatacagttatatctgaaattacagaaatctagaatggtaacaaatcggcgaaaaattgtagaaaaacggaagaatctagcatctgcgagatctatcaacaactatgaagacagtgttccatgacgattacaatcctcattcaattccgggatgcattccgaagaacacatctagaatcagtgagatttgatattactcaacaagaaaaaaatcagacggaaatggaagaaaaaagcgacgtaccggccagcgacgtagagccaagcaagacaagagaagaaggccaagataagagagggcttggaggtgttctgagacttggaagaccaaccacgccggtctgatttccctgagaccgtcgttggtaagctctccatgtctatccacggcgagagggagag

SEQ ID NO: 23157 - DNA, 1665 bp, Arabidopsis thaliana landsberg
aagaccgctgcatagtgccctgcctattggtaatccaaatatggaagattctttaggatggcattttactaaagccggaaattatacagtcaaatctggatatcatacggctcggttagatttgaacgagggtacaactctcataggtcccgatcttacaacgttaaaagcgtatatttggaaagtgcagtgtccacctaagttacgccattttttatggcaaatattatcgggttgtgtaccggtatcggagaatttacgaaagagaggtatactttgtgataagggttgtgttagttgtggtgctccagaggaatcaattaatcatactctttttcaatgccaccctgcaaggcagatttgggcactatcacaaattcctacggccccagggatttttccctcgaattcaatttttacgaatttggatcatttgttttggagaattccttcaggcgtcgatgcggcttcttacccatggatatttggtatatatggaaagcaagaaatgaaaaagtttttgaaaatgtggataaagatccaatggaaatattgctcttatcggtaaaagaggctcaatcgtggcaggaagctcaagtcgagctccatagtgaaaaacatggttccttgtctatagatagtcgaattcgggtgagggatgtatcacaagatacaactttttctggctttcggtgttttattgatggatcttggaaagcaagtgaccagttctcaggaacaggatggttctgtctatcatctcttggagagtcgccaaccatgggagccgccaacgttcgtagaagtctatctcctctacataccgaaatggaagctcttctttgggcgatgaagtgcatgattggagcagataatcagaacgtagctttctttacaaactgttcagacttggtgaaaatggtgtcttctccaaccgaatggccggcgttttcagtgtatttggaggagttgcaaagtgatagggaagaattcacaaatttctctttatctttaatttctcgtagtgcaaatgtaaaagcggataagttggcacgaaagattcgtaccgtaccgcatcatgtcacgtatgtaaacaatatccctcgagattgactcttttgagttctaatttatatcggttgacaaaaaaaaaatgtgttgcataaaagttaaaattctagtttcttacatatatatatatggaaaaaatgaaaaagtattttcagtttattaatcattttatataaaacaatacggttgtaaatcaaataataattatatatgactgcattagaaaatatcatgaatcgacactaaacctacaaaacatcacatagaacatagaacatagaacatagaacatagagtgatatttttccaaaacagaaaaggtaataaaaccaaaaagaaattaagaaaaaaaatgtaatgacgcatttttaaaatttcattggttaggtgcacgttcggatcaaatttaaatcatacaatataactttgtgacaatcaaatgatagggagacgacaccctcatgcatctgtattttattgtcatatggctttccaatttatattatgaagtattattatgtatgtagacatgtatatttattatacttctatcttcaaaattattgtgtttttattcccgtggttaataagtca

SEQ ID NO: 23158 - DNA, 583 bp, Arabidopsis thaliana landsberg
aaccattttgttggtgagcagattgagaatgcatacactcttcatccaaaaccagagaaaaaacgttattagttgattaaaggatataataagttaaataggaaaacatattagaatttcttagtgcatgtgtggaatgcaagttttcgatcgacgaaaacaatataataagttaaataggaaaaaatagtcttaaaaataaaagatagaagagaaatttgaaaagtctagtgaaataccttcatctgtctccagtattctccatagggagcaaacacaacatcacgtccaccattcataagcccatgaacggcttttgatctcgggcggttcgcaaatttatgatcatgtgtattcaatacctcttgagctgcttcaccggaggagactacgagtatagggacacggccaaaatgaaggagcatgagtggtccgtacctgagactgagggaccggaggaacggtgaggatggaggctgagctggtggaggtttcgatcaacggacatgctcatggagatggtggcaggttcactttagtggcggttcgtttgaggaatagcgtcagcaagagaagggttatg

SEQ ID NO: 23159 - DNA, 520 bp, Arabidopsis thaliana landsberg
tcagcgttttagaggcaacgcacgttgatagcaggccgcgcgaccactttgaggatgatggccgagtgatgagctggcgcaccggtgttctggagataactgttgggtgaccacgtggcacactggggttttggaaataaccgccgggtgatggctgggcactttttgaaatggtatctggctcgagaatatcccataagtgctgcgcttttagccgcctttgctttctgtgccctagttcttgctttcccgcttccggatcctctgtgctattcgcctcccactccgcttgctgatagaattgagatggcgcccaagaggaagacctcgagttcatctgctatggtgattctccaatcgaccccaacagccagttgccgttcgcaggtaaccacatgtctgtcatttctgagcctgaacttctccacctcgtatccatcggggttcttcctcgcgggaactctgttcttggcggatttgcatgggttactgtccgaccgaggataccatgagccgttgt

SEQ ID NO: 23160 - DNA, 499 bp, Arabidopsis thaliana landsberg
acccttccggtatagttcggcttctatctggttcggtcataacctttgaaattatgaaaaaatctaatttatatagatcatctaaaattaaattacgtcatatattaatatcattcgtaaattatttataactagacatatcacatattgttgttgataattaaaaacatatcacattttgtttctttagcttttcaaacgatcgataaattgtacatttgacttttgagtcctagagaaatggggttttctttttgtcaacaagtgtatttaattagagtgaagctgttgctcaaactaaagcccataacgatagcaattttattaatgatagatacagtataatttctataaataagtaaaacatgtggctaggagaacacactcgacgaaatgacgatgaagcacacaatagctctagctctgcttttgatacttagcttccttttcacgtatcttattcttgtcgctgttaaatcacgacgacggagatcaagct

SEQ ID NO: 23161 - DNA, 327 bp, Arabidopsis thaliana landsberg
  unsure (1)..(327): unsure at all n locations
ggaaatttatttttctacatgatttatataaataaaaatctatgtttctttctctatcatttgatacgcatttttaataatgatttttaaattttatattactgagcactatacgaataatatctacacagatatagactgctgtacagatataaactgctgtnnnnnnnnnnnnnnnnnnnnnnnnnnnnnnnnnnnnnnnnnnnnnnnnnnnnnnnnnnnnnnnnnnnnnnnncagttataaattactgggcagaacattttttattctaaggcttatccttgttctatatattttagaacttactttactagttcgtatagagt

SEQ ID NO: 23162 - DNA, 2953 bp, Arabidopsis thaliana landsberg
gtcgatcttatatataaaaacataaccaaacacttcaaatctgaatatttcttaccaacatttcaaaaaaacctaatctacatgataaggttcatgtgaatccattttcatgattgatcttttcaaacaagttctcaaataagtttgaaaccaatcatttgtatacctaaagttcttgatgtaataaaatggttgtttttcagtaatgcttatctatagaatggatcgaactatgtggatttcaaaagtttgtcttgtgccctattccaaaatgtcataaaacagtcgctttgtgcaacttttttgcgacgacagcagaacacagtcgcacgttgcaacgtttgtgtaactgttttgtgactaaattgcgacgattgtgcaacattttaaaattttgtgaaatttattaagtgtttctctagtaaatattgtgcgaccgaatagggactaacgagcatttttatttgtaaaatgtttcaaaaatgtcacaaaacagtcgctaggtgcaacgtttttgcgacgacaacagaacacagtcgcactttgcaaccaattagctacttattaccaacgctcgagttttgaatttccaaatttttaagttctggtatgtttatatgttttcttatacgttgacactttaatttggtcgatattatatataaaaacataaccaaacacttcaaatctgaatattacaaacaaaacattcaaaaaaacctaatctacatgataaggttcatgtgaattcattttcatgattgatcatttcaaacaagttctcaaataagtttgaaaccaatcatttgtatacctaaagttttttatgtactaaaaatggttgtttttcagtaatgtttatctatcgaatgtatcaaactatgtagatttcaaaagtttgtcttgtgatctatttcaaaatgtcacaaaacagtcgctttgtgcaacttttttgcgacgacagcagaacacagtcgcacgttgcaacgtttctgtaactgttctgagactaaattgcgacgattgtgcaacgttttaaaattgtgttaaatttattaagtgtttctcgagtaaatattgtgcgaccgaatagggactaacgagcatttttatttgtaaaatttttcataaatgacacaaaacagtcgcgaggtgcaacgtttttgcgacgacaacagaacacagtcgcactttgcaaccaattatctacttattaccaacgctcgagttttgaatttcgaaatttttaagttccggtatgtttatatgttttcttatacgttgacactttaatttggtcgatattatatataaaaacataaccaaacacttcaaatctgaatattacaaaccaaacattcaaaaaacctaatctacatgataaggttcatgtgaattcattttcatgattgatcttttcaaacaagttctcaaataagtttgaaaccaatcatttgtatacctaaagttctttatgtactaaaatggttgtttttcagttatgtttatctataaaatggatcaaactatgtggatttcaaaagtttgtcttgtgacctattccaaaatgtaactaaacagtcgctttgtgcaacttttttgcgacgacagcagaacatagtcgcacgttgcaacgtgtgtgtaactgttttgtgactaaattgcgacaattgtgcaacgttttaaaattttgtgaaatttattaagtgtttctctagtaaatattgtgcgaccgaatagggactaactagcatttttatttgtaaaatgtttcaaaaatgtcacaaaacagtcgctaggtgcaacgtttttgctacgacaacagaacacagtcgcactttgcaaccaattagctacttattaccaacgctcgagttttgaatttcgaaatttttaagttctggtatgtttatatgtttttttatacgttgacactttaatttggtcgatattatatataaaaacataaccaaacacttcaaatctgaatattacaaaccaaacattcaaaaaaaactaatctacatgataaggttcacgtgaattcattttcatgattgatcttttcaaacaagttctcaaataagtttgaaaccaatcatttgtatacgtaaagttctttatgtactaaaattgttgtttttcagtaatgtttatctatagaatggatcaaactatgtggattttaaaagtttgtcttgtgacctattccaaaatgtcacaaaacagtcgctttgtgcaacttttttgcgacgacagcagaacacattcgcacgttgcaaagtttgtgtaactgttttgtgactaaattgcgacgattgtgcaacgttttaagattttgttaaatttattaagtgtttctcgagtaaatattgtgcgaccgaatagggactaacgagcatttttatttgtaaaatgtttcaaaaatgtcacaaaacagtcgctaggtgcaacatttttgtgacgacaacagaacacagtcgcacttttcaaccaattagctacttattaccaacgctcgagttttgaatttcgaaatttttaagttctggtatctttatatgttttcttatacgttgacgcattaatttggtcgatattatatataaaaacataaccaaacacttcaaatctgaatattacaaaccaaacattcaaaaaaaactaatctacatgataaggttcatgtgaattcattttcatgattgatcttttcaaacaagttctcaaataagtttaaaaccaatcatttgtatacctacagttctttatgtactaaaatggttgtttttcagtaatgtttatctatagaatggatcgaactatgtggatttcaaaagtttgtcttgtgacctattccaaaatgtcacaaaacagtcgctttgtgcaacttttttgcgacgacagcagaacacagtcgcacgttgcagcgtttgtgtaactgttttgtgac

SEQ ID NO: 23163 - DNA, 1673 bp, Arabidopsis thaliana landsberg
tgttcacgtttgtgtgcagtgcgctacgtgtctgggggggagagctgcgccctaagtacatgccatcatggcagccgaggggttttggcacccggttcgtgtgatgtcgtggccgtcgaggagcgccgatcctggcggaaggacaactgtcggggctgcaagtccttgctgacgtcctcttgcttccgtaagggggctgagagccgccgtcgtcatagagcgtgcatggcgccatcattactcgtatggtggagcgagccagatgggacgccggtcttgttccccgtagcctgagtcagcttggggtagggtaatgatggcacctcctattgacgtggtcggcccgtgccctgggttgggcgatgtggaggctcctccgaggtcgaggtcgagtctatcttccgaggccgaggtcgagtccgagcccctgggtcgggcgaggcggagaccgtcggctgaggccagggctgagtccgagccctagggtcgggcgaagcggagttcgtcgtcttccggggctgagcccgagtccgagccctggggtcgggcgaagtggagttcgtcgtcttccggggctgagcccgagttcgagcccttgggtcgggcgaagcggagttcgtcgtcttccggggctgagcccgagtccgagccctggggtcgggcgatgcggagttcgtcgtcttccggggctgagcccaagtccgagccctggggtcgggcgatgcggagttcgtcgtcttccggggctaagcccgagtccgagccctggggtcgggcgatgcggagttcatcgtcttccggggctgagcccgagtctgagccctggggtcgggcgaagcggagttcgtcgtcttccggggctgagcccgagtccgagccctggggtcgggcgaagcggagttccccatggcgcctgaggccggacttggctgctgtcagcctcactctgtcgagtggcacagcagtcgaagcggcgcaggcggcgctgtccttttgtcaggccggtcagtggagcggcgaagtgactgcggtcacttcggctctatcgactgaagggtgcgcgtcgagataaggtgtcaggccacctttgcattaaatgctcctgcgatatggtcggtcggcgtggcgatcgggccaaggttgcttcttggcgaagactgggccttgggcgagccgaaggtgtgtccgttgcttaagggggccctcgggcgagacgtgaatcctccggggtcggctgcccttgcccgaggctgggctcgggcgaggcgagatcgtgtcccttgagtggaccgagccttgacttaatcgcacccatcaggcctttgcagctttgtgctgatgggggttaccagctgagattaggagtcttgggggtacccctaattatggtccccgacaagcctattcaccccccctctaggctactttcagttctttataatcatttattcatgcataggtttaattttgatgggacccaataggttgccctagtctgcttatcttgttaccttgtttacccctaaatcatttgggtagtttttctattgctctatatggttttgggattaatactacattatgtccatgttccaattattatgttattttatttatgttcatgtcaagatcattatatttttaattggaacatggagcttaacttgagaaac

SEQ ID NO: 23164 - DNA, 171 bp, Arabidopsis thaliana landsberg
aatgttgtattgcgagactgcccatctgtaagtcgcatggtacatcactggcttaaagagactatgggggttcaaaccgtatggcttgtgcacgaagcttgtaggctagctatgaaacctgtggtaatgcaaaactctgcctgtaattttactacggttagactatactca

SEQ ID NO: 23165 - DNA, 729 bp, Arabidopsis thaliana landsberg
tgtacctagtgaattcgaagcggaacggtttatagcaaaaatggacaaggcaatcctgaaatcttccctcgttgcaaaggtccttctgacaaacatattatcatcctctttgctcaagtcaacatgagctgcttttgcatccatatcatcgatcatctccgaacattggctctatgttgtcgtacccatacacttgatcaatgcttatacctttttgaaatgtctccaaaaagtctgtcatagacccaacattactttcttttaacatgactttctttttagggggctcaacaaaatcatcatccccgctgtcttcatatacaacgatttctttcccagcttgaaacgtagcaatagtgtagttatcgtcgtcaaactcatcatcttctgattcactccctgtagtgagagagaaagaatcatcagagttttctaaagactttttatcatcagctgaagcgagaacttctaccggtagagatgtatttaacatcagaagcggcgacaaaaactccattagttgacttttatgctgcttctagtgcttctaacagtagttcatcgcttatgtcatatttagtggatgtgacataaacatctgtactctgaacaatagcaaactgagagctgggatgatagacaatagtattatcttgaaaagaagataacagaccagcgaagtatcctcctttcaaagccgcaacgagtttaactccagttggtacaaaa

SEQ ID NO: 23166 - DNA, 581 bp, Arabidopsis thaliana landsberg
ggaagtggtggcagcaccaatagacgaggaggcggcggcggtggaggtggtggtcgtcgtttactaggagttgccatttttgtttgttgaaggtttttaggagattgagagtgacatagaaaaagtctaaaagcaaatatgtaacaactgaactaaagctgtcattggtcgcaatattatttgatctgtaatgacaacaaccagtgattgacatctaatcatacttatacattaaaatgtcttcaacaatctttaaacgtaatggatatataatgctttggcgagcgatgttttcttggacttttcttccactactcttaatagaaagactttattacaaggctttaatgtaatatatatatttcgtagagtgagatatttatttgaaacattcactcttatttaaaaaaaaatgaaaatgcgttgtactcttatagaaatactatatactatataatgcgttattcattattgacaatgattgatacttgaattatccatatgaaagaaaaaaaatctacgaattagaaaacagcaagtttataatttcaactaagatgtgttacgaccgtagacatggg

SEQ ID NO: 23167 - DNA, 1005 bp, Arabidopsis thaliana landsberg
actttaaaatagtcatttttacaatcttatttcatcgtctcaatatcaaaaagatgttttttcttgagattcaatcttcgattctagatttcctcaattaatcgctacgagaatcgctgataaacaatttttgtcgccctcttttgccaacatcaaattcgataaccgttcacaatctccttttaatcgccactaaaattaatttgatttcattcgtcgtaatgaatatgatatcaacgaccattgatatgaacttcttcttcgtcgtgagaaactctctattcgaatttaaatccttgacaaataaacaattttcgacaaaatctcaatttgaatctcattgtatttctcatgatttttcaattcataaaaatggctaattttatttttacctttttcaaagttttttttgcttttttcttgaatttaaaaaagataatattttttttttaaaacttttgggataatatagaaactaaatgttaataaaataacttttaaaaattaaataaaattaatgcttcatcacctaaacattagtagttaattgagctagaaatggtaaaattggaattgtatttttgttctgagattaaattgtttgagtattaaactttacagttttattagtactgtatgtgtatttttcttcgaaccggaaagtaatgggtagtaaacatccaaataaaaaaataattgagttttttttgagaattttcctttcttttattaacatattttactttttttgattaaatttttttaaaatatatttaaaatctttgtagaagcacactaatccatttgctaactaatttaaatatgtttctaacatgttcacatatattaaaaggcacgttttgagcatacatatattttggttctcagttcttgatcatctagtgcattatctctcaaaaaccataatcatatggcctcttcttttccccctaggctaatttacatataatatccttagaacgaccaaaacaatgtacggcaggg

SEQ ID NO: 23168 - DNA, 592 bp, Arabidopsis thaliana landsberg
ctctacgaaggtccgaagccgagaatgccttgtaccatcaatccatcatgccagtcagctacttctcttatgaacattgctttgcagtgtacacgccgtttttcctgctcatggcaggacacgtccttgcagctagcactacaagaacggaaaagatacaagcaagagaaggcaaggtacttgacatggctaaccagaaacaagagggcccaggatatttaagcatactacagattctctttaacttcaaagtttttggttgcttcactacaaaattatgacaacaaaatattacatttgaggagaaaaaacaagtaaatacacgagcttgggatctctggtgactcagttttgcaaacagttagctagccagcttgaaggcgtcaatgaagagaccataagtgaaacccatcttgaaattattgagcagagcaataggaaatgtgactgtggcgcggctataatagaatcttgtcacatactctgtcaaaagaacgcataaaaccgcagcgataacatcgttcactcccaaagctccaaacgacagagagatagtctgcgctacatagaacccacctaacaacgagattcc

SEQ ID NO: 23169 - DNA, 608 bp, Arabidopsis thaliana landsberg
  unsure (1)..(608): unsure at all n locations
tggataattgagtaaagacttcaaagcaagataacaaccaactaagtccccagtacctttttattttttttctagaggaaggctgagttttatttttcttgttctttttataattcttttcttttacttacgcttaaccgtgcacagatgacttcccacggatcctcagaggacggaaatgcactatcccacactgacgggcttgcacgagagggcnnnnnnnnnnnnnnnnnnnnnnnnnnnnnnnnnnnnnnnnnnnnnncaccccctcagtnnnnnnnnnnnnnnnnnnngaagcaccgagtgccccgctgtagggtgaggatgaccttggagcctcatcccctgcagccaggctggcgctctttggactccgagtccttcggataccgagcggaggacacgatcgaggcgatcgctctgcatggattgaccactttctgcgnnnnnnnnnnnnnnnnnnnnnnnnnnnnnnnnnnnnnngttcccgccgaaaggaggatgaccaatgtggaaggaacgggtggacatgcaaggatatctggcatctaccaggacagactgcgccttgaccgtcggtgcatgaatctctgtacgtctcaagtgat

SEQ ID NO: 23170 - DNA, 555 bp, Arabidopsis thaliana landsberg
ttttatgaattgtgatcgagagttcttggcatatctatgagattttcactaaaagcagaatcaaagttcattgtgttacaaaatctaatccttctaatattcttcaatccttctttaaaagcagccttaacggaataactcctacttctaaagcgacttagttgaagttttagtaatccggatgacagcgatcttattatataaagtaaaatattgctaaaaaggaaattattatttagattttaaatattatcggtaaaaatttataattattttttaaatctgcttatttagtcgggttttacctaatatatatatatatatatatgtacgtgaaagcaaatatatatacaaataaaaataatattgtcacgattaacataagtttaaatcgatctcttaacaatattgtaataaaataacaattagaaataaaacatttgaactgtaatttaaaacgatttcttgtgaatttgaaccgtacaatcaaacaaaatggtgaaatttcattataaccattaattagtaaaatctaactatattaattaaatcagt

SEQ ID NO: 23171 - DNA, 1609 bp, Arabidopsis thaliana landsberg
ttttttcttttttgagtttctatctaggcttttatttttttgtggggatttgcatatataagggaaaagcttaagcatagattagatatggtgggataggaagcatgtaaacttatacaacaatgaatcttaactcatttagtatgttgttaagaatatttaatgatattaacattatttgtttgactaacattatttggttattattataaaaagaaaaaagaaagtgatttatttttacttaaagtgtatatattataccaattaatagtcttagaaaaaggaaataaagtaaatacaaaagctatattttctctataaattggaagttaaatttttgatgtacaaaactaattattttgaatttgattagttagtggaagcccccttagcccaatggttaaccaagggtttataattaatgcttttacaccaaaaagtttggggttcgagtctcagctactgcgatttattagtagatttgcagattaattgaggcaagtgtgcaggagatctacaacgatgtacaattatagccgttcgccaaaattgtacacagagaagatatttttgctatccatcaagcgcatggagaagaagaaggaggtgtcgtatatcgtggatctaataagggaaagaaattatgcatagtagaatcgtctatgtaatagctctcgtaatctgtaatagaaaaaacaaactaaacgacctagatattcatgcgttaaaattggttgttttttagttatcaatggaaaacacaccacatcagaattggtggacttgggctaatatatttatgaaaacaaatagtttggggctaatgtattatctaatgggctaattaataaaacttaaacgaactatttctaaggcccattaaacgatagggtaagcccaaatcactatcttacgcccctctttatattcatcgccactgaaactgagaaaagggttagtttcgctgcgctgtttcaagggttttcgtttttatcttttcctccgaagaagaagataagaggttgaagaagaagaagatgccaggtccagttattgaggaagtgaatgaggaggctcttatggatgccattaaagagcagatgaagctccaggtattgtaatcttcttcttctctatttgttttttaagagaatcgatttttgttcgattttgatttggtttgtgttatggagcagaaggagaacgatgttgttgttgaggatgtgaaagatggagacgaagacgatgatgatgttgatgacgacgacgatgagattgctgatggtatttttactcttttactcgatttgattgttttcgtttggtggtttagggatgtttctggaatcatgttgtggatttgtgattgaatcaatctgtttcgagtctggattaggttttctaggttttgctatgtatgacatttgttagggttttgatgttgttattgttgttgttgttgttgtttatgtgaaggagctggtgagaatgaggcttccaagcaaagtagaagcgagaagaaaagccgaaaggcgaagctgaaactcggaatgaaacctgttactgatgttagcagagtgactatcaagagatcaaagaatgtaagtaa

SEQ ID NO: 23172 - DNA, 597 bp, Arabidopsis thaliana landsberg
actttccaacaagtgatcatgaaactagctaatgtttgtactctatataatttatccaacaccatacccatacattgttaagctctagttaacttcgattcctacaagtttgatcaacatagattgtcaatggactcttagtgtaaaatctttattctgttttgatattatagattgtgagagtcaaaactcgcacaatagaaattgttttaagggtttcttcaaagaacgaatctttgtgagattctcaaagaacaacagaattgttgattaccacggacggtgttcttgcttgtattattgaaatagtaaggatttgatcgtacaagtgttttagaatatgaaaataagtgttttgccttcaaagtcagagcgtttttgatagcctgaagttgagagcgtttttgtgcgtatctgccatttacttgtcccttgaggtgctttatataaggctttgagccgccctcgcgatattcttgggagattcgttgttatctttgaggcggcagtgataaatctttatcttctggagatctttgcgggattttcctttgttgttaatatcttaatgatttcaaatatcatttccaggttttc

SEQ ID NO: 23173 - DNA, 562 bp, Arabidopsis thaliana landsberg
ttcggtgaagatgtcagcagccaatttctgttttatttgtttttaggttatagtgaatttttacgctttagtgttttttgggcttttagttttttttaaactaaaacagtttgtttttctaaataacaggcctaggcccaattagtaacagatacagtatttaacattactgtaactttttcgacggttgaaattctcatttaaaaacggttgtaaatcattttaaaaacgattgtaaatcttttcataataacagttactgcagctttttcaacacttttaaaacgcttttaaaacagcttataaatcgtttgtaaatctcttttaaaaacggttgttaatcattttaaaaacgattgtaattttttttcataataaccgctattgcagctttttcaacacttttaaaatccctataaagcaacttgtaaatcgtttaaaaatcctgtttaaaatcatgtttaaagtccttttccattcaaatcaaagcacctgttaacccaaacaaccattatacagtaatttttgtaaaacaggagttgaactaaaataacttcataaa

SEQ ID NO: 23174 - DNA, 702 bp, Arabidopsis thaliana landsberg
gttttgtttttttccacatgcttcagccatggtggtgtctttagcccattcaagatggctcagataggcagtcccctcttcagttttgcctctacataacaatagcatggcatacatgtaggtagcttctttctggcttgcatcagctgctttgccaatatggcggagaccaacgtcagaatgattaaggacaaagtagcgtattataccttttatgtagtaagcatttgggttgttgttgtcaagacatttcttcatagtaagaaggtgtttgcgtgccgataacgctttattcaccaacggagtaagattaagagttttgagcacgcgtttgtcatttgtgtatgcacctagttcttttcatataagaatgcaattttgaaaatcttcagctgatgttgctccaactttaacaactatttctccaagtagatcttgaggaagtgcctctaggcgactattatcagctttgttgggatccattgattttgtgggaaatatttggtggttgcaattgtgtgataactttgtttatttgtacttgtttaaatagattagtgtggatctttcctcttctcaacttacaaattcttgttttttttttctttattggtgtttaaaagtatgaattcagtgggaagtagtatttattctttgtaaaaattacaaatttgcaatacacgttagttccattttgggagt

SEQ ID NO: 23175 - DNA, 484 bp, Arabidopsis thaliana landsberg
ctgcgatttggtcagtcggtgcggcgatttagtcaaggttgcttctgagcgaacgcaaggcctcgggcgagccggtgatgtgtccgccataaaaagggggcctcggcgagacagaagtctctcgaggtcggctgcccttggccgaggctaggcttgagtgaagcgtgatcgagtcactcgtgtggactgatccctgacttaatcgtacccatcaggcctttgcagctttatgctgatgggggttaccagctgagaattaggcgtcttgagggtacccctaattatggtccccgacagtaggccgcgagcctcgcagggagtgtgagcactagcttggaggcgttcgtcgcacttttttgcaaggggaccagcctatctcggttgcatttcgcaccggtgagtgcgcgcgacggccgtgttacgtaacccccgaggcctcggaggactggttaactgcttcgaggtctgaatacctcgcgcaatg

SEQ ID NO: 23176 - DNA, 981 bp, Arabidopsis thaliana landsberg
agacgattaaatgtaagtacctatggtgggcatacatattatctaatatcaaggtctagtgagctactctagaactagcattaagaacaatcaaaatgaagaattcctagagataacctagcacgggggcaatctactaaaatatctaaatccctaatgagaaaccctaaacctaacaagtggattactaagacatgatcaaagaaacacaaatcatagtctgaataagaaataaatgatgaaaataacaagagaaaagagtaagaaagatcttctctcaagggagtctccacagggttttgctcccaaagtacaaaagagatagagaatagcctctccaagcttacgtctaaacaatgaccctaaaaacctaattatatgtctaaaacatgtgatgggccttcattaaacataggagaaagttctgggccaaatttagaaatcttcaaaagatcaataagttgcgtcttcgaattcccgtcaggtattggtgtcgctcgatatgaggtgggtgtcgttcgaaaacatgtaaagacctgaaaaggactagaaaagactttagaaataacaattagactttaaaacctatacctaaaacatagttaaaatcggtaaaaatatggatatatcaactcccccagacttagtttttgcttgccctcaagcaaaacacaaaagccgaacccttggaaggggtttgaaaacacaggaattcccaacattctctagtcaattgccatgatcatcctaaccaaatccatatgcatagaaagtctaatcaaatcctaactaacatgtacttctctgcaagcttacataacattctagattccatacctaagttccacaactatatccaccaggctttcatcgctgggtctcatcaaacaagctaacattcaagatccttctaaactcattcctgtactataccatgataaatcgaccatcctttatgtatatatctttcgctccctcaga

SEQ ID NO: 23177 - DNA, 545 bp, Arabidopsis thaliana landsberg
cattcatttcctgtaaccaaatttcagttaaatttacattgaaccacattataagaaccttaatcatggtcaattattgagtaaatctcttttggcctcacataggttgaatccaagatcagtccaattctccaaatcccaggtacatttcggtttaattttgggttcggtttggttcgatttatttggattttgtaaaactctaaccatactcaaccgaacttaatttggtttggtttgtgtttgagtaagttttaatttgattcgggtcagtttggtattagttcggttcggtttttaattctttcaaaaaatttaattattcgtataaacggaacaacaaattaaatatgaaagttttttttgagttttactccaaagatagaagtagaaccctaggtttttaagggttagagttttagagataaattaatatttagtttagttatttacaatattattaatctaattaattaattaaattagtaaatacattggattatcagttcggttcggtttaaaaccgaatcgaaacgacctattta

SEQ ID NO: 23178 - DNA, 158 bp, Arabidopsis thaliana landsberg
tacttggtgatggtagtcggggcccggaaccgagccgggaacgcgcccgtcctatggcccggctgaaggctcgcggacctggtggttcgggcgagggactccgatcctcctcactgtcgtagcgtcctccacgcctagggtggtagcctcggcacacc

SEQ ID NO: 23179 - DNA, 872 bp, Arabidopsis thaliana landsberg
agaagaagatgaaaactgacgttttacttcaaagagagaatcacgaagcgggttttcctcagaaaccaggagtataatgaccaaaagaataaggacgatcaaggccagtgatacactccctctgagtatatgactttttccaccaaacatcttagagataacatcaactctctcaacaaagaaagctccttgctatgttgttaagttcaagatcctaagaaagacctgtcagatagtgtaacaaaatcttgtcagtcgttgaatcattcaaagacaaaagaaaaaggtttcctctttgttttaacaatcaaaatcccaaattctagcaattgaattttgtatagttttaaggatggtttcttcttcaatccgaattcatccaaatcagaaaacataaccaaatcaggaaatttgattaaacccatggataataaacagaattatatccttaaacccaaaatcaaatatctaactaataaggttctccacaaaatcgagctcgaagatgattgaaatcatttaccggaaacgattgatgatgattggatcttcaacgagcaaggatagtgaagtgtagatctggagagcaagcaaattacgaatccccctccgaatttggatctctcacatgttcgttggtcaataaacaatattcattgtacgagtgactcatcaaattcaacgttgatgttttatttcttttcttgtgtttggcttcttgaatttttcggcgcaataaagtggtggtaataatttgggtgattcatgttcttttcgctttaacaatgttcccataaaaaaaagaaaggtcattccccgatactaaaactgatgcgttaatttctggatgagaataattagttaataaataa

SEQ ID NO: 23180 - DNA, 647 bp, Arabidopsis thaliana landsberg
gttatatcagtagtgtgacacctcaagtaacctacaaaagagtagagacaaccacatacaagccaagcaatattccataccaacataaaatccagaaactcgattttaaacaactactgtcaagggcataaccatgaaaatccgaaacacaactgagttcttggttccatacattagtccaacattaaacacacataaaatccgataaagaagccgataaagaaaaagagcatggagttttcacaaacacaaaaacaatcagggacaaactccccctatcagaatgcacatctaaagaccgaccaggactaagcaactaagcattgtcatctaattcaccacatcgtcctcttcctccacattctcatctcccacatcatccggaacagagtacgaaacatcagaatactctagccctgcttgagtgcacactcacataaaaaaccattctcaacagataacagagtgtaagtggagtgaaaaaggtttcctgcaagacataaccgcatcgttgtgagagaccaatgaggttccaagcctgcaccaaggtggggctgctgtctgagccaagtataggttcacttcatggtaacttcacggtcaacgcatggactcgtcatagagcggcatgcctgaacggcatttga

SEQ ID NO: 23181 - DNA, 343 bp, Arabidopsis thaliana landsberg
gtttgtaaattttatttttctaaaattgatcatagaaaaaaaatctatgtttatcgtttaattgttaacatttcggcggttggagatactactggttttgtttatcgcctatcgtttacaagatgaatataaatctataaaactgttaaaattctaaattcctagagataaacttggtaacttaattttttttcttaggactaaactaaatggtttgaatccaagtacataattgttagtcctctaccagcggctcgcatgggtattcaacaaccaatcctttccttaaggcattacgtagcctatataccagggtattaatatgttttttttggttaaaggg

SEQ ID NO: 23182 - DNA, 1209 bp, Arabidopsis thaliana landsberg
ataagatgtaaatagtaatacattcttaccaccagaaaaacaaaaaaaatctagtttaggttttgctttctatacctagaataggttttggttagaggtaaagttgattttttattccttgtttgattcttcaatcaaagaaagcaaaagtgttaaacatattgttgtttttctaatcaagttgtaataacttttggtcctaaagaaaagaaaaaaatacatttggtgttatagaaagacgcgttatagatcactcgtctatatgttttttaagtcatccacgtctctaacagctggagtttgataaagtactatctaaacttacaatcattatgtctgtaatgcttgacacgaacctatatgatgtacacatacttcactttttaattgatagttttcaggatcactttactttccttttgaaataattgacattaaagtttaagaggccacagggcaaaatgatcatctcatatagcctataggccttcaactaggctcaagtaagtttatctaggagtgattttgggtgttgcaagcattaataatgaaaatttcggattttggagcggatttggttcgggttattttagattcggataattaggatgagggagtttattatccgttcggattatatgattattcgaattcggtttcggttcggatggtgttagattcggaacggtttcggatcagtttttgatttaaaaaaaaaacaaattaaaaaattgtacaattttaataaaaatcgtttaattttactaaaatttggtttaattttgcaaaacattgtataattttaacaaataaaagtaaaaaaatcggacagtaaagttatttcggatatttttgctatttagtattttttggatataaattataactaatatttttagatatataattttatttaggattagcggatatccgttcaatttttggttcggatcggatttgtttcggataattcagataggaatatccattatgtattcggattttgtgactattcggttcggtttggtttcggagccggatttttgatcaatttttggattttatgcccagccctaagcattatgccgatgtaaaaaaaatttgactgatcctaaaatttttgactgatcctaaaaaattggaatccataacctaaaccttttttgttgaaaggtaagaatgatccctcactttctaacaactgaaacc

SEQ ID NO: 23183 - DNA, 501 bp, Arabidopsis thaliana landsberg
ggagagagttactcttctttatatatatgattttaaatccttaaaagcatcttccaaacacccacttaattgtttaacatccatgacataaaaattgaaaatcggaataacgattagttgttaacttgattcgcgccaaatttgtgccatatatgctcaactaaatcatctttcaattgttgatgcatagcccgatcacgaaatcgggctcgagactccatagtattatctagatttgaatgcatatatgtagaatagttgaaattcacttgtgaagaggtggttgattatacccatctcgttcatcctccactatcatattgtgaagtattatatatgctcgcatgatcattcccatcttttctttatcccaaataagagcagaactttttaaaatggcaaattgagcttgcaaactccaaaagaacgctcaacatatttacggcaaaccttttgatttgtagcaaataaataatctttgtcaccttgtggaagtgaact

SEQ ID NO: 23184 - DNA, 626 bp, Arabidopsis thaliana landsberg
  unsure (1)..(626): unsure at all n locations
aattgcaactattatacccttaattatgtgagtttaaaagtgtcttttaaaataaattcttattttcttgtttttaaaaaatgggtttaatgttagaccctctacttcaccaagagggctcactttgggtttaatgtgaagggagtgtattacttgtgtagggtattgaaagtgtatccaaatggaattagatatggaattggtaatacgttgtcactctttttgttgaatgagtcaaatgaaaaaagttagatagaacgtataaaaaaattcatatgaagaaaaaatttatgttgaacaacgacacaatgtaaatcttttagttataggcaatgttcaaaaaagaaagcgcaaggcgttatatatgcggtgatccaatgcctagcgtcgagaacgtttaaccgatgtttaagtgatataagcggcttaagtgattcaattatttataattataaaacactaaaagtatgatcttatacataaaaattacataaaatatctattagaaaattacatatagaattgaaaccaaactaaagaaatcattacttaattatattaaaatacataatgntatactatgctatgaaataaacaaattaaaattggataaatctaattatatt

SEQ ID NO: 23185 - DNA, 582 bp, Arabidopsis thaliana landsberg
tgtaacttatggtgtgatacatactgaattaggttgtgcatatgctagcctatgacattttttacttcttggaactaatggggaatctgtcttttatggtgcagtgacttgctgcaaagcgagtttataactgaacctagagataatttggaagaacgtgaagcagcaatcgagcttcgggacagaatcgaggaacaggagtcgttactcgagttcttgttactgattcaacagaggaagcaagaatctgcgtatagattgcaggatactgtttcacttctttcttctgacattgagcaagttgtaaagagacagttaattatgaagaaaaggggaagctcactctctgatttcagtaaagatgatcatcaatatacctctggtcagccattgatgagtttccaggcaaacgaggagccatcagcattcttggcctcaagaaaacgggttagacaagggattctggcattggaaaacggtgttgaagttgatgaagagagtcaaggaagcacacttcttgaaagctcccggttgatgagaaacttcatgaaactagaatcggtctactttctgacaaggcgc

SEQ ID NO: 23186 - DNA, 955 bp, Arabidopsis thaliana landsberg
  unsure (1)..(955): unsure at all n locations
taacttagacccaattacaacgtatacaaacttttaaatttatatgcttttaaagttaaatttcatgtttatttggattcattttgatcttaggataggctattttatgttattgtctaaacattttagccaatgtgtgacgttaaacacacacatttttcatcatttgggtaatatatgtctgtttttaaaatttcaaatcacaatatatgcagaaaaaattgaaaatttacttagcattatttttttatatgatgatttaaaacggttaaaaataatcaaacaaaagtgataggataattataattttatattataactaaatcttctaaatatctatattgttaaatatgatatccggtgtaagagttcggttacttataacccgatcccaaaaacaatttatagaaaattcggtgtaaaattttgaaatacattttgtgccgggtcggataccaaaagtcagagataaatttttaacccacttgatacaaaaaatactttaaaaatactaattaagataatgtgtgttgaaagtttagacattttctaatgtatatttgttttcatatacatccccgattcactatggacatcattgctgttagttaatccaaatatgctttgtagtataatgcaatgtgtccaccttatgagcctctcttatcttccaagatcaaggcttcttttagcatggnnnnnnnnnnnnnnnnnnnnntcagtttggaaagagccacggcctgaaggtaaaatgcagttggccattccgaatagacacattgtgcttgcatcgcgtctcgaagtgctgcatctggttggtcgcagaagagatagcacatgcttcttcgtgcataaacagtgggagagatcatgattcctatttctatgaactgaaaaaaaaaaaaaaaaaaacaattattaggaaaaaaagtggataaaaatttcaagtgagtat

SEQ ID NO: 23187 - DNA, 964 bp, Arabidopsis thaliana landsberg
taggttcaaatctttaaaagcaaatgctttttcctttacgcatacacgaagcactatacatcattttaggaactagaaagagacaacagtctctcagtgctttacaaatttaatttgatttagttgtctctttgaacttgtgtcatgggatctccaatctttgtaggtggggttaccatcaaacttcctcttaggtggtaggctttaaacccattcctcttgatgatcttgaaacttgatctcgattcaaaccttttgtaaatggatccgctaggttgtcagctgacttgatgtaatcgatcgtgattactcaagttgagataagttgtcaaatagttttatgtcgtcgtctgatgtgacaagatttacgattatatagggtactttgtgccctgcctatagctaattggctatcaaagtgcacacgtattgtgggcacaggtttcccccacattgggatgtcttctaagaaattactgagcaattcgtcttccgctatagttgtatcgaacgctatgaattcagattccatagttgatttggctaacacagtttgtttgcaagatctccaggatactgctacacctccaagtgtaaagatgtatccacttgtggatttaaagtttttgaaatctgcgatccagttggcatcactgtaaccttccaaaactgtgggttctttacaataatgtaagccatgatctttggtataacgtaggtagttcaaaaatctagttatagccttccaatgcttatgttctggattgcttgtgtagcgactaagtacatttacagagtgcctagatccggtcttgtactgtttgtcaagtacattaaattgccaattactcttgcatattctacgtgttgcataggttcacccgagtttttggtcaagtgaagttgaggatctactcgagtgtttgcaatcccatttgaggaatgcttgaaacgatcaagtatc

SEQ ID NO: 23188 - DNA, 454 bp, Arabidopsis thaliana landsberg
aacgtcggacccctccgtcatcggccaatggatacacgacgttctctccaacaaccgcttctcctttcattctctcgttgtcggagtcggagttcagtggacaccgcctggttaaaactccgattctccaccggttagttattactccgattcttcatctggtggttactacgatcctccggcggatacactgcagctatgcgttggcaatcgatgtatcatcatccagctttctcactgtgaccgcgtccctagagtccttcataatttcttagcgtatccagattacacgttcgtcggtgttcggaatagtcaagacgcgaggaagctagagagatctagacatcagttagagattgatgatcttctggatttgaggaagtacgttgaagattcgagcggaaggaggagcatgaggggttgttcgtttgaggtgattgttgaggaatgtttg

SEQ ID NO: 23189 - DNA, 474 bp, Arabidopsis thaliana landsberg
accaattcacgttgtagctaatggctatactaatatttgttatttgtgcttgtgttaaagaagagaaacttgggggtgtgtttcagcaccatgaacgatacatagatgatcttgagatatagattacgactaagattgaggccgaaatggtgttgaagagcaagttctgactctgacactgaggattataccaaactagttattaatattaatggagaggctggatacttcaaaaactttagatatcagagtacctgtagataataaacgttggccacacccatgcatatactcttattttccaagtttgatccaaatcgaggaacctgcgctaagcaaaaggaaaagagaaagcactttagaaaagcatcggtgtgatcaaaacatgttgtgacttgccgcagttgaaaacctaatgaaatagatatccgtaggaggaggcgcaaaaggagaaaacgcgatgatgcattagag

SEQ ID NO: 23190 - DNA, 1502 bp, Arabidopsis thaliana landsberg
  unsure (1)..(1502): unsure at all n locations
atgctacatattattgttttaacatacttttaagaaaaaatgcggtaaaaaaccttcaaagtgacaaattttttatccgctcttaactttttttattattatatacaaatcaaatttaagtaaataactcaataataagatattttaactttaaattcctaattttattatatccatataaaatcaatttctttttattgttttaaattcttaaagagaatatttcttaactttaatttatcttcacatttacataaagtattgttggtcaattggtaactcgatagcgacataacgttttcagtacatttatcagattttatataacttgttttttcttttgaaccgacattatgagatctttagtcaagttggaggattttccattgaaaatcatcttatatcataagctttaaaaaatttaattgtgaaggtttaaatcatatgtttgtaatacatgcatttccatttcacccccaaaaaaaggtaatattgaatatattaaggtttaatttatagtaaaacatatcaatttcacacaaaaagagccaaaatatagtgcattgaaaacttttaatcaagtaaaatgtcttcattaaacatatcataatttgtaaacatcaaaattattacttctaataatttctatcgatatattaacaattatagaaaaatattatatataatttaatgttaatatcattctatattcaaaactaaaaccaaatatacaattcacgcatcgtttggataactttctagtatatatatatatatattagaatgaaaaagtcttgtagagcattagaccactaataattaaaaaaatctataattatattatattttttaatacaattagacccactaataaaactacaagtattaaaggttcacccgactctcaaatttgaacctaatactaaattatacctctctgtcttttcttactttttaatatttagtttttaatggtcaaaaccctttttttgtgcaaaagataatttcattcaaacttaacccatatgtagtacaaattttaaacaaacatcaacctcatggttggaaacatcaaagaaaaccacaagttctctcacaagagaatggtaaaggaaaatgatataagataatttgacggtagatccatacatcgaagacaagaacaatgtagtaacttgctacaagcgagagaatggtgagtcgaagacaattacacgaatattttgggagattgttgaatggtcacggtccaaacgagacatagtgacgttgataaagagtctttaaccttggataacaatggctcgaaacacgcagcttctacaaaggtgattaaggtatccaaatggctttgcaaacttaaagtcggagacaaaccaaaagttcgctctataaaagaggatgattcanaagttctctctataaaagaggatgattctatcataaaattcttagacttatatgaatagtatgagctgctctttaggcactaagatctacca

SEQ ID NO: 23191 - DNA, 1621 bp, Arabidopsis thaliana landsberg
  unsure (1)..(1621): unsure at all n locations
aagcccttttgtttatatatttaataaaaatatatgtatgtatgttaatgtgtagtgactctctggatttatttacgggatactgtcatggggttgtcatacttgtatggtaaaaaatttgtggctaccccaacacctctcattcttcagctccgagaagagctttatccggagccttatgcaaaaatcaattggacgcaaacacgaaaccgatgtggaaaggtaagttctatattagaaaacaaagatgtattcaggttttatgtgttttaataatctatcttacgtacaaactaatgtattcgggtcttaaaactaaaaagaaaagaaaagaagaagctagtattactaacacacttaccatacacaataaaaataaagaaacatacaattagtttttgaactttctccctgaaattattcgtgatgttttgattattatacccaagtaacacttcatttctactatttcttttatatgtgaatcggtatgcaaattaaaactatatatttatctattgtgaacacacatatatacatagtttcctaaacgtccaaagtagatcaatcatttttcaaacaataactagttgataatcaacattatatgtgggggatgaagatattgctaataataaatacataaaatatttaagaaaaaccaaaataaataaattaattcccttagtttgcaattaattttctaaagaagtctttgtttaccaaataattcatatattaaatgaatgtaatgattctcatatgcaggaagatctctattatccacagtcatttttacaagatttgttttggaaaggtgttcatgtattctcagagaatatcctaaatcgatggcctttcaacaatctcataagacaaagagctcttcgaaccactatggaacttgttcactatcatgatgaagcaaccagatatattacaggcggatctgtaccaaaggtaattgctgttgttgttttcttcttctttttcttgttttctactatttgtcacagaatgaaatctggatttttatttttgcatttttttatatataggtttttcatatgcttgcatgttgggtagaagatcctgatggtgattattttaaagaacctcttgctcgagtccctgatttcatatggattgctgaagatggccttaaatttcaggttggttgtaaactttanagtcgaaactcatatcgaacatatcactaaggatgtataatatgtacaacatttgcagtcttttggtagccaattgtgggatacagccttgtnnnnnnnnnnnnnnnnnnnnnnnnnnnnnnnnnnnnnngatgaagagattaggtcaacgctccttaaaggatacgattacttgaagaaatctcaagttacagagaaccctcctggcgattacatgaaaatgttccgccacatggcgaaaggtggatggacgttttcggaccaagatcaaggatggccagtttcagattgtactgctgagagtttagaggtaaaagtagttaatgcaccagctttagtatactaatttactttcttagtctaaagtctataaacttatattggtcaaaatctccagtgctgtctattcttcgagagcttgccaacagatt

SEQ ID NO: 23192 - DNA, 507 bp, Arabidopsis thaliana landsberg
aagcaacgttacaccttgtataagtcttcatagtctttacatactctttaggagttaagaataatctctcaggctgaagaggcatgggatcctgatcagaatccatctctatttcctacaatattaatacaaaaaatttagtcccagaacatagttgtacgtattggtactctactgtactaaaacaaaatcaaacatccacgtctattacttacctcattatcagacacaggatcattcgccgatgagtccccttcatgttcatcgtcactatccacatcagctgcaaacactaaatggtttggatcagactaattttgtgttttggcagccctttcacttctagaactagatcctcctcctctggtaatagccatttaataagtacctacaacaaaaattacatattccatatcaaacatttataaaaaatcttaaagtatcaaagacataatttagattaagacacattcgaatacaaacttacaattcacttacacccaaata

SEQ ID NO: 23193 - DNA, 646 bp, Arabidopsis thaliana landsberg
gaacgtttctaggacgacctcctataaagccggtacgttcccggttagccattttttctttgttttattgaaatgagacatttaaccaattaacctatctagattaacttaaagcttatactatgtttcacaccatggaaaagaaaaaactaatctaacatgttttagtctcgcaaagattacgagatctgatgaagtccaaaatatcttgattacaaaaaagaagaattgattatcattgattaatcgatagatattgaatatttcgttttgttcatatattgagaagagttaatggtccatttgaataattccagtatagtggcgttactcgtaagtgtttcttcgtaataattgctcagttgatctttggagttatgcattatagcatagaagtggcaatttgtcattggatagtagaaaagtcatgattagaagcaaaaataaaattggtttacgtaagtagaacaaaaggggaaaatcatatttgatcctctccctgtaagatggaaaaaacaaacgaacctgtcaaatgtaaaataatgggtccatttactgcaaaaagtaaaagtcggggccctgaattttggggccgccagtaacctcattttacttttctccgagtctctcaccaaccacagtacag

SEQ ID NO: 23194 - DNA, 5188 bp, Arabidopsis thaliana landsberg
  unsure (1)..(5188): unsure at all n locations
ggcagcctaaagcctaaacctggtgattatgctcagtattcacaactttacatagttgatatagaaaacaaagttgaaattagagctactgtcaccaagtaatcattttcgtctactatttttttttcctacaaccgctcaaatctttaacaatattaacattgcctctcacgttttctgtattttgtagcaagggaaaaggtggtcagaatacagtggcaaagcagaagctaaagaaagaagttattgaagccctaattgaaatgctaaacaacgtcaacccttatgttgaaaaattcagacaatctagagagagaattcaagctgataatgatgaactgtttcacatgcggattgttgcatatcgaaagggtgttgataggaggacatacaatatgcctacatcatctaaggttgccgctttgatacctggaggttttgacccgaagatgtacgaccgagatatatatagttcttgaagaaaagactacaggtcatctaaagcggataagtcagattcatatctcctatttggcattgcaatttcctcttattttgtgctatggcaaagatggtttcactcctgatatagagaaatgcttgccaatttcatccaagaagaaaaaaaaagtgtataagcatgcgtcaatggtttgcattcaggatacaagagaggccaaacgagtgcaaaaccttgacacgctcaaagaggttgtttcaacaatttctctgtgatgcttatacaactattgaatctaactgcgtttcttatatcatgtttaatcaatctaagttacgatgtgagaactacagcagtttgaaaaaggcctctgaagctggaactacctctataaatgaagaaggtaacaaggttctaattccaacttcgttcactggaggaccacgctatatggtccagagctactacgatgcaatggctatatacaaacactatgggtttcntgatttattcatcacatttacatgtaaccctaagtggcctgagataacaagagatgttaaggaaagaggattgactgctgaacataggcctgatattgttgttaggattttcaagatcaaattagattctctcatgcatgatctaactgagaagaaaatgcttgggaagactgtcgcatgtaagttaatttaattctgtgtcattctgtacttaaactgttgatggcatttacttataataaatattgttttcttatcgcagcaatgtatgtaagttaatttaattctgtgtcattctgtacttaaactgttgatggcatttacttataataaatattgttttcttatcgcagcaatgtatacagttgaattccagaaaaaggccttctacatgcacacatccttttgtttatggactctaaaagtaaactgccaacagctgacgatattgacaagatgatttttgcggagattccggataaagaaaaggaacctgggctctatgaggttgttaagaactgcatgattcatgggccatgtggtgcagctaataagaattctccatgtatggtcgatgcaagtgtttgaaaaattatccaaaaaagtttgaggatattaccaaagttggtaaggatggttatcccatctatcgaaggaggatgacagaaggctatattgagaagggtggttttaaatgtgataatggttatgttgtcccttataataagaagctgtcacttcgatatcaagctcatatcaacgtggaatggtgtaaccagagtggttctatcaaatacttatttaagtatatcaacaaaggagcagatcgtgttgtatttattgtagagccagtcaaccaggacaaaacaacagagaatgcgacctctggagaacctccaaattctactgagaaaaaaaaggatgagatcaaagattggtttgactgcaggtaattgtttaaaccgtcacccatttcatagattggcattgttaatatgcgatatttaaacttaattttattatgtttaggtacgtatccgcgtcggaagctgtttggaggatttacaaatttccacttcaggatcgatctacagcagttcaaagactatctttccatgatgaagggaagcaacctgtttatgccaaaccagatgctgatattgaagatgtcctcgaacgtataagcaatgaagattcaatgttcatggcttggttgactttgaataagaataatgatgttggaaaaaatggtaaacgtgctagagaacttctatattctcaaatccctgcctattttacttgggatggaaagaataagcagtgggttaagagaattagaggattttctttgggtcgtattaactacgtgtgtaggaaaatggaagttgaatactatcttcgagtgcttctcaacatagtcaaagggcctatgagttnnnnnnnnnnnnnnnnnnntaatggtgtcgtatatccatcattcaaagaagcatgttttgcaagaggaattctggatgatgatcaagtttatatagatggtctacatgaagccagtcagttctgttttggagattacttgagaaatttttttgctatgttgtttttatcagattctctcgcaagacccgagtacgtatggtcagaaacatggcaccttttggcagaggatattgagaacaagaaaagagaagactttaagaatccaggtaatattttaaaatacgcaaaacgtgattcattatattagatgaacgtgaaaacgtaaatcattattcttttgtttcaaaacctaacaaagtttttctatttattattaataaacacgtgcagatctgaaacttacactggctgaaattaggaactacactctgcaagaaattgagaagattatgttacgtaacggtgcaacactcaaagaaattcaggattttccacagccttctagagaaggtattgataactccaaccgtttagttgttgatgagctgagatataacatagattctaacttgaaagaaaagcatgatgagtggtttcaaatgctaaatacggagcatagaggcatatatgatgagataaccggtgctgttttcaatgatttgggaggtgttttttttgtttatggttttggaggaactggaaaaacttttatctggaagacattagcagctgctgttagatctagaggacagattgtgcttaatgtagcctccagcggcattgcgtctttgttgttagaaggtggacggacagcacattcaaggtttgctatcccactaaatcctgacgagttttctgtttgcaagatcacaccaaaatctgatcttgctaatttgattaaagaagcatctcttattatttgggatgaagcgccaatgatgagcaaattctgttttgagtctttagataaaagcttctgcgatatactcaataacaaagacaacaaagtttttggtggaaaggtagttgtttttggcggtgattttagacaagtacttcccgttattaatggtgcagggagagcagaaattgtgatgtcttcactcaatgcctcatacctttgggaccactgcaaggttctgaaattaacaaagaacatgcgactcctatcaggcggtttaagtagcgaggaagctaaagagatacaacagttttctgattggttattggctgtcggtgatggtaggattaatgagcctaatgatggagaggcacttattgatattccagaggaattgttgattaaagaagcaggaaacccaatagaagctatcagtaaggaaatttatggggatccgtcagaactacatatgataaatgatcctaagtttttccaaaggagagctattttagcaccaaccaatgaagacgtcaatactataaaccagtatatgctggaacatttgaaaagtaagtcagccaactaccttagatttttacggtttaaactaattgaaaactttaacggtttatgcttattacacgttgcttttgtttttttgtaggtgaagaacggatctatttaagtgctgatagcattgacccaacagattcggactcactcgccaatcctgtaattactccagattttttgaacagtatacagctgacaggtatgcctcaccacgctttacggttgaaggttggtgctcctgttatgttgcttaggaatcttgatccaaaaggaggcctttgtaatgggactaggctacagattacacaacttgccaaacaagttgttcaagccaaagtaataactggagatagaattggtgacatcgtgttgattcctctaattaaccttacaccttcagatacaaagctgccattcaagatgcgcagaaggcaatttccactgtcagttgcttttgctatgaccatcaataagagtcagggtcaatcactcgagcaagttggactctacttgcctaaacctgtattctcccatggccaactctatgttgctttgtccagggttacctccaaaacaggtttgaaaatcctaatactagacaaagacggaaacatgcaaaaacaaacaacaaatgttgttttcaaggaggttttccaaaacatagtttgagtaaaagttactccatctatgtgaccgtagacttgggtaagtcaacttctcattatcaaatttatatataatagtttcaattacggtttgaatcacaatcacataaaaacttatatctctattacttttctaatttaaaatgcaggtatttttgtggaactcaacttcaaacgaaccaattcacagaaccaccatttcattctattttcattaacgtctatttttatttcaatgcaagtttaatcactactcccatttcaagtaaacatcttatcatttctttttcagcttcagtattttgattaaacagaaatctgattgattcataggcaatgcaatacaattacttttcctaagtttcacctattaatctaaatgtagctacatagattgtgtatgcatactaaccaaagtacatgataaaacatgattgcgatttcttgcaatagccatcatcaatcatcttgcgttgcttgaaataaccatctcctcttcttgctgcaatatccaaaaacaaaccatatccttacataaacatatatcctgaaatgcatatcaatattaaaccttatagagattaggattgaatcacaaagaaaatagtgaacaagcgagattagtgatatatgtaaagaagacgtgagc

SEQ ID NO: 23195 - DNA, 492 bp, Arabidopsis thaliana landsberg
gcataccatagatttttcgttcacggttctccggaagactagggttttcggagtcagtaaaggaattcaaagagcagaggtgggggttttgggttctaagtatcaaacaaggtccaaatcaaaccaaactctacccaaggcttctaaataatgtgtagagctcatataaaaaagtttgggcatttttggacttattatctattttctaaaaatccagaactaatgttttaggctattttaaatactccaaaattccctatttaacctaaaaatcatggtactatttttattaaatactgtaggaaattagggatctaacaaaattggtctcatatttttaggatttttctacaatttcctagaatttatttggccctggaagaaaaagaaaaggaaaaactagcaacagtactgggccaattttagcctagtcagcccagcatacagggaacagggtcgcgcggccacgcccgttgtggaagctttgcagaa

SEQ ID NO: 23196 - DNA, 464 bp, Arabidopsis thaliana landsberg
aataactaccatgtcaacacccattcaaattgattcagccggtggtaaagttcgagccgatagtgtttgcttgaatgtaagtgtggaaataaggggaatagagtttcccgctaacctcaaagtaatgggtactcagggaatagatgtcatcctaagcataagttggctagataagtaccaagcaattatcagttgtgataagaggacaattaagttggtgtcccactaggagaagaagtggtggctgagttagtctcacccgatccaaggaaaggaggttgtcatcagatggctattgatagcaaggaggcaaatttactcaggactatcaaggttgtgtcagagtttctggatgtgttccgaaagatttaccaaggcatgccactgagcggaaatcgagtttgcatagagcttctcctagcaccgccccaattctaaaagagcttacaaggtatctggacaga

SEQ ID NO: 23197 - DNA, 1015 bp, Arabidopsis thaliana landsberg
ttatttattcttattaaaaatggtaatatgtttatacattaaaaattaaattaataaattattctatttaacttcacttttttgtttaaatatttgtttttaaactgcaaagctgcattttccactaaaaccgtaaaaccacgtttccccgtcaaaaccgtaataccacgttttcccatcaaaaccataaaaagtgttttccgcaaaaattgaaaatcatgttttcccgtcaaaaccgtaaaccaacgtttttccaccaaaaccgtaaaaccacgttttttccgccaaaccgtaaaactacgtttcctaccaaaatcaccaaaaatgtttttctgcaaaatcacaaaaagtgttttcaaccaaaactgaaaatcacgttttctcgccaaaatcgtataccgacgtttttccgccaaccattttccccccaaagtatcacaaaatgttttcctgccaaaattacaaaaaagtgttttccgccaaattgaaaatcgtatttttccgccaaaaccgtaaaccgatgttttctcaccaaaaactgtatccaatattttcttgcaaaaaccttaaatccgtattttctagccaaatttttctttgccaaaagaatattcactcataaaaatttgtaaaataattattgattatattatgttatatagatctaaataggtttaaatatatcaataataatttaaatggaaaagataaatgaaatataaatttaaatagaattaaatggtttagagtaaataggatggattttaaacgggatgggttagcccatattaactatgcgactaaactattttggctttgcaataataacaaatgaaacctgtcgtcagttggtggatttcttaaacccaaggtgcgtgaaaataaatatacaagtgacataagttgtaaacagtaatgactagtgtcatcttttaacaaagttgatttgttgacttagacggcaaagtctagacggcaataatacgtgtcgtattctgtgtggatgtttgccaaa

SEQ ID NO: 23198 - DNA, 576 bp, Arabidopsis thaliana landsberg
  unsure (1)..(576): unsure at all n locations
atgagtttcgaatatgttcaatcattttattttaagagagtttagaaacttcatattttttatttgatccaattaaacccatggggtctgtgatctttaaggttgtggcgagatcaactttaaacaatatgtaaattagtattttctttattggttgaactatttattcgttgttattgttttgtttcgatatggctgggattgagccactcattatccaaccataaagagacttgccttacaatgactaaactaatgaacactaaagagagaatcaagctcagttgtctaatttcttgccatgtctgaaaattcgatgatattgaatataaatataggaaatagcaggaatgagaaatgcattcacaaaaacattttagcttatcgaaaaaatgataataaaaatgttacattntacttatatcattaagatgacgagaacattttttattgaggaaagttgactgagaaataattgatgaaagcattaaatgctcgatatccatgttgaaaccttatcaggtaaaaatgaaggacctgacaaagtttcaccatgggacatcgagcatttaatcc

SEQ ID NO: 23199 - DNA, 454 bp, Arabidopsis thaliana landsberg
ccacttacaatcttctttccattcgcctttatgcgcgttagccgccacttttgatctgcaatcatctctggtgacagtccccatgtggctaactcttcctctgtgtgatgaatcgccaagctgtaatcaccgccttgtcctaattccatcactctgatctctactgttcccttggattgtttagtccctcgaactgttccactgaccacttaaaccatttcatcagaaacacacgcgatgttaagccatgtgagacaatcacaaagtttagctcatgagacgggttgatgtgcagtctgttcatgtcaatgtctctccatagagactcgagaaaacctgtataacagcacgcaaaaagagcacatcatgtcttaatctcgtgttgttcattcacacaaagattggtggaagacaagctttgctttcgtgacatttcaaaagagattcctggaaa

SEQ ID NO: 23200 - DNA, 664 bp, Arabidopsis thaliana landsberg
tttggggaggtggggaatgcgaggaaggtgttcagtgatttgggtgaacaggatttggtcgtgttcaatgctatgatctctggttatgctaataatagccaagcagatgaagcattgaacttggtgaaagatatgaaactactgggaataaaacctgatgttatcacttggaatgctctaatttcagggttctcgcatatgggaaatgaagaaaaagtatctgagattcttgagttgatgtgtttggatggttacaagcccgacgttgtgtcctggacttctattatatcaggccttgtacataattttcagaatgagaaagcttttgatgcttttaaacagatgttaactcatgggttgtatccaaactctgctacgatcataactctattgcctgcttgtaccacacttgcatatatgaagcacgggaaggagattcacggttactcggtagtcactggactagaagatcacgggtttgttagaagtgctttgcttgacatgtacgcgcaaatgtggcttcatatcagaagcaatgatcttggttcgcaagacgcctaagaagacaacagttactttcaactcgatgatcttctgttatgcgaatcacgggctcgcagacaaagccctttgagcctattttgatcagaaatggaagcccccg

SEQ ID NO: 23201 - DNA, 2906 bp, Arabidopsis thaliana landsberg
ctttgtaaaagtaacgaagagagtcaattagagaatctgtgatgaaaaagagtcaatttaaagaataaaagaatatatactaacaattccattacaatttctcttggttcttgaaagtcttgaaccataaattcggtcaacaactcgtataactataacccatataggtcgagttggttgaaccagcatctacacataactcgttggctgctgcatgctgccaacatataacaaccaaaaatgcaaaaaacattaagttttataaaaagccaagtcagatttgtcagtgtctgtagtagttagagatgttgtggtgggtaaaaaagctcagcccgacctgaacccaaaataaacccgtccaccaaaaatccaactttaaaaaacccagatgggtttttgaataagtgggtaaaacccgaaaaaacctgattattccgagactactcgtgggtacccaacttggtttttatcgttttcttagagtttatttttaactgttaatatactattatatgtatgttgtatctatattttgtttataaatatattttaaattatatttattttctatattacatatatatttgatgggaaaaaggttgaattgcgtttttggcgggaaaatgttaaattgcgtttttttggagaaaaaatgttaaattgcgttttttggcgggaaaaatgtcaaatctttttcttggccagaaatgttgaatgtcgtttttggcgggaaaatgttaaattgtgtttttggcggaaaaatgttgaatatcatttttggcgggaaaatgttaaattgcgtttttggcggaaaaatgttgaattgcgttttggcgggaaaatattgaatgtcgtttttgctgggaaaatgttaaatcgcagttttggtggaaaaatgtgaaaagaaatttgacgagaaaatattgattcactcgaaaaaggacttaaaaaaactcgtgggtacgcataacccaatgagataaacccatatgagttttatttatttgggtacccaacacattttaaatctgtgttttttttccaaaaaaaactagatctatgaacttaaaattttatgtgggttttgagtatccagcgggttttaacccatcattaacatttctactaacgaaagtttatatatttagtatatagtatgtaattgacgccaaaagtaatgatgttcaacgaatctatcgaatcaatcggcggattcagttaatcaattgagtataaaaatcggcgcatttgatttagctaatcgattaagtgaatatttaagtatgattgtttattgtactcaaccattagtccaattaatcagagatatgtaaatgaaatggagactataaacgttaattaaataatatggtcaactgaaagtcgaaattactaggttacaaatatatgaaataattatcaatcaacacatttacatatgacccacacattacacgacttgatacaccttttttttttttgggtgaaatgtcgtaaacttattctacattctacaacacgatgttgatattcttgtatcagttccaattcatataatttataaaatagttaattattttggaattcgatttaaattcactattcttttatattaaccatcttacgagatgcgtttctgaaaaataatttgatgctaaaatttaaattcataggagtccaagatagtgtttgcataattaaaagaaattgtgttgccaaaaaaataaagaaacaaatgattgtctttcatacaaatttgcggataggccaaaaccgatctgattgatggttggtgaaccgacgcagctctcgtcgtatgatgtacatgcaatgtatatatgcatagcataacatatagtttgtaagaagacatatactctcatatttttggtctaatataatgggagctttcataacaatagaatatgggactaaagaaatgaatgcgtagacaaaaagtaacatgtttgttttgtattgtagcttcctagataacacaagttacataacgattcttaataatattcagcttacattgggacatcatcctcttccaacacatgcttttaacttatgaataagcttttggctatatatttgtccaaaaaaaaaaaaagctatatatatacacattagagaaatatattatataactaaagatacatactaattttattattctttatttaagcttttcatactaaatttgtgtaaagaatattattatatgtaaataagagaaaacactaatgacaatttatatttggtttataatagtgttatctacacattccaagttagtaaaatattttaattccatacgacagcaaaataaaggtaattgtttcatgtcaaatccataaaaatgacatatgccctatattttctaattaatgcatctatacattcaattttcatcatccatttttttctgatttttttttttgacggcaagcattttctgcaattaatatgtatgaaaattcataattgaacgagtctacattattttctgatttttttcatctatatgaaaaaaataaaaatagaaactaaaattctagtgtgtaagtcaaaccaaagtaccaaatattgagcgagtctacctacatgggaggacgtgaagtaagaaaaagtcagaagacttcgcaaagatgatgagtttttttttagtagtttaatttcattaattataatagtcaatcatagattagatattttagctggccaaatcactttttcttcaaatcaaaatctccttttaacccaatctttaacaaccaaaattgacaagctagcatcaacatacacacatatacatcaaccctctgtcaaaccctccctctaatcactcattatgatttacgagaatctcaataatacctcaatttaattactttaattag

SEQ ID NO: 23202 - DNA, 500 bp, Arabidopsis thaliana landsberg
tcataatgaggatgatcatggacgctttcaatccaaaatagaacgagcagtgtacctgtgaactatgatcctttcatggtgataacaataggtgttttttataaatgggcttagcctataaacatgtcaccttggacttattattacgtaattcctctctagtttaaagattggttggcgtgtaactctttctttgatcagcccaaaaccgctaatagaaccgccatctctatcttccaccctcagcttactccagtttattccacgagtgctagctttctcttcgttatggagggttgtctttaccggtgtctggctcaattgatgtccgtctcatccacgcatggggtacaatttcacaaattttctcttttatggagattgatccattttttctctttacgcagatatcattctcgcaaaatttctcctttatggagagatcattccaaaaatttcctcttatgaagagccaattcatttttttatgaagatattaa

SEQ ID NO: 23203 - DNA, 532 bp, Arabidopsis thaliana landsberg
  unsure (1)..(532): unsure at all n locations
tttaaaagaaaaaagttagncgtatatatatgtatattttacttcatacatatatatatgttacaccaggcagggtttcattatcatgtattcatgttctctataaccgaattataattgaaattacaaatatttacaaacaaagctaaattagttcaaaacttggttaataatgtagagttaaagaattttagatttaaaaaaaagtgtagagttaaagaattatgtgtttggagttagattgatttctttatataatgtgggaaatatgaagtgataaacttaagaatattgttttgataatatcatgttagattttaatatttaaaatatataaattgtattcatcatttgtagttgaccgagatttgaccaccccatcgatgaaaggctactacctctctcacgttttacgcggcttgatgtgcttcgtaaaggagccaagtgtgaaaatatacaacactaccactcgacaacttgttgtcttacccgacatagaagaatccaacatcatagcttgagaccacaagaa

SEQ ID NO: 23204 - DNA, 366 bp, Arabidopsis thaliana landsberg
gataattgccacatttgacacagtagctaccatcttttgaataaatccaagatatactatcattgacctctactaaagatggtctaataaccttgattagatttctgtcttccaaagctattaccttatctatcaactcctcattccaccgagtggtacatggtattaaaagatccttaaccagttttagtgaggtacgaacattttcctggcatttaggggcacgcggtgggttcgatggaagccatttatcttgccatatatttattctctgcccattaccaactacccattttagtccatcagctaaaagtgtattaccttgcattatgcctctccaagcatggctagattggcacttgacac

SEQ ID NO: 23205 - DNA, 569 bp, Arabidopsis thaliana landsberg
gggactgcatttccaacctgcctatgtttgtcttttatattttttgtatactcatagctatccggaaacccctgcagaatttttataaaaccatcatttcacttcagagctgtattcataagctaacattacttcaatttccaaaacaaaaactctttacacttatattgatgctagatgagtaatagggaaggaacattagagattttattacctgagatcgggcgcattcacgaacactgataattctgtcctggtcaggatggaagcacattcccaccaaccccatgggctgaagattggtgatgcaagtgggtaaattgccatggccagtccagtctaccatagagtcccttataaccgttgtggtccttaactttgtttaacaaattgggaacaatgtttttcacaatcccatttgataaattcacctgtaattataagaaaattgcgtttaaaatgatgtgtagatttaataagaatttcctaccggagtgtataagagtaagacttacatgttcgtctggtaggtcacgccaatcagcacccggtgtcttagggatttctta

SEQ ID NO: 23206 - DNA, 569 bp, Arabidopsis thaliana landsberg
caggagctcgcgaacgcaacaccgccaagccgctgttcatccgccgcgaaacaacgtttgagagtcactgtgatcccagtgggccgcgcttgccgaggcaatgagcgccttgcccaacggagcgctgaggtggtggaccttcggttgctctgcgacgggttgaagtcggaggcagcagcgacgcgaacagaggcggcatcgacatgagcggaggctttgtcggccccgggagcaggtggcttcccaggctgaggagatgcggcacggcaggctagagcttggccaggctatcgacgagcgggaccaatctcagagccaagctgccgaggccgtgagcgggctgaggccttaggggtaagctggctgaggctacggagcggctagctgaggcgtccgctcgagccggggcccttgcggagagcctggccgaggcgtcgggtctgccagtccgccaagccgaggctcgcagcacgtgtccggccaaaggtatgttttgccactttgtgactttgttttttgtctcattcttctccttgcgtctgaagaattttgtcctgatgtctgtaggg

SEQ ID NO: 23207 - DNA, 797 bp, Arabidopsis thaliana landsberg
aaacagattcaccatggagaaaaaagttgagcgcaaagtcaatgccatgtgaatgtttggcgtcaaagcaaccataagcatcccacagtagttgaagataagcaacgagcagaagatgctgtacaagctccaaaacatcttgtaaacagacatatggtagccgatcataggatatacaatgatcgtacatagtagagactggagtagtgagtatggaacctcaactaggacctgcaaaaacattaggcccctgaatcatgtatagagaaatttggccagtggatggtatccatccaatatgagtggaagcctaagagacgagctatataagttttttcttaaaagtcgacaaaaccaaagttacaaatggaaaaaatttaaacctgagaaaatgaatacgcccatgaggagtacatccgcgcaaacctttcacggtagaaaacattgcgctcggttgcaatgaagttcataactgtcgcacagttgtttattcccgagaagattactatagtgtacattgagccaaatatgctaaaaagatcttgctgattatttctgcaaagtaaagtgacactcatattaattaacatttgatcagtgtgaaatgttggtagtattgatgaagacttacaaccatagaatatcaaactaaggttgtgtagatttagtaagcaaaacatgttgggaaaccttctagtacctaattcttgtttattgcatattcgcgagattcagaatacaagatgagttttggaacctgaactttttggtacgggtgtcttactatgatatgtatt

SEQ ID NO: 23208 - DNA, 826 bp, Arabidopsis thaliana landsberg
gaatctgccttcctctgatgagttttgatcaaattgattgagtcgttgcagagctaagacccttccattatgaaatctatgcgtttaggggagaggcgtaatggaaacctcatgtttttcttatgcggggcagggggaggtgtggtgactgaccttcctgtcccgccacctagatcgagttctgcaaagactaggtctatgcgttctctcctaacaggtgggggagagtcacttccctccagtgttcgttcccgtttcttttgcttgggagtttgctcctcctcctgttcgtcgggaggaggggtttcagctttggggtttgaaccttttttagtctttaccccagctgcgattaattttttaacggcgcgacactcctcggtggaatgtccttttttttgtggtacttgcaatatttttcgaggtcaagttctggactctcgtcctcagctgcctcttctattgcgagtaaggtatgctgcccttgcgtttggttttcctttttgaagggttttttaattgcaaggggagcgttttgcgttttagattctttgaatcttaaggccagcacagcgagctcctcttcggctttggcgaagtagagagctttgtgaagggcatcgtctaaagagaccggttgcctaacagtgagttcctcacggaacctagaggaaaaccacagaccgttatgaagggctgctatggctacctcctcgtttaggttcgcaatcttcgatttgattgctttgaatttttcgacgtaagatcgcagggatttgttctgaagttgagtaagactccagaggtcggcttcagacgtcctgtg

SEQ ID NO: 23209 - DNA, 885 bp, Arabidopsis thaliana landsberg
  unsure (1)..(885): unsure at all n locations
gtcaaatccaactttttattttaacttaaaaatttttacttaatttgatgatatttctttataaaaatttatcacataatcatattagtttttaaaatttttatgtgaatttaagaagtctaattttgctatttcaaaaatatgtaacaatttttatttaaactcagccgacgatgtacgtgatattgttaaaattggtctactaatggtaacaataacgtaaaaattaatataattactgatgtagaaaatgatacactgagtataacagtgtacaaaatgatgtccatagatgatgaaaaatatggtgtacataatcgtacacctttaaaaatctatgagacagtgtactaacattggtgtaccagatgatgtacaccactaattgaaataatgatttatacattctctataagtgtacaccaagttttgtacactttgtctaccaatcttgtatgttatcatttaaaagttgtatatatcattctatccaccaatcgtcataatagtttcaatcattttgtacattattaagagtaacttaattatgtacaccatcatgtacaccattatattgaataataatatttggtttatacaatcattatgtttgtaaaatattaaaaacaatattacttatattaataagtataagagaagtcggtgatgatttatgaaatatcggtgtaaacacttgtacaccaacgaataatggttagtgtataaaacgatgttttaaatgtttgtgcattataatgatgacagataaatagtctaaaagttaatgtaattttttttaaaaaataatatttaacttntttaagtatttaagaatactaaaataaaaaaataaaaagataaagacaaacaaaataaaataaaatt

SEQ ID NO: 23210 - DNA, 1161 bp, Arabidopsis thaliana landsberg
cattgttcatcttgaatatacattgcatatgtatatatttatatatacttaccacctatcgaataatatttatttacagaggaaattaaagatatttaaaaattgtgtaagaagatgacaacaaataaaaggttaagaaacagacaagtttgttgaatgtcatatctttatttattttcaactatattttaataacagttttaacaatatatatatttatatgataagcttgaacatctgcaaaattttattcaacaaactttagggaaatggttgtatatatgattaatgtgaagtaatgcaatttatttgcgttcattaagttgcgttaagatcttgaatttgacaataaattatgacaatataaagatatatatgaccatgtgatcaagaattttacaacaacaccctccttatactgatatcttttcatctgtatgatattcagttttatatcttttcatctatttggccttaattttttcgggttgaatagattagtccattttactgaggttcaatatatatttaaaaataaaaaagaattactgagatagaacacaattgtatgtttattcctagaatagcatacatcttttttttattactcacatgtttttagtacttgtgtaattacagttaacacccttgattagttttaattacatattattttttaatttgtttgtaactaaaaattaaataaaaaaacactgattatacatgtcatcaatccatatcattaacataatccacatcattactcatctgaaaccgcataacgtttcggtttcccttcttttggcattttactattcatcaacggaaaaaaaaactgtcgctttctttctctctcgacggaacgaactctttaccctaattccttcgccgttttctcttctctcgtctgttacggccgaaattcttacgccggagtcgcatttctggtatcgtgaagtcacatccctgtcgcagtcgcatttgaactgaacttctctaagttccaataagtatgtttcaaaactttatttcgaatttttcgacaagaatccgacatctaagtcaatcgcaaatgattccagtcactgaaatcgttttccgatgcttaacaatggtttttaacgatgcttaaagatagtttttatcgccgccgtagattga

SEQ ID NO: 23211 - DNA, 568 bp, Arabidopsis thaliana landsberg
  unsure (1)..(568): unsure at all n locations
gttgcgagaggggtctggcgaggggcggggttggctccgggaggtcctggcggtcacaacggtgtacggcttgacgatgggggtggccggaatcgttcggtccacgtgcgcaggcgggtgctctcgtcggcggcgggtgttccggccaaaccacgacgatctagttcaatccaatggcacagtgagcttcacgaggtgacgtagaggctatgtgcacaaggaatcgaagaatggagcagaggattacccggtctacgctcaccggcggtcgggcgaagtccggcgaccgtggactggcttctccggcgaagaaactccgattcctcgctcggggagcttcaccgaggtgtgcacagtcttctccgagggttggacggggttgggaagggttctgttggctggtctacggtggcggggaaatcgggcggccgcgggcacaccgtgcacgggcaaacgccggtggttttgggctccagtgaggtcgagcgcgtgcggaggggtacggtcgaagtcnctgggtgctttataggcgcgggccggggccatggcgccggcttggctttggcgc

SEQ ID NO: 23212 - DNA, 3951 bp, Arabidopsis thaliana landsberg
  unsure (1)..(3951): unsure at all n locations
ccggattgagatataatgataaatggcctgatcttacttttttagttaccattatggcaaatttcaaaccttggtgggtcagaaagcagaggacatgttcatatagcatagtacatactagagcaaacttaaatattgataatgtgaaaacaggaggtaatacaatattcctctcatcttctttttggcactatgatgaacacttttggaatttgttccacgtaaatgtttcttcttgaagttttctggaatctcctagttctttatgtaaagaaagataagacaattaaacacatatctatcgtcctcttacattgctgtcctggaatccaataccttcccatgaagcatgcacgtctttttatatgcgtgttgcaaaagctaaacactcaattcttgttcttcattgatctgcaacctgttttagttccaaaaagcttcagctacatcaaagaacgagtttgattctccatagatggtatcagattaatagcagcttcctctttgttgtaaaactttggtttcttagcatcttcccttccattgtgtttacaaaagttagctgtcatttaaacagcaggacgactcatggatcaacaacaacaaggtgataagaatctgacagtgttcgtaggaccctggggaggaaatggaggaaccacttgggatgatgggatttatgatggtgtccgtgagatcagacttgtttatgaccattgcattgactccatctcggtgatctacgataagaatggtaaacccgcaaagtcagagaagcatggaggtgtgggaggcaacaaaacatcagaggtatgttcctctatcactctggattatgtctctctttaacttcctccctcagattttggtttcttttacatgaaccgaatttctgcagataaagctgcaatacccagaggagtatctgactggcgtgagtggctactactgtccaatggttaacagtggcactcctgtaatcagatcaatgaccttcaagagcaataaacaagtgtatggaccttatggagttgaacagggaacacccttcactttctcagtcaatgggggacgcattgttggtatgaacggtaggagtggctggtaccttgactccatcggcttccatctatcacgccctaaatcaaccaagatgatcaacaagctccgaaagaagattcactggctcacaaggatagtagcatgatttaagccctttgcatagaatgtaaaactatactctacaaataaggatgttagatgtatcttagtccatgagaccaaaagtgactgagcaaaacactctttaatgaacaactcaaaaggaaagcatatcattcaaatggtaaaaactaaaaacacacgatggtttttttatataaagttataaacaaagcatatttcaaagtgagcaatatacacaaatacgcccgtgtttgcggataatagaagcaacaattcgataaggatcgcatgcaaagtggcaggtaatccaagcatgaatgttggttagcgcatttatcctctggnnnnnnnnnnnnnnnnnnnnnnnnnnnnnnnnnnnnnnnnnnnnnnnnnnnnnnncttagtaggaatggcatgaccagcaggctgaggaagccccacagagacttccaaaccatagtcatctgccacctgctgcataaggctgttgacttcgccttctggagtggacaatgaagttgaaccagccatagcattctccatgaactcagcttggacctccatgttcacaaactgcttctcgaatgaatccattgtctctgacatcttctgtagattccctggtgaaggatacagaaaacagataagaaccaatattgtaaacagccccaagaaatcaaattacatttgtgctcaaatgaactaaagatgaaacctttcatatatttccnnnnnnnnnnnnnnnnnnnnnnnnataatcagaatcatccttcaagtttacattacctctcttaactcttttaacttttttttttttggacaaatctcttaactcttaactaatacaacataaaccatggtgatcatacatatccaacctatcgaagataattcgtataattcacagacgatgaaatacctgtggcaagagaagactcaagggatttgacgatattggtcatggatttggtgatggtggtcatcttagcctgagtatcaagacgagcaacaacagcgtcaaggcgagaagcgagacggagatagttcatctgctcgctacgcttacgaatggcgttctcagcgtagatccgagcaccatccatattacccttctcgatagccttcttcaccttcaatttctctgctttctcttccttctcacacttccttgattgcctttgcagagactttgacgtaaatttcaaatcgaatatctgattcatcagcttatctgtgttacccatgttggatcaattcctctagatcaattcgcttggatctatcggtagaaaaattctcaaaaacagagactttagggtttctctgtatttggggaaaatatctcgacgcgttgatgtttgaagaagaggggaggaaggaagctaataaagtcaaaatcggaattgaccggttcaatcgaaatgtcggtcattacccggtttgatttatatatcatggtgataataaacagtcacacacacaaggcacgcgtgtcaaaagtgactcagcaccgtccgatgtgtcactcttttttacacgatggatcaatcatcatctgcgtgccaactcatagcaaaattaaagtattttggattgttttgcatgtaatttctttccaaaattcaatctaagtttcaaattcaaaccccaaatgcttttgtcttgtctcttccatttcccagaaacgtttttttgaagtaatggaagattcaaattcgtgagagatacgtagtaaattaggtccttttcgtggaatgttggaatcgaattcttgatttttgcagtgttctgacttaaaaccctgatccccttttgtggcccagaaaccggaaaattagattaattacagaggagaaaagtagttcagaggaaaaaaagtgaataaaggtggattctttggtgaatacacatttgggcattttgagtcagatcttagaaaaagaggggaaaggtagaagctttccagctactgagaagaaatctcaaaattctgcttgtgtgatagggtttttggaaatgaatgggagtaatggggaggagcgagttgttcacgaggttgcaatggtggttcctaagagggttctggaagaagaagaaggagactgtgttgaggttttggtgactgagctaaggaagaaagggatggttgttgatagagtcgtcggtcttgctcatgagtttctcaaggtcggtctttctttgcccaatttacttgtaattttgtgaccaaataggggttttcaggtgtgaaagtctttgatttttcatacaaaattacttatctgaaagtcaagtagaattgagttttgtttgataaaacttgctatattatgtctaggattcaacaaattgggaactttaaacgaagtatctagtgaagtttctttccttatttagctttaaatctgtaaaatactttgacgtttgaagagtgttttgctattatgagagtgatgtttgagataacagcaattcaagtatctctttaggtagcagctccttcggagatcttgggcaatgcagctgcagagcttcatatacgcaaacctactcgtctcggtaaatactactgtttactcgtatcgcagatatttcctcattttgtgtttgtcttaagtttgatggttatctctcacttccggtattgatcttccctctgatatgccagggtctgagcctttcattcggcgtcctgatgggttattaaaaagctggtttgaacgttttcggtgctatcaacatcttatttatggtattgtaagttcc

SEQ ID NO: 23213 - DNA, 573 bp, Arabidopsis thaliana landsberg
gcttaccggcgactagccaggatctgtcatcccgatgtagcgagaaatagtcgggataactcgtcggtggacgatttcatgaagatccacgcagcgtattgcacgctttcggatcccgagaaacgcgccgtttatgatcggaggattcttcttcggagccggccgttaacggctggatacggcagttacggtggacggaattgggaaaccgatcagtgctggtagcgagttgactcgatgtgtcgagttggtccaaaaccattgaattggttgtaattagagcaaacccagagattctgggtggttgtgccacgtaggatcaacacggtttatcgtgccacgtaggatctgtcgcgtttttagcctttgtatccataagcagtaagtggtcggtattcagtatttaccatctaataaagaaaataaaaatttatgtgtaacttaaagtgttccaacttcgcaatcatagtatgtagccttggaaaacagattcttgttgtacaggtcagatttacatactgaaatcatatagcattcttagaaattttaaggtgatttatgtgcagccaccta

SEQ ID NO: 23214 - DNA, 653 bp, Arabidopsis thaliana landsberg
tgcttgaactgctgaggtgggttgcttgagaaacgagggcgattgctgcttccaagctgaggtccaccaatcttccgcttgcgatcctccatctccttgcgcttcttttctgtcatgattgctctgtcaatcagatgctaaaatgtggggaaggtatgattcatcagctgatagtacaggggatcgactaagcctctcaagaaacgatactgcctcttggcatctgtgctgacatcttcaggagcatagcgggatagctgcagaaatctgtctcggtactcactgacagacatgggcccttgcttgagtgccagaaattcctctttcttcactatcatcagacctgatggaacatgatactaatagaaattatctctaaattcctcccaagtgatggtgttgggtttggcgtgggtggcaaggtaggactctgtcgacacccggttttgaaggtaaaccgaatgcgaaccatgtatgtgccaggatcagaactcacgtacacaacgattacataattggacatcatcacacaatgcttgaattaaatagcggaaaggtacttagttacatcaagatgactgagacatcccagagtctattacataacatagtgtttacattaaacaaagtgtggagtacaaaacgtgaagata

SEQ ID NO: 23215 - DNA, 2681 bp, Arabidopsis thaliana landsberg
ttgcatgaaaaacggttgagctaatatcacctcttacggacccgtaagatgggacagaatgtttagcccagtttgttttcaatgcaatgaaattcaacacttagattttttgaaaaccaaaatattttatataatataaaatataattaaaaaataagtttacataataaaaatatttgtaataaaaacaataaaaaatatttaagagtttaatttacttgcgtaaaaagcggttgaactaaataacacctcttacggacccataggatgggacgggatgatgcttagtccgttttgttttcaatgcattgaaattcaacacttaatttttttaaaaattaaaaatattttacataataaaaacttttttttgtagacaaaacattttcataataaaaaatagaattaaaaaaaataagtttacataataaaaatatttgtaataaaaaccgcaaaaattaatctaaaggttaaatttacttgcataaaaggcggttgaactaataacacctcttaaggacccgtaggatgggacgggatgctcaatccggtttgttttcaatgcattgaaattcaacacttagattttttgaaaaccaaaatattttatataaaaaaatatccaattaaaataaaataaaaacttttgctaacaaaaaaagagaaaaacgaaaaaaaattgaggtaaaaagttttaaaaatcaagaggctaaatccctaaattccaaaattctaaatctctaaattccaaacaagaggctaaatacctaaattccaaaagtccaaatccctaaattttaaaattccaaatccctaaattccaaacaagaggctaaatttcctaaatttcaaattgatgaacaataacataacattcgcctaaaagacatacagtgaacgaaacagtagacaagtatgttatgaatttgtttcggatagaaagttataccaatttatgatcgagattgtagcgttcgcgtgttagcaaacagtcaaagaaccctatacctgaagaacaaaagaagatattaagtcccagcgaatcaaaatcaaatctcaaaatcaatctaaagtaacaaaactctcttaccatagaataaaattaaaggatcctggagagtcttcgtccttacttgcttggaccccagaagagtcactacatgcgagttctgtgacacgcaaaaaacagaaaaacagagtcatagaacaatgaaaagagaatcgatgaaccctagaagaagaccctaacatatatgaatcatcaacgacggagtgaaatagagagagagagagataatgaatttaagctaacctgatcgtagagatggctctctcagactgagatcgctgatcctttagccaatcagaataagagaattagagagaatgaagacgacgaacacgtgtaaaaaattgccgatggagaaattgcaatattggggataaatagaagcacctgatagcattagtaaaaaagagaaaaggagataacaggagcgtggaaaatcactaacgttaataattggggtcaaatcaaccgactctaccaattaataaatatagcattcagttctgtctatatagtcgccgacgtaaaccataccccttttccaaacgccttttgcctctccgatgatcggcttcgccggcgccgtgagaggcttctcttcctctcttctctttatagtttctcttttttctttgtgtcgttttcttttagccagcgcggctcctccttctttgtggcttaatcagagacttttaagctgacggcgagcggttgttgttctctcagatggaggttcgttggtggatctacaatggggaacattggctctcgacgacggcagcagatctgatggtttccttcttcagccccttcacggaggtacctctcctccgatgagcctccttggtggtggtggttcagtgttaagaaggtacagagggaggtggatcgtggttttcgagcttggctgtgaagatcttatcgatcctgggcagatttacatgtttcaaggcctgtctagctactctgccgccaacgactcctaatggaaaaataatttgaagtgggggagaaaagaaaaccatttggatgattgaagaagaaggaaagctctccaataaagccccggtttcaaaaacttttgtctcagcccggtatccggttgagtttcattcggattactatatccgttttacacttaggaccgaaatagtgaaagccgaggagtcaaaacctttttgaagttgcgcttctggcgtagatgctattaggacacgttctacactcggatcatgagggactaatagcttggatttggattggatcttaggataggatttgattttctttgtgttagtaattgtttttgtgttattgggtgaatttaggtggtttaagagatgatttcacttagagtcgtggtgtaattcatctcgttgtggttggaaaaatacagtaaatttcagttggatagcgttgaatccatcttagtgtttcagggtgatactaaactgattcattgtatttggttaaaatatgttgtggtcgaatcacttatacttttgaattggttaatgaaaagttgatgttgagccaaaaataaaaaataaacccatcgcatattgcaccaaagaaaaactctttttgcatataatgggttattgatcactaa

SEQ ID NO: 23216 - DNA, 1175 bp, Arabidopsis thaliana landsberg
cagtagtagcacccggcaattctcaactcacacgaagcatcatacgaccaaaacaagaggttttgcgttgctcttatgttgattctatatgatttcaacatatgttggatatataaagataatgattatgtaactttccttcacaggtgaaacaagatacatcaagagcggttgatagtgatacatccatagacaaggagtcatctatggtgaagacagagaagaagagctggtttattacagaggaagcaatggagagaaaccgcacaatccacggtatatctatctcatgagaatgatcataggcttcattctcttgctggctctcattagcaacatcatatcggtgttacaaaacttgaacccggcgatgaagtttgatcgcgagagatagacaaaagctagcagattgatcaaagcactcgtttttactttgcttttatttatttctattttcttccgaaattttgatgtatatatgtgtgtgtatgtatgaccaagaggtatatcttgtatctaaagttaaataaaatttagggtttgtaaattttataacatttagagcgggtccatagttcagtgccgtggtggagcattagactgctgataaagaaaacattcgacagagaccagtgaatggtttgaaaggtttctcaaagatttggtttgttgataattaagagaatgattacataccggacaagggactggtctaaatgtgtttgatacttcgatgatcaatcaatcaaatattacttcgatgatcaatcaatcaatcaatcatattacttacaactatgtaatatgattctatgaacctttttcttgttttttgtaaactttaatcccttatcttgcaagccaaatccatagacatatattttacaaaattagtagtagtactatattgaagtagagaaagtaataacgccatgtcgtcgtcgtcgatggtggcggctataatttccgaaagatccttcgactcaaaatacacaaaaaaaacaaggaaaagagaaaggttcatactttcgttcgaagctccgacaatgaaccggcaattatttgccacgtcttcattctcattcacaataaaaataaattttgttcctctcatttgtcaaccttttttgtttttgttaaaagaatttgtcaacctatttggaaaacattttgca

SEQ ID NO: 23217 - DNA, 1317 bp, Arabidopsis thaliana landsberg
cttgttcttatcttattccctatataactcatccttcaatgtagttttcatagggaatccaaattgaagctatgatcggaagtcgtttttctcaacgttacttcgacatgctcaaagagaatcagcggaaagaaagcagaacttttggtgtcattgaaaactgtggttttgtctgatcaacaacccacaaatacatgattgagttcatgaatgcaactgagataactcattccgacccaagggaaactgtattatttaacagattcaaacattttgactacattcttgaagacaccgctcatactgaaaatttggtcggtaagtaatacgtatctaatgcagatttcatactttcacaaatcacatgcctgtttttaatctttatttcatactcccatatttggttggtgcactcgtcgatgtcggatgtctgacaaatattacagaaaatggtttcaagattacggattcacacttaccttcgagattatgtacaaatagtacaatgttttttgatcaattacttctaaatttctttcttttcatcatatatttttcctgagaggggtataattataaaactgttttatatgtttcagcaaggaaaggttgaaatgtgaggcttttggccaaatggcggttgacttgcatagcaaatttcgatcttttcgcaatgacagtattgttattgacaatatttttattgcactcacatggtggaagatctttaggtatcatactgaccccaaacacgtgaagatccaaaattatgcagagatatcagatgtgactgtcgaccccaatatcgaagaagtgcaagagttaaaaatggtcctcgagtaatgcaagatggaaggaatcgggttattaccattgtttacttttcatatcctcctatgtatccttcaaacaaatatttctgggaatttcattttgtctttgccttcaaaattcagtttcataactcagccgtattataattgaataacttagccgctaagtaacataatacgaatataactcagtcgtaagtaattcagccgtaacatgtaaaatgaactcacctttcgactgccgtagttttataactcggacgtaacatgtaaaatgaccgaacctttcgacttccctaattatataactcggccataacatgtaaaatgactgaacctttcaacttccatatttatgtaactcaagcgtaacatcaccgaatgaccgaaccttttgactttcctatttaaataactcagccgtaacatgtaaaacggccagaatattttttgcaaataactcagtcgggaccgttaagaaatt

SEQ ID NO: 23218 - DNA, 568 bp, Arabidopsis thaliana landsberg
  unsure (1)..(568): unsure at all n locations
tcgattctggcacagtactattgactgtgcgagcttcggactcttctctgaagtctcgttggtgttgagtatgnnnnnnnnnnnnnnnnnnnnnnnntcgttgcattggtggtggaggtggaagctgttgccaagatgcctgagatttacttgccgaagcaacagaagctgcagggtggttacccacatactctgggatataaggcgagtggtacgaagcagtatgcatgacttgctttggctgggtctgttgggctgcagcttctgctatttctttttgtttctgaatggtgacatggcacatcctggtggtgtggcccttgtcctcaccatagaataagcaataaattttccttggttgatcccaaatcttcctccgaagcccctggcacctctgccccttggagctggaggccgaggataactctgctgctgccccgaagcctgggaagcctgggaggaatattgcggcctctgctgctggcctccctgtcatcattctaggtggaatgaatcgatctgacatgtctaggatgaagcctcctccgaacccctggctatttcggag

SEQ ID NO: 23219 - DNA, 2236 bp, Arabidopsis thaliana landsberg
  unsure (1)..(2236): unsure at all n locations
tctaacgagaggaaaacaacttaatacaatatactaaaatattttgtcgcgtccgaaagtttttttttttttttttgtgcaccacaaatatatgttagtgttcaacaaatgttttgtccgtacaaactaagacattgcttagcaagtgaatcagccacaagattagttgaccgaggaatgaagcgacataagaagtgagaaaatctaccaatgctaaggaagatatatgaaatgattccatnnnnnnnnnnnnnnnnnnnnnnnnnnnnnnnnnnnnnnnnnnnnnnnnnnnnnnnnnnntctaggaggaagctatccgcccctgctttgaccgctttcaagacaacagctccacaggccaaagattccgccatgaaaggtgatgatacattctcgcaaagagcagaatgatgagaggtaagaccagccggattggtgaaggtccaccctaagccagctgtctttagatcattgcgccatgatccgtcagctttacaggagacactgaaaatgtgacttgtctcctgtctttgtcgaggtgcatcctgtctttcggaggagaagtatcccgggacgtgaggggcctttatctgccagccactccttatcattcttgataacctttaacaaagtttcttctggggagaacaacctggtactaaacactttttgggtccttgatttccatagactccagcacatccaaagagctaaaggccccgaagcaattccagtcggcggtagacatgcaagcttacaaccggtgatcaagccttctcgaacactccctgctccaacacttgcccagtgtcttgcaaacggtgcggaactccacactaactgcgcaaactggcagtgaaacaacatgtgaagaatagtctctggctctccacacctacagcaagaagcatcaatggcaatatgtctatccaagagttgttgaccagtcgcatccgaaagtttaaatgtataatatataagctaaacaaacaaattagatcacctattgaagatggaaaaaagatgataaacttgtagattgaatgatcattctggaagagtgtggaatcaaactaacttatactcaaatgtaacatgatactatttttttttttgtcaaacaagatcttcattcaaattaaacctcaaaaagaggaaggttcatacacaatgaagcaaagatgatacaaagaaataaagatagagcttcatgagttttccaaagagatgtgaactttttaaaaaagattacaaggattgaaaaatctgttgaggctttgtcggattcgaccatgaaggcgggcttcgcgaaatcctcgaccaccaagtgatcataagcagctcttgcaaacaatgcatccgagcttttgaaaagctgctccacggaggaggctgacgggttaacgaggttgagaaagagacggtaaccacctcttgaagacatggtcataatgccgtactttcccaaacaaacagaggattgcaaattatccaagcaatatattaacacatgactgaactcgataattggtgaatgggtaggtagagaggtgaaaaagctttggtaatacccactccgtagaggcggtatcataatgccaatcttcttcactctaaagggcaaaaggcaataggtggggaagagggtctcgggtagggtccaaaataaacttaacatctgaactcgacaaaggtaactattagaccaatctaaaggaaccattactctgttagcgtggcgtccacaaccagccaaatcagagtcagagggtgctaaagggtgatgaggtgcggtctacagaagttggattctccatggttgggtgcttcactagcgccggcgccaaagtagagctccgatccaaaggggagcagggagatgctgaacttggcttcaaggagagcagatgaagcgggtaaaccacgaggattgcgggaaggttgagggaagaactagcaccagagagcaagttcgaaagtagggtggtcgtgataatttttggatttaaggggaggaaagaggtttgaaacaggaggaaaccagacaataaggaactccaaatgataaaacctttgagaagagatcgccgtgagggagagagctccggacaccggcgagcaacggctctatgggtgggggaaaaatttattgtagagttgacccccaccattgtgtctgagagagtctctgtctagtatagattttctctttttattttgttctgtctattattgt

SEQ ID NO: 23220 - DNA, 790 bp, Arabidopsis thaliana landsberg
atccgttcatgatttcaatcgtctgactgatgatacttcttcatctcggactcttttctcattgatcgtctttctaatctgcataagatttcaccaaagactacaatatctttcattgtttttaccttcaataactcgtaaaacgaaaagtaggtagttacctcgagtagaggcagagtcttgttctctttctctatgctgtctcggtcgtttatgcataacccgctcaaccagcttgaaggtcgcataagaaagttacctccaagatttgttaagagcgcatcttgattcagtaccctgcagagaattgcaattttaacttccttggtcggatcggatatacaaatgtgaaacattttagtaactggaacttgtttctatgtatgacctcgaaggaacggttttagagttacaggcatgtcttaaatcgccataagggatacatcgagagtcgatcatgtccatcaaatagcttctttgtccactcatgaaagctccaaatcctgttcaaaagtcatttccattaattatgaaacccattgaaggaatggtaaatgtctgcggatcaaaactaacttaccatggcgagaagacggctcgagcttcttactttgatacatcttgaaatcagaaacatgaaaacattgaaaaagatgaacaaaactgggataatcttagaataacagacgatgaagattacctgtaaatgactcttgacatgggcaatacttaatccttttagattcattatctcaagaaccaattttggcgttgcttctttaaaatcata

SEQ ID NO: 23221 - DNA, 546 bp, Arabidopsis thaliana landsberg
tgtttgtagaggatatattaaaggcttataatgtgtggaaagccagaggcagataagaaggttccgctagtttttttttggtttttgctggactttggaactctttttaggagatttttcagagcattttcattgaatttttaggcagaggcagataagaaggcagataagaagagacaaaagtcacttggaaagttgaatcttgatatgttacttgtctacctgtttctttcataggtactgtattataacagaaaaatgatgtgaagcttgaaacttgctgatataaatcttgttaaactgaactctttacacgattgaatgatatgaactctttacaagattgaatgatattaactcttttgttttatcattattattattaggagagaaatagaaagaaaaatatatatattgtgtggacgtaactttgtttgagacagtgaatggtggagcatagggacagtatatttgtcggtagcaatattttccacaaaatctcactatattttccaggaaacatccatggagtttagagtcgtcaac

SEQ ID NO: 23222 - DNA, 415 bp, Arabidopsis thaliana landsberg
atgctaggagcaaacttgggaggatctcagtttgttttgtcattaatcaccaaaaccctcaattagggttgattgcatttacaactacacaaagaaagaagatcaactaatgactgctgccttcggcactcggtcgaaacgaaggttaaatcagttaatggatgtcctgaaattcgagtacctggactatgacagacttgacgaaggggctgatgagcaaaaagtaaaagggttatcatcattttgagcaggcaagctgcccaatctatgaaggaagatgaggaggcttcgaagaaaatgaaaacaacttcggagcctaaggcactagctcctaagaaatggaagcctgacaagatgccttatgccgaaacaaatgtacatgatgcaccgaagaaaacttcaagctctctgtcac

SEQ ID NO: 23223 - DNA, 539 bp, Arabidopsis thaliana landsberg
atgtgagtgtccctaatatcttgctctttgtttgtgaagcaagaaaccttgttttaatacttactacatttgcagcaaaacctaggagttttatacggttggtattcttacaaatgttgtcaggtgaaatatggaaatatttgggtgatgatgatcatggctctctggtttacttgatttttaactaagtttttggaatatctagaaagcgaatgggcctttggtttgctttactgtgttgcctttgtggtaatggacaagcagtggctggacaagaacgccacctacatggaattcaacgtgagtcgatcatctttcggtttatattgcttggttatggtgatggcgatgtgatgataaattgtatttgtgtaggatgtgctaagatgtattaaggatatcaatcatatcctacatttattaagaggatcaatcatatacttgattgcaaaggttaaatgttcatatatgtaatgtcgtatatactcttctttattacaatgtgtataccctaactgggctctctctggatatatatt

SEQ ID NO: 23224 - DNA, 1212 bp, Arabidopsis thaliana landsberg
  unsure (1)..(1212): unsure at all n locations
tcaaattttatgcccatttacaacaaataaaaatagaaacttgttaatatttttggttgccttggatttaaccaaccaccttctacctttaatagcatagaaaacaattagactacaagacgttctttaaaatttgatgccctctaaaatacatataaatctttttacctaaagcatctatttggtgggctttaggtctgggtcaagcctgacggcctatcaggccaagggctcggcctaaataaagaaggctcagcccataaaacttaagagagaattcctccttaactctttgatctcttactttctggtttttcgttatgtactttcggtcttttgttctgtacttttggttttatgttttattaattactattctcgttcatcgttgataaaaaagcggccccattctcccaaaaaatcccttagttacttattattacaacttcattacaaaaaattggcgtccaccatggggataggaagagttttctcctttattgaaaatcatatacgatattgccagtaatcctacatagccagagccagatgacggaaacctcgaacaaacaagtagatgagttcagtacgccttgtgccgcaccaccagctcggccaacgacgccacctcctgtcgtcgctcttgacacagttcccgccgagctcgaagaaacgacaccacgaggaaccagtctcgacgaagtcattcgatctttcctcaatcgactcgacctacatgatgtaagaactgccgaacacatcaacgcaatcgtcgctgcccaggaggcctcccagaatcagatcaagtaactatagtcctctacagcacgagtcgttcggcagctcatcgataacgaaaaaaaatcatcggaacaaactcccatcacggaatgaccggtgaatcgacaaaataggccggcctccatcgtcattggatccattgacaagcacatccgtgaaatatgtcgaactgcaaaaaccgtccgaaaatactaaacacgctgtatagaaaatgatgatataagtgggtgtgatcgggaactccaacaactacgaaccacgttgaaagatatgtcatccaagatgcattgtcccgtcagctcgacactagagttagacaagatattcgaggagacacaacacactccattcacttcacgcatctncatggttcgcattcgtcacatcagcanaatcaagctggctaactat

SEQ ID NO: 23225 - DNA, 463 bp, Arabidopsis thaliana landsberg
  unsure (1)..(463): unsure at all n locations
gaagctcggagatctgactttaccaggcggtgttcagatcagtctacctgtactgcatgtacatcgcgacaaggagctgtggggaaacgatgcaggggagttcaagcctgagagattcaaagacggccactcaaaagcaacaaagaaccaagtctccttctttacctttgcgtggggaccaaggatctgcattggccagaattttacaatgcttgaggcaaagatggcaatgagtttgattctacagagattctccttcgagctttctcctacctatgttcacgcgccttacacaatcatcaccctttacccacagttcggagctcgtctnnnnnnnnnnnnnnnnnnnnnncataaccccttgtattgttatcgaataggctcattatctttatatgtatccaagtcagaactcgtgtcatagtttaatgannnnnnnnnnnnnnnnnnnnnnnnnnnnngc

SEQ ID NO: 23226 - DNA, 1908 bp, Arabidopsis thaliana landsberg
ttcgttgattctttacccgcagattaacggctccccaagtggatgaaacaactgcatttggcttatgaccttgagcatataggaagattttgattgcttgtgatcttccatctccggtacctttagggttaactcctaatctcctgattatacatcaacaaaaaaccattattatacttgaccactacgcaatgcacacaacagatgcaatctataagacttttttgcaaactatatagggtctaaaaaatatggctaccaaaagtactaaccagtatcgatcttcaaccagaaaatcatcagagtaatagactatatcctccaaagtagagaaatgaagtatcttccaagtgaaaacattgtttggagggtttgatatgaatgtgactttctcttgtacctggatcggtggacaaagaaagatctcagcaccaaaagaagcagtgtcttgctcaaggtaaccttggctcgtgtcaaggaatgttgaaagaggaatcaattttccgtatccccactctttattcttatagttgtatcgtttctgtattccatctgcaatccacaattttgcaaaaacatgctagtcacaatccatgaaaaaattcatatacccttaatatttgacatctacaattaccaataggcattaccaaaatctaaccgtatttcggaccgtaaccggaccgtttattaaccgtaacccaaccgtaaccgtataaaacggttaataaccgtaaccgtgaaaatagatcagttacggttaagaaaatatagtaaccgtaaccgttaattaaccataaccgtatcaaaaccgtcggttaaccgcgcggttaaccatattgctaaaactttaaaatatagttgtaactgtatataattctaaataaataattatttcactaaaatagtaccctaaatcgtttaatatgcccactactacgatcgaagttactacactactctttttaccattaagtagttcatattattattatttctactcttaaaactgtttcttaatactcacaacatcttttctttagtattgtttttgtttggaaattgtaattaattcaatcattataattatgaccactaatttgtttattcattggtttatttaagaaaaatagatagatgatttactataattatttaaaacacataatcacgtaaaataaatattatttgatatatcactatttctttatttattttattataaagattaaaaaatataatattttgtctcatatattaactatatcataattatcaaataaccgtaaccgtatctaaccataaccgtatttaaccgtaaccgttttaaccgtatatataacggttaatgttaaggttaaaaaaagttataatcacatacggtggttaataaaccgtaaccgtaataaccgtaaccgtggtcatgcctaaaactatctggataggtttcgatgataacagataataatgatataagctaaatcatgaaatataagtaactgaatatattactaagtaataagttttttgctattcaaaatttctatgattaaaaaaacttagctaatgtagtttggtagtcaaatcgtatactaaaccatcattagctggttatcaatagcattttaaagaaagttaattaaaccggctgaattggcctgcttgacacgaacaaaatgaatgctagaaattagagaaattttgttagtacaaggatgattatgtaaatgaaggataataaaggggtcaattttaacatttattaaaagtcatggacacaccggtctaacgggtgcgtcggtcggcgagaattacgctgttaaaaataaaataaaataaacatgtaatgaaagaaaaaaaaaagacatgaggaataatcatacgagcgaaacgcaccggaggaaccat

SEQ ID NO: 23227 - DNA, 583 bp, Arabidopsis thaliana landsberg
agccgagcgaggccgtcgtcatatcgcggtcgagatcgaacgaggtgcccgctagcgcgctcggagccgatcggcgattcattgagacgcttgcgcgcgtcggcaaagcggccgcggtcgcggcccgccatctcgacgtaagcaagcagatgatggccgaaggtcacgggctgcgcggtctgcagatgcgtgaagcccggcatgaccgtcgcggcttgatcgagcgccttttcggcaagcgcgatctgatagcctttgagtgcggcatcgagcgtgtcgatggtgtcgcgcacccacagtttgaaatcggtcgccacctggtcattgcgcgagcgcgcggtatgcaggcggccggctggcgcgccgatcatgtcggcgagccggctttcgacattcatgtgaatgtcttcgagcgaccgcttgaaggtaaatttgccgccttcgatttctgacaggatcgtgtctagaccgtgagcgatcttttttgcatcgatcgccgcaatgatgccttgcttggccagcatgtcggcatgggcctttgagcggcaatatcctggcggtagagatgcccgtcgaagtcgat

SEQ ID NO: 23228 - DNA, 1083 bp, Arabidopsis thaliana landsberg
ttgccatggataagtgggatagatatatatgggtttaaacaaaaaaaagataagtattatccacatgacaataggaactattcatataccagaccctaatgtatcattggcactttatttaattattagatgtttatagaaacatggatatgtcagtgtcgatttgtaaaatattataaattctttattatttctttttaattcaacttcattaatgagataagacaatgatgttaccttcacttttcataaccttggtatatgttgccaatattcagactgcgtgaaaaccttaaaatactttcatatgaacatagatacataataggctaaacgaggatgtatattttttcagtattccaaccacttgaggatctattgttttggcggcaaatttccctctcaaacgtagacagtaaacaatggtcaaatagcttcgtttcttattacaaaaatatatatatatatatttacactatttgtataaaccaatggattattagttgtgttctaatgtatcattgcaatgaattagtgtgatcgatatgtatgggtttaaacaaaaacaaaagctaagtactatccacgtgacaataggaactattcatatactagaccttactgccatcacgtcggactatatttaagacaaaaacatcattaccctttcgtttgattaaggaacaatagaacaatgggatataatccataaaataatttaacaacatgtctaagtacctaccattcatcattagtaacttaagtcatttccataatatctctagacaagtagaagtatatacaatctatacaccgctctacaatgtatggtccgccattgtattcatctagaaactgatgtgattctgttatgcccgtgaaccggaaaatcggttagggtttgtttttaaatcatccggtttaattggttgggttaattggaaaccctagagtatgcctataaaagaaggaaactcgaaattagggctttggttagccacttttcgttttataaaggagaaaaagagagaaaaggagaaggagcagaatcgttagggtttgggagaaatcagtttcgtcata

SEQ ID NO: 23229 - DNA, 2478 bp, Arabidopsis thaliana landsberg
  unsure (1)..(2478): unsure at all n locations
taccctatttcacgtcatccaaaaccaaaaatttccttaaaactttcagtttctcattttttcagcatatttcactattcatccgcgtaaaaaaaaaaaaaaaaaaaaaaaattgtcgctctcttctctcgttcagtcgacgaaaccctaatttcgtcgccgttctctactaatctcatctctttcggccgaaactctttcgatggtgtcaaatttcaagtcatcaaaaatcaaaacccaaatcaaagagatctatggaattttatatgatttgttacaggtttgagttgaatcaagaataactactcttttactttgattttatatgtctctcgtttagttttcctctcaatcgatctatttagagagattttaattcatatgggtttcgttttcctcctatgtatccctcaaacatattcttacgtttcttaatttgattgttgttatttggccaataaatttcatattgttttccccagaaaatgtttgtttccgatctgtattataaatcagccgaacgtgatgtaactcagccgtaacatataatttacacaacctttcgtctttcctaaatgataactcagccgtgacatgtaatttaccgaacctttcgtcttccctgaagcatataactcagccgtaacatataatttacactcatctttcgtttgcccttgaacatataactcagccgtgacatgtaaatttatagatgtcttcccttaaacatataactcagtcgtaatgtaattttaccgaacctttcgtcttccctggaacatataactcagccgcgacatgtaaattgactgaacgtttcgttcttccttaagcatataactcaaccgtaatgtaattttatcgaacctttcgtctttcctggaacgtataactcagtcgtgacatgtaaattgactaaacctttcgtcttcccttaagcatataactcggccgttacatgtaaatttgcgcaaaacagtaagagacgcatcatttcgtctaactttatcatcgaacaccaacttcacaagtttttcgtgcgttgtttacgcatctaccacaactctacaccctctttcatcggtgttaaatatgtatttgtgtttctacacccaattaccggaaacaacaattaccggaaccgaatcaaccatatctggagatggatgaaagaaattgaagaataatgagaaagacgatgaggaattaaaaagtttcggtgatgtgaaaaactcaggtgaagaagacgagttgaaaaatttggccctcttttttgtcctttgatgatgatgacattgaatgttggatccgacgtcattttttaattgatgaagtggcaagtaagccaccaaacaaagatgtaaatttgcctaaataaataagccatcaaacaaatctataagtcagtcgcaacatgaatactattatagtaatttaaaaaaagaaaaaacgccaagttaattaatacagccttctaatgtcgtaactcaaccaacaatctttaacttagttgtatcgtttaataactcgaccgtaattgcatgctcttatagtaattaatctttcgttactaaatcagccgtaacaaggccgagttatcccataactaaggcgtctttgaatactcagctagccaaaaaagataactgagtcgtgttgaggaaataactcagccattttctcataatttagccacaatgttgtnnnnnnnnnnnnnnnnnnnnnnntaactcagacaaatttcattaactcagccgtaacgtaagctagattatctcataactcagacaaattttataaatcagccataactataggctgagttatactcataagtccgttgttttctcataactcagtcattttgtcagctgcaacatagcgtaacttagccgtaactgcctctttatcgccttacggctgtcagcaatttctgtcgtggcgacacggttttgctgatgtggcagtggcattctttataattacgttatttcctgtaacgtttagtaggggcacgatgggtatacaaaatggaccaaaatatgacagtaataaaaaaaaaaaatttataaggttctcgtaaatatacctaatttatatgacatctgagtaaagatcgcttgttacattcaagatctcagaaacttttaagatcaagtttttttacattactctggttactaactcagcttttcttctacttgtctttgtggtgtaggtactaatcttcatgcatgcacactcgttccaaaggaattgtgcccctacttcctttaagagacaacattgattggatagctcatgagttacaagaaatcaaagaaaaagcagactgcgatcagcaaaaccatttgttattaatcaactgaacagacgagtcgagatacacgatccaccttaatgttgatcaattaagaaacatcgtgggctcttgatgccctaagaaattttcaccaatgacaagggattgtgcct

SEQ ID NO: 23230 - DNA, 416 bp, Arabidopsis thaliana landsberg
gaccactctagggacaccaaatcttgggaatattattttcttgatataggttcaacacaatttttgcatcgttgggtggactagaaatcgcctcaacccattttgacacataatcaaccgccacaagtatgtagctatttccatataaagaaggaaatggtcccatgaaatctattccccatacatcaaatatctcaacctctaaaataggattttggagcatctcattccgcctactaatgtttccttttctttgacatgaatcgtacttcgaaatgaactcttgtgcgtctttaaacatcattggccaccataaacccgcttgtagaaccttggagaccgtcttgaaaagtggcaaggcgaccctcataacttggacccgggcaatggagcaaaattccttcttcttctttctt

SEQ ID NO: 23231 - DNA, 951 bp, Arabidopsis thaliana landsberg
cgtatcccttaactgttaaaaatggcaaaattgcaaaagtctagtaaaattatcatttttagttaaaaaatccaaaaaatggcaaactggacaacaatcccttcttcttcatgtgaaaatttcacacttcacatatttatcttgacttgtgtatcttactctcgaccaattttcgttccctgatacatgaatgtttaaaaaatatatctatataaatatttaacatgttatatactattactttatttacattgtctgaaaaattatttatcacttattcatttataaatgactatcctctctgttcctttttattggactatctaggaaataaattcgttatcaagaaattgattttttaaagttttttatgcacacattcatttgttatttctgatgaagggtcaacttcaataaaaacgattgaatatcattggtttaaagttatatgaaattgtaaaacacacaaaataatacatttaaaatcaactttaatatgtttaccttaatatgtgtgtttttcttaaacaatcaaacaaaaatgaacagagggagtagtaataactacaatgttgattactttggtatacatgtttaatatttttaatttcaatgttaatgcttaataataaatataaaataacattgtatatatcttggtcttatgttcttatagcattgttttagaatatatatagccacactttattttctttaaaatagctggttttctactttctaaattagttttcgtgaaaaaaaaataagaaatatgtatttgaagatatatgtcatacgattccaaagcaagttagatatatcatatattaggtcaaaaagtcttgggatgacattggaggaacaaagaaattataagaacatttaatggttttgatgacaattttataatgttcaaccatttagtaagatacatttaaatttgccaagaaa

SEQ ID NO: 23232 - DNA, 1655 bp, Arabidopsis thaliana landsberg
cacgggatcatccctaggaagcgcgtccgaccccttgggcaactcgatctgtccgtctgcttcgggactccctccaacttccgaaaggaaaccctcacatttgaagtggtcgggttccgaggaacctaccacgcagtgctggggagatcatgctacactaagttcatggccgtccccagctacacctacctcaagctcaagatgccgggccccaacagggtcatcaccgtcggctccacgtaccgacacgcgtacgaatgcgacgtggagtgcgtggagtacgccgaggccctcgccgaatccgaggccctcatcgccgacctagagagctttccaaggaggcgccagatgcgaacgccacgccggcaacttcgagccagctgagacggtcaaatccgtccctctcgaccccagcaacgacgcctccaagcaagtttggatcggctccgagctcgaccccaaataggaagcagtgctcgtcgactttctccgcgcgaatgctgaagtttttgcgtggagtccctcggacatgcctggcataccgagggatgtcgccgagcactcgctggatatcggagctggagcccgacctgtgaagcagcctctgcgccgattcgacgaagaaaagcgcagagccataggcaaggagatccacaagctgatggctacagggttcatcaaagaggtattccatcccgaatggctagccaaccctgtgcttgtgaaaaagaaaggtgggaagtggaggatgtgtgtagactacactggtctaaacaaagcatgtccgaaggttccctaccctctgcctcgcatcgatcaaatcgtggattccactgctgggtgtgaaaccctgtctttcctcgatgcctactcagggtatcaccaaatcaggatgaaagagtccgaccagctcgtgacttctttcatcacaccttttggcatgtactgctacgttactatgccatttggtttgaggaatgcgggtgcgacataccaaaggtgcatgaaccacgtgttcggaggagcacattggtcgaacggtcgaggcttacgtcgatgacatcgtagtcaagacgaggaaagcctccgacctcctctccgaccttgaaacgacatttcggtgtcttaaggcgaaaggcataaaactcaatctcgagaagtgtgtcttcggagtcccccgaggcatgctcttggggttcatcgtctccgagcggggcatcgtggccaacccggagaaaatcgcggccatcaccaacatgggcctatcaaagacttgaaaggagtacaaagggtcatgggatcgcttcggctctgagccgcttcatctcgcgccttggcgaaaaagacctacccttgtaccgcctcttaaggaagaccgagcacttcacttggacccccgaggccgaggaagccctcggaaacttaaaggcgctccttacaaacgcgcccatcttggtgccccccgctgcgggagaagccctcttgatctacgtagccgcaaccactcaggtggtcagcgtcgcgatcgtagtcgagagacgagaagaaaggcatgcactgctcatgcagaggtcggtctacttcatcagtgaagtgctatccgagaccaagatcctctacccgcaaattcagaagctattgtacgcagtaattct

SEQ ID NO: 23233 - DNA, 564 bp, Arabidopsis thaliana landsberg
  unsure (1)..(564): unsure at all n locations
cagatgcaggtttatgtgtagatttgatcacgatatagagatttcaacaaattacaagaaaagaaagagcactactgtgttattgggggtctcaccattttgttttgctctgtatctccagtacttatatgagccaaaggccaaaatcacaaaaatggaaaggctgatactaccaacaataatcttggtcctcctgtttccagctgagagatttaccacaaaacaaaatttcaacaagttaaaaccacactgcagttgaaataaatacgtaaacaaaaatgatgtgtctttatgggataatgtctttcagccctacccagttctgaacttgcaagacgaatggaaagaaactctcctccaaccgaatatctaactgtgtctattagctcatgattccaaagcaaacaaccaattccagtaatatacgcaaaagcagannnnnnnnnnnnnnnnnnnnnnnnnnnnnnnnnnnnnnnnnnnnnnnnnnnnnnnnnnnnnncgtagagatccggaggctttacattggccagacgatagaagacgtctacaccttttccttgtgtc

SEQ ID NO: 23234 - DNA, 982 bp, Arabidopsis thaliana landsberg
cagcggatgagaaactttatctatatgtctcggttttgggccatgtaattagcggagtcttgatccgaaaagactgaggagaacaaaaaccaatttactatataagtaaatccatgacggatccggagaccaggtatacgatgatggaaaatgttgcactacaagaatattgaactttaatagcattagttgatagcatttaatgtgtttttgctatggttgattttctataacgtttccaaaataacaaacgctatatttgttttgcttgggaaaagttgtgcttgtttattaatatttttttgtccatttaacaaatattaaaccaaaacgttatcgtagagttaatgcgaaaaattgtgcgcttaaaaattggcctcctacatttgcgcttaaaaataggtctcctacatttaacacctaaacacttaatctcagatctgagataatttttcccattcctttcttctttcattcttcctctcagactcttctttttccaatctctccttctttatccatccaaatactctcggatctgaactcgaacaagtatctcaatcatccctaaaccctcaacccttcatctcccttttcaagtgatgcctcaagttcatcttgtgactcgatccgacccgacccgagtcttcttctcctcaccatcagtctactcactcattcctcttcacgctttcgtttctctaaggttctctctcacccctctttactatctcttattttcctcgccggtaggacagataatcataattcaatatatcaccctttgaatcttaactctcagattcaaaaatattgagtcgtattgaagatgagatcagagacgagaagaatcctcgcccgctttttgaagatgatatcgctctcctcaagacatatgtaagcgtcctcttttaaaaccctaaatttgattggggtttcagattttttgctttttacgcttctggtttcgtagacgcggaga

SEQ ID NO: 23235 - DNA, 602 bp, Arabidopsis thaliana landsberg
agttcaaataccattgcaaagtaaaactatgtttgtttcaaccattttttgtaatgttagtacaactggaaatactaagttggtattatggagttcgaatttgttttttctcaaaactcaatgaaaattaaagacattgaagaagtactagtaatcatataaaattaattaagttagaaattttaaaattaaatcgattttacttgtttttagtagactcaataccacatatcccttatgattttaagcccactttcaatataatcaccaacttagaatgaaaagctcctaattttatatatttttaatttttgaatggacaaaacatttgaaggtctgtaaatataaagttcagttcagtgtactaccaaataaacaatttgtaaatataggaaatactactaaacatgaaaaacacggaaagtaatactatttttttcacgaaaagtaatactatttgatagattggtactaccaaaaccttgtgaaatactatgttgtaaaaacctgcgcccatgtaaaaaaaaaacggcgcacacgtggtaaataaaatatttggtttccccccaaatgtattggtgcccgacaaaattgagttttcc

SEQ ID NO: 23236 - DNA, 845 bp, Arabidopsis thaliana landsberg
  unsure (1)..(845): unsure at all n locations
gactagaaagagtttctaaaaatgctttatcgatccaatcaactgacagacaggtttgggtgcaacagaatatgtgtctcgcatcacccttgtgtaaaattctgttatcacctggtcgctctcttggatcggagctcttgtagaatccaatttgccaagaacgtaagacagggtttgctccatcattgtcttccgagcaagcataatccgagggacaatatcgaatcttgtaacaaagtttacgaaaaaccggctccaattctctcaccaaccaaaggagctccaaatgtcacacaacgaggctcaggggcagcataggcgtcacgtatgaagtatgtctccaaataccaaactgttgctagaattgcagttgcgcctccgaaagaatgtcctgtgaacacaacctgttgttttctatcaaccgcgcttggcacctgaagagagtaagtttcagacacaaattattctgatgttttcgatttaaaacgcatttaagaagtttttgtttacttacagaagcatagaatgaggttcttggtccgataggaacttcaagtggcttgagggaagcttcgttaacagtagcgtcnnnnnnnnnnnnnnnnnnnnnnnnnnnnnnnnnnnnnnnnnnnnnnnnnnntatttctccaaagggagatgtattctccgtagcgaacaattcttccgacgagaaagatgctcggaaggcgtaaaaagcggttcctcctgcttcttctttgagatagtgctccgtttggttagctcccttcgacgccatccataatatggtgaatagatcaccgttgactcccgtaagagcttcgagcgccatttctcttttcttg

SEQ ID NO: 23237 - DNA, 525 bp, Arabidopsis thaliana landsberg
agtaggcttgaagaagcctgatatctaggccaaaatagcgagtttgattctcaccttgcaccatcatttgttttgtatagtatccagactttgaccgtatattttccgcattttgtaaagtgtcatcccatgacatcaagtctatttggtgatcccaaatgtaatgcaaataccaaaggaatatcctttttagatccataatactcctaatcaaatccatatcccatgaatttgaatgataatcaatcaaatcattcacaagtgagggtttataattgtaaccattgcttaaagctggcctggagaattgagcaggtatccaagggtcattccataccgaaattgacactcctaaacttactttttataattcctttattaaccaaagatcgagcacatactacactcctccatccataggatggtgagtacggtatcattgggtccataggatttgagttccgatagtatctacctttaaacagttttgcagataaagagttagggaccgtaatcaatcgtcac

SEQ ID NO: 23238 - DNA, 1110 bp, Arabidopsis thaliana landsberg
ttttattttttcgttagagtttgcacttaacaaaaatattttttggaaaaccttgaaatgtgatttttttgttttgtttgaaacaatcaataatgggttccctttatttgtgtttaggtactgtgttggattcaggagatggtgtgagctacatagttccaatctacgaaggttcaccactcccacatgcaatcttgcggctagatttagcaggccgtcacctaaccaactacctcatgaaaatcatgatggaacgtggctacacatccgccgagcgtgaggtagtccgagacatcaaagaacaatttggttacatagctcttgactaccagcaagaaatggagaaggctacaaagagttcggcaatcgatagaacctacgaactttcagatggacaggtgatcaccattggaggagagagattccgctgcccggaggttctgttccaaccgtctttggtgggaatggaagctgctggtattcacgagaccacttacaattccatcatgaagtgtgatgtggatatcagaaaggatctgtatggtaacattgtgctcagtggtggaacaactatggttccctggaattgctgataggatgagcaaagagatcactgctttggctccaagcagcatgaagattaaggtggttgctccaccagagaggaagtacagtgtctggattggaggctccattctagcatcactcagtaccttccaacaggtaaaatcatcattcggttttatatggaattttgtgtcctttttttttgttgcccattgttaatgtgatacacaaaatgttgttggtgtgcagatgtggatagcaaaggctgagtatgatgagtcagggccatcaatagtccacaggaagtgcttctaagattaagctcaaatcaaagtgatgaatgattgttctgtattggtaaagccttttgttcatcgactttgttgcaaaatattcttttgttttctatgtttcttcaccactacattacatttgtttcttgctgttatcctcttttggtggatctggctttaaagccaatcacaaactttctttacttggcttcttttttattcctcatgctacttttgttgaactaaaata

SEQ ID NO: 23239 - DNA, 711 bp, Arabidopsis thaliana landsberg
aagctgttcttgaataagcaatttacattacaacaacaatacaagactcctcaatgtttaaaccattttttactctttacctgtgtagcaaacacaagaagctctcctaaagcaaagagagcgatgaaaccgtataaactcttcagggtaaatgcagtgaagcaaaataccgccccgagaaatgttgctccggataagagctgaatccaagattaaagataaaaacctgagtaatccgaaatactagaagaaaagctcttttttaccttaaaagcatttggaattgtagcagtaacacgatcaagtataaagcctcctgataatgttccaacgatcccacaaatgatagttactgccccaaagatcatatctgcgtttttctgtcaacaaacacagtttcttgaatctttcatggaacccccaagagaaagagttttgaatttttgatgaatgactgttttaccattttataaatgttataaccagcctttggtccccaatatgagtatgctcctataacgaaattgtatgatacataacctgtttaaaggcaagtgcaagtatcatcaattaaaaaagatacatagtgtaagcagaagaatagaaaaagtggtaagaggaaaacattacctaagacattaacaacaaagaccttttctttatacagaactttcatgtcttttgcaaagccagtaaatgatttgaaaaccg

SEQ ID NO: 23240 - DNA, 487 bp, Arabidopsis thaliana landsberg
tgagagtctatgaacttgggagcctaagttgggtctaagtgactagccttgtaacgtcgtatgccttcccttttatagcttaagggaggcacatacaaggatgttgagccccgacatgtgggcccaggaacataacagaaggaacacctagagcaactaatgcaagtagcgcatgtgcaatctcctggcgccatgatgttcgtagcccgcgcagtattgatgtgcagcggtagcttccttggtaacatgcgggtaatgatgagtatagtgcatgcggcagcatgggcgtgccgcctgccaatggaatggacaggcatgccgcctgccagcggaatggacaggtctcattaaatgctgaggcggcacactgcttgccagtggaatggacaggtcgccgcctgacagcagaatggacaggtctcaataaatgcggaggctgcacaccgcctgtcagtggaatggacaagtggcgcgccttatccgcaat

SEQ ID NO: 23241 - DNA, 1292 bp, Arabidopsis thaliana landsberg
  unsure (1)..(1292): unsure at all n locations
cttcagaatacttataaataaattgagtcttacatacgaaatatgttgtgaaagagtacaatgtgtttgttggttttgccttcgaacaatatcatgaaatatgtttttggttttttaattgtttataccattaggtgattcaccacatgatgatgcatatagtgatgatgcatatgtacaatttatctattataatgaggttactatcttgattcccacaaaccaaaaccattattttactttaccgttaagataacaaaacaataaactaaaaatgattgtacatattttcattatgatttgagttagagtttttatatatatttttatttcaatttctacgtaatattctcttatataaagaatttattttatttgtgactaatatttggttttggcaatttaccaaaattcaagattttattcttattttttttcaaaataagctttttaatatataaaggttaccaaaattcaacattttttgtattattattattcttaagaaaaaacctataaaaataaaaataaaaaatttgtaaaattaagcgtcaaaaatagtatccctttattattaaaagggaagtacaaattgaaattttgtctaatttggcctcaattttaattttaattttggattttgttctttgctattcaaaatcattaaggataatttggtcttaacaatctcctaaactttatatgatccgatgcaatctaaaccgttcaataaaattaattcccttcaatctaaaccgttcaacaaaaataagaaatctatgtcgtttttgaaatcaaaatatgatcacattccatccctaaaaacactatattcaatcacgaaatcaataatcaataatatccaaatcatatattacgattcttcactaatcactagaaatttatatttataagtttaggatatcaaatttattcaaatatttagtacaaaaaccaaataaaccgattgtccgcggtaaaccgcgggttaaaacctagtaataataaaaagtagcctaccaaaaaagataataataaaaagtacataagtaaataaatcttgtaaattagtgtaaatcgttgcaagttattgtgtttgtgctgtttttttctttttctttcaattaactcaaaaaacaaaaaaacgactacgaatgggattatgttatatatatatatatatatatatngggtgtgaaaatataagaatattactcatattaaattaaatcattgtgcatcatattatttggttcagatttcgcatcttccacacgattgaatttattatt

SEQ ID NO: 23242 - DNA, 534 bp, Arabidopsis thaliana landsberg
aactttaacatacatacagtgaattttttcaacactggggcgcatgttaccaatagtagcaaaaccctcgacaaaaatttgtaccgactataaatattcaactccaactctttcctctccacacactcaaatatctctccaacactaaaataattgtaccgactctctctctctctctctctctctccgtaacaaaaaaatcaccaatggcaaaacaatatctctttgtactcctctcaatctcctatctcttatcactggagctcacggcggccaccgcagcctcacagaccggagcttccaaaaaagccataaacttcatccaatcttcttgcaaaaccaccacataccctgccttatgtgtccactcactctccgtctacgcaaacgacatccaaacaagccctatgcgtttagctgagtccgctatagccgtgtcactaagccgagccccatccccggatgctcttcgtctcgcgtctaacgggggtggagggtcttaagtagaatgaaaccgaccccatcaaagattgg

SEQ ID NO: 23243 - DNA, 1068 bp, Arabidopsis thaliana landsberg
tggatgaataaatatacttgttcaacaacatatgttatgttgcacgagcaaattaatttcacatggtgacgttatcgactaatgacagtagtttgttgaagtgaatcaatgaggtactgaaaagtcatagaacgtggaaaattacatttgtcttgtctgctagaaataattgtaatgagttttgcaaatttgaaaaccaacatgtgaagaaatctataaatataggttttaagaaacaaagaagagcataagaaagaaagtcgtgaagatgagaggcgtaacaccaaactattaccattcttacactttcttcttcttcttcttcgttgtcttattagctctgtttcttcatgttttctcgataaacactttgtcatctacagaaactctaacaatctcaagcaaccgaaccattgtgtctcccggtaacatcttcgagctaggtttcttcaaaactacaacaagctctcgaaatggtgatcattggtatcttgggatttggtacaagtcaatctctgagagaacttatgtatgggttgccaacagagataaccctctttccaagtctatcggaacattaaagatctcttacgctaacctcgtccttcttgatcattctggtactcttgtttggtcaacgaatctaacgagaacggtgaaatctccagtggtggcagagctgctcgataacggcaacttcgtgcttagagactccaaaggcaactatcaaaaccgattcttgtggcaaagctttgattatccggtggacacattactcccggagatgaaaattggtcgggatctcaaaacaggacacgagactttcctcagttcttggagaagcccttatgatccctcaagcggagacttctcgttcaaactcggaactcaagggctacctgagttttatcttttcaagaaagagtttctattgtaccgatccggtccgtggaatggagtcgggtttagtggcataccgacgatgcaaaactggagctactttgacgttgttaacaacttcatagagaacagaggggaagttgcttatagtttcaaagtcaccggccc

SEQ ID NO: 23244 - DNA, 532 bp, Arabidopsis thaliana landsberg
  unsure (1)..(532): unsure at all n locations
gagatgtatggggattcactggttcgtttgatagagagaatggtggcggtttcttgnnnnnnnnnnnnnnnnnnnnnnnnnnnnntatttggtactttgaagggatctatgcctactctcctcagattcctggtaagaagaaaacaattcaatgtcttctatcaagaaacttagtagcataaccatgtagctttccttgttatgattcgttctgttgaatattcaaatgctaatnnnnnnnnnnnnnnnnnnnnnnnnnnnnnnnnnnnnnnnnnnnnnnnnnnnnnnnnnnnnnnnnnnnnnnnnnnnnnnnnnnnnnnnnnnnnnnnnnnnnnnnnnnnnnattagaagaaagtggtgttgagtccctaacactatgtgaggtagtgcatcagcggccattagcatgcctaccaacaactaaaggatgtctcctcgggaatgtacgctattttctgatgctataacaaaagttttgaactggataaaaagtgcttacctctgaattcccagggaatcttacataatcctc

SEQ ID NO: 23245 - DNA, 1220 bp, Arabidopsis thaliana landsberg
attctttggttttatggtattgatgacgctctcatgggtccataaataataagaatctcaaacatatttttgtagattagttgagaccttatgaagctactaaaatatttttgagatttataaaaataaaaatattaatgtaaaatgtattattttccaaaaattctagaaaccacttaaaaccagatattctgggacaacatgatttgattttgatctacccaaattcatgttattagaagacagttttaatatctttttttgtatgaatgtaaaattataaacaacaaaaaaactgttttacaaaagatgtcacattaagaatagaaagtttggaaaaaacagaactacttagacagtctcgggaatgcgggtttggaaccaaaaccgcaggccaccttcaagcttggcaacagttttaatatcattttggagtttcttaaaattttgatatttaaaacggtttccacccattctaccaatcggtgcgataattcgaaaatctcaatctacaaattttcagatttctaaattttcaaaattttcagatttctaactaactaatcattgccttaagttattcgtcctaaaaccatttttgttatcatgaaaatatctgccaaaaccgctctatgacttatacaattcgtacatgaccccttcccaatcaggcaatcaccaatcacaacgttttttaggctgatcaaatgttgattataagatttataagataatagcttacaaattccattctaatttgtatagtaaatggaaagatatcattttcactttaaattgaatttatcagataatatcttcctacaaattgcattacatctgttatattattccttttatatgtggtaaatatttttaacctatatatatatatatatatatatatatgtctacattaggcgattttcattcttatcttgataaataaaggttccagatgataaataaaaaaaatattacatagaggtgtattaaaagactgtattagaaattaaatctgtatatgtgaacatggaaataataattgtttaaaattggaaacatgacacgaagcataaactgataaacataaaagaaaatttgatttgtgttctgaagtgtgaatgctattatatagaaatttcagacataacatatatatgtcgagttgtgttttcgtttgactaagaaatgcaatgtatgattttaaaacaaacgtggcc

SEQ ID NO: 23246 - DNA, 593 bp, Arabidopsis thaliana landsberg
  unsure (1)..(593): unsure at all n locations
caaagctttgcaccgatgatttgcaaaaaaaattccattatctgtttttgtttaagatgatgtgatatgcacagaaggtttttcatatgcatatgtttttcttatgttatgcatagtaatgaccataaattttaagatttcggatcggtttcggatttatttaaatattaaaatatcaaaattttgtgtgcaaatctatcaaattacttgaaattttaaaaaattcccaaaacaacacatgtaattttacttaaatatatccaaaaataaacaaaaataattaaaatatctaaaaaaatcagaatattttctatatataagtataatatatactaatatttaaggtatgttccggttgagtttttcaggttctgaagtttttcgctaacaagctttttctttaatttccatatgaaaaagttcaaaaataaaatgtatgaagttacaactaaaatttacttctaacctctctctctcttacacttttacagntaaaagttacaaacaaatgttttcttttacaactttaaattgtccaaagaaacccctaaacatataaaattcaaaaacatatttacaaaagagttcgaatg

SEQ ID NO: 23247 - DNA, 2027 bp, Arabidopsis thaliana landsberg
cattgttactttcattgattaattgcggtggttgttctctgctctctttttcgtagacaacatgagagcttaaaacgtacgtaaaagtgatgtggaattcataaattgtcacccccaatttatgaaagtgacttgtattttcattttcttccattaacaccgtacttttcatccttattcttccatccaatttcaccgtattatcagtttcacacacatgaataatgggatatgtgcaaaaaaaaacctcatagtcatctatttttgcgattttaccttttacatccaaaaaatgtaaaataatattatgaagtaaaaaataatatacaatataatccatgtttgcaactttacatatattataaacgtttcctcgatctcatacatttgtttttgaaaattttaaagatatagttgaactccttatctcgagagcttcgatttgatatattatttattagaattttaaaatttgacaatagcgaaaaggactatattgcgtattatttttgacttcatatgattattctgcattttttggaagtgaagagatgtgtattacaaaaatagacgattttgagaatttgttttgcacaaacccatgaataatcatcatctgtttgttttatttttgtttttattaatttcatgtctattcatctcttcttaagttcaacatgcttacacacgacactagtatgcatatcaatctcagcatttgacacaacaataacagaagaaacatctaacaggtggtctccaagactcaccggtgtgtcaactttgtttgtggttttggcggcttaatttcgagaacttgggacttatgttcaaagcctagtctccttctacattctgtcccaaaatgtagatgtgtcaaaatgggtcttatgggccaaatgagtagatgagtctaatgagttgggttaaaaacacgttgacaagtcactcattaaaccatacattttgtttttaaaaactgaaccaagcccaatcaataatcatctgatttaaatgtgtaaactgtaatcaatagaccaatgattgaatttaacctaattcaaccaaactttatctcactaccattttcgtttattgtcaattgaatccctcatcttcgttttctctatttcactcacatacacacgatttttttcaatcctctcttcttcgtcattgactcaagctttcacttggaagagtagaaaggttatggcatttggtttatcttactgtttgttatatgaattggaaatgatctccgaatcaatttttgatttttagttatgaattttcaaagtctgtgttttgttgtttagacactataaggcgtgcctattgaatattcatgcaaaaacttgtattctcctgatcatcacataaagagatactatataggatctccttcattctctattgcttaattttggaagagagttcgaatgctttaagtgtctcttagaattttcatgactttgtagctttgaggtatatattaaaactaatggcctagttaggatagttttttttttttggtctaaatgttaagatacttttttgcatggaattagaagacttctccacaatttttaataaatgtattagtagagaaacaaaaaaaacttcaattcaacaaaactagccacactaattattttagagaaattcccacaaataccaccaatattttataacttatgcattcattattttattactataaactctctaacttatgtaacggtcaatttaatttatgtattaaaaaagaagtaacgtcaatttaacattgaaactcatgcattgaattttcataattactagaaaaacaaaatctgacttaagggaacaggcaaaaaaaaaaatcgaacttacgtaactgtcaattaaatttttcaaaaaagaagtaacgtaatataatattaaaaatataatatatatatatatttccttatctaacaaatataatatatatatataaatatatatatatatatatatatatatatatatatatgttgacaagt

SEQ ID NO: 23248 - DNA, 530 bp, Arabidopsis thaliana landsberg
  unsure (1)..(530): unsure at all n locations
actcaacctaatttgagggtttatttattaagtaataaaacatcagggttttacaaaggaaacatctaattgatcatgatttttccgcaaaaaaattcaagcttaacattgacccatcgtgttgattttgttccgatccgtccgctaatataatataatttggattagcgtcaaaaacgtgtgattattgtaatgctcgatgcatccagcttcatgtagtctctcactcaggaaagtcaaacttaatattcttacagtgagaatgaagctctcttctgaaagtccnnnnnnnnnnnnnnnnnnnnnnnnnnnnnnnnnnnnnnnnnnnnngtaagtctttttctcttgtacttcatcagtttcttgagttcaatggaaactactttacctaacttaggggaatcagataggatcatagatcatgagagcaatgtggttgagtatgtgcattacagagatctgcattcatctgttggcttgacatagtgcatttgttttacatatatagtgagaaaacaaaaacgaagaga

SEQ ID NO: 23249 - DNA, 2335 bp, Arabidopsis thaliana landsberg
  unsure (1)..(2335): unsure at all n locations
taccaaaatctttcacttatttattagcaatttatcttaattaaataaatgttgttaaactttgtcttttgtcacactagtcataactgagattgatcagttcgttccatttctatagaattcaacttatacgttgaatccgatagaaagaaaatagaaaagtaatttgaattttttttcatccacaaacaaaacttgttgaaacttgaaacattgaataatctaataaaagtataaaaaaaaatataaaaaatatatgtttaccaattatccaatttatttctgcatattttgtaaattaaaaagtaattcaaatacgtttcatgtcgacaaaatgttgaatgtacaagtggtttatgctaatttaatcactgtcaattcactgaaacgaataaatcgagtaattacttttttaattgacaaattacaaaactatagaaacattaagggcataattgaaatttccaataaattgaagagcaaaaaccctagaaaattgacacggactataaaaaggtgacgaagcggcgctttttcggtttggtcatcgtgctcctcttctcctccaccgcacagatccaagacattttgattacactccatcgccggcgaaaatggtgacggaaaagaaaacggtgcgccttattctctcccatcaaagttttatcccttttcctcatcatctagatatcgtttacgatctcaatgtactaatatgtttctgggtttattgcttaattgcagaagaagtctcatgagggtatcaacagtaggttggctcttgttatgaagagtggtaaatacactcttggttacaagtctgttctcaaatccctccgtggctccaaaggtaattgcgtcgaacacttggtctgcatacctaaatgttttagctttttgtagtttgttattgattctggtttttgcttatgttcacagggaaactgattctaatctccaccaattgcccaccgttgagaagatcagagattgagtactacgcaatgctcgctaaagttggtgtccaccattacaatggaagtaagttcctttcttctttagctcgtccagtttttaaagattcattgttctcttgtttttgtgaaggttttcattgtgtataataactgagaatgtataatcttaagtagatgaaagtgttaaaatctgcttctatagaccattaaactgatgatggaagtatgatctcaagtcgaagaaactgtaatgtatattgacgtgaagtcttgatctttcgcaagttcacgatcggtttgaactgctgttggtgtctctgtatgtggttattgcaaatattgacatggttcataataccaaagattgctctgttggtctatgatttcgcattgttagattttgactcttagacaaaacttgatcttgctcgatgataatactcgaaggagcgttttaatacattatcttgatgatttcatcaaagaaagtagatgaatgtttattctattgaacatagtttcatgtttcaacgctcattcatcggttattcctcttgtatctaccactttggcttaactgtgtttttcttctctccttgttaatggctttcagataacgttgatttgggaacagcttgcggaaagtacttccgtgtttcttgtctgagcattgttgatcctggtaaaagagctagctacttgcttatatattgctgctggttcttcattgatagatctactaatgattttgtctttcgacttgtttcaggtgattctgacattatcaagtcaattcctggtgaccagtgatacaattttcagattttatttttcccagactttttacccgtctttgtattcgagtctctcaaaattttatgagcaatagacattgtgtttcttctttgtcaagtnnnnnnnnnnnnnnnnnnnnnnnnnnnnnnnnnnnnnnnnnnnnntacaacacaagtttacgcattttctcatcatggttcttgaaaataagccaataagtttgtttgacaggaaggtcgcttactactgaaaacgatcaaatacaaattactcctttttctaaacctaatactggtttgattgtagtcacaatcatgttagtttgaatctggatagtaacgtagtagagacatgtgtgtcatggttttattatagtatttgattagtacggatatgatcatccaaaaaaggggcatgtgtcaaaatacacatctgacaaaaatggagacaaataaaccattgtttttgttcagttgttgttgcaaggtgtatagttatcatttggtgaacaaagttatcttgttttggcattttaccatttactaatggatagaatccatgtg

SEQ ID NO: 23250 - DNA, 569 bp, Arabidopsis thaliana landsberg
  unsure (1)..(569): unsure at all n locations
agacactataaatcatgttgctatgggaagaaaggtggttttgtttttcgtcccagctgctttttcaggtgggaaatttatcctttttctcaagcttttaacaatactttggcacatccagctccaccctgaacatctctcacaccttcgttacgccacaggacaaacacgaacaagagaggtaagttgtctactgttatgaaatgatttaaagaagccttgaaacatattcaaacattagatgatttatgtttctttgtgtcaacggtcgcctgctattcgggcttgtgcaggaattatcgttggaatcactgttgttctcaccttggtgatcagtgtgctgcttgttctagggtattctctttgtaggagacgaaaagcgtctcnnnnnnnnnnnnnnnnnnnnnnnnnnnnnnnnnnnnnnnnnnnnnnnnnngggcataaacatttgcaaattagttttcatcttttcctctgttcttctcaaatagtcatatttttcttgcagggagctcaatgacgacttatggnnnnnnnnnnnnnnnnnnnnntnatagactgactatacg

SEQ ID NO: 23251 - DNA, 446 bp, Arabidopsis thaliana landsberg
agaagagaaaagagtttagaagaatcttttctaaagggagtctccacagggttttgctcccaagaataaaagagataataagagttaggtctaaacaatgaccataaatatcaatatataagtcttaaaatgtcaaggccgaatttggaaatatttaaaacacgaataagttgcgcaattgaattaccgtcaggtattggtgtcgctcgacaccaagggatgtgtcgattgacacctacgtcaatttccgtctccgaattgctgccgcagcctaagttgtctgttttgctctagaatgctctataatctccaaatgcatcccaaacatgtaaagacctgaaaaagagtacaaaagactctacaaataacgaaaaggacttttaaaactatacctaaatcatagcttaaagcagtgaacattgaggtatatcaactcctccagactt

SEQ ID NO: 23252 - DNA, 1039 bp, Arabidopsis thaliana landsberg
gtgtttttcatgtttaattttggccgacctcagagttcacgtatagaatgaccactttttgaaagttcacgtataaaacaacatttttccttttataatttgttggtataatccggttttcggtttagtaactcatctactggacaaaatcacccgctgtcaatcatcattcttcatctttttatatcatcaatgtaccaaatgaaaaagtcttcgtagtgatttatttagccaataatccgaaagttacatattcaggaaacaacattgttcatgtgatggtagttttatcggaagcatggcgtaaaactcgctatataagttcgaccattgccaagttgatattgatggtgtcacttagtttcgaatcattagtcgtctccgtaaccacataagagcccaagattggcttttctaattagtccattaatgatggacctaaaagcccattagagtttacatctgaaatagccttacccattacgcggtaagggttttagactaaccgatttatctaaccaacttttcaaatcaaagcaacgaactttaaagtgagtggcgatttacggcgatcggccggcggcgaaatacgccaatggtccgacgaatgcggcgttgatgtatgtagctggctctgatcgggtgtaatcgtctctctggtctggatattcatcgttttgattcggtcctccgacgattgctccggttaatatgttagggttagggttttgtgttctgaatgattggaatccgccgttacagcccagagaattggaacggacggctcggctcgggagtgaggaacctctgtgatggattcttttggggaaattggagctgaatccaaccatgtacgacatcttcagtggattcacaccgaggatgtaatcgacttgtcgcttcgatagatttatcagtgcgttggggacgatgagtgagtttccgcagttgaaagtttgttttgtggatttcatatatttggcgtaggtggtgagcaagaatgttattgatgtcacgtattgtagattgctctgaggta

SEQ ID NO: 23253 - DNA, 1454 bp, Arabidopsis thaliana landsberg
  unsure (1)..(1454): unsure at all n locations
gctatttcttcgaaatccgtatgttttaaccatacatcattatatttccgaagacaaaacgaaacgttttggtctctcactcacttcccctgacaacctgcacaaattatctacatgtaactttcaattaaatttgtctcccaatttattcatcataaattctcataaattctttgttgtatctatatattgtctccgatttcatcatctttcaaaattatcatgaatcccacatcttatccacaaaattgttatcatttaaggatttcaaattttatttagacttttcaccatctattttggtctacagattagttgagcattattgtcttcaccgatctgaattattcattttttcttatattgtaaaataacaaaaaaatccagttataacatattatcttgtctaccattcgatctaaatttgttccctatctaattcgatcactcattcgatatgaacttgtccccgatataacatattatttaaataaaattatatgcaattgtaaacgtgaaggtgaagacaataacgttcaactaatctgtggaccaaaatagatggcaaaaaatctaaagaaaatttaaattccttaaatgagaacaattgatggacaagaggtgggattcataataatagagcaagatgatgaaatcgaggagaagacgtanacgcaatagagaatttctaatcggggacaagatctggagacaaaaaaaaaagtctatcaccaattgtcctttatctgacacatcatgtctggggggggggagggcaatttcgtccacaaatgtgcatgtgtttatctaaatgtggtagattttgtaagagaatgaaactttttgtggtaaagattgtaagaaaactccaaaaaagtggtagattttacaagattctcgaatatatatatatgctcacgcatacatttaaagagtcataaaaacaatttagttgttattataaaaatattatcctctattttgttattgttacttaaagagtcataaatagaattgacgttattttctaattttgagcttcataagtagtggtgatagttagtttgtttcaaagattttcttggcagaatggttgagttcttgttttcaagtttgaatctgtatttataagggaggtcggtttcatgtcgaggaagatcagaaaccaatggtccaaagattgcattaaagataagaagttgtgaccttctctttcttatgctcgaagagacaattagtttcctgacataattgtataagcaagtggggcatgctctacggaaggttgacgcagttcttttcttacttgcgatttcttttgttcttaatctaaaatgaaggtctatgttgaaatgggccatatgttattatattatacatgactttttaagttgaataagtttacaaattgatttgcattgtttatcaaaaaaagattccaatcattgaaaaaa

SEQ ID NO: 23254 - DNA, 627 bp, Arabidopsis thaliana landsberg
gtcactactaacttaagccaattgctccgttagtagggtatagtggtcaccctaagttaagtaagcgtgaacatgttgcaccatattaagtcactgccgacttaagccgattgctccgttagttgggtatagtggtcaccctaagttaagtaagcgtgaacatgttgcaccgtcttaagtcactgccgacttaagccgattgctctgttagtagggtataatggtcaccctaagttaagtaagcgtgacgatgttgcactgtcttaagtcactgccaacttaagtcgattgctccgttagtagggtatagtggtcaccctaagttaagtaagcgtgacgatgttgcaccgtcttaagtcactgccgacttacgccaattgctccgttagtagggtatagtggtcacctaagttgagtaagtatgcagattgataataaatagttcgagtgcctttgagaatgaagtctttttattgatgatgtattttacgattacagaatacaatgctgccccgatagactttgaaatctggctaggggtaaaacttcctgagatgctctatattccatgaattccctatttccgtgcgatcgatttgagtaagtcgatatgatcatggccgagtg

SEQ ID NO: 23255 - DNA, 581 bp, Arabidopsis thaliana landsberg
tcccattaattactgttgccgaagaaaatatgggatgctaatgtgtccctatgaacacataccttaaaatatatcattatggaaactggaatttaactagatcaatatttcacaaaaaaaaaaaacccgagatgctttgaatacgtgtgcattactgaagaattaagtatactactggaattaggctaaaatctaagtatatagtagtaaaacatataccaattatataccgtatgaagtaaatgcacacagatgacagatggttggtgagaccaattactagttgacagattcacttcagtacccatacatatactttcgctatagaagaaccctaaatctctattcactctaaacttgttcaaaactctgactaacattcttcttcactgatctcccatctttctcgcttcgataataataaacatggatctcaccgacgtaatcatatgcttgttcgctctctatttcatcaacctatggtggcgccggtacttttccgccggaagcagccagtgtagcttgaacattcaccggggccaaaaggatggccactagtcgggaccgtctccaagccatat

SEQ ID NO: 23256 - DNA, 1484 bp, Arabidopsis thaliana landsberg
agctacgttcaccggagtcatgatttgttctcattgtttttgggttaggaaaggaaacctaaccttatgttgatctcttttcatgatagtctgtgtagttccttgaggattaatgatttactattcaatctatttggatttttagtgaagaagaggaagaaagatatcagttcaggtagacctattcgtgagcattttcctgtccaatatgaaggaaccagatcacgaatttaatgttgttggatagatctcacagtgatgaatacacagaaacaaacgaatcttcgttacgtcgttacgaggtaaactccacccgcaaattctagttgaaagttggacaaaagtcacagtttcttaacccaaaataacaaagtatcagattttagattcaagttggcattttcgggaacagattccggttaactctaattacttaatgacaagtcgacggtggataccgatagagaaagtgttaggaaagccacaggacccttcatcgtcacaaggaaaggtataccctacctgccacgttgattgcttattgaggaagaatcacctcttttgtcaaaactgtagaaaccctaatttgtctttgtgctgttttcttgtgctgcaagtttcagatattgtcaaggagtttcaacctctttatatcatcccaaattcaggtgatgttgtgatctatggagattcgaatacatgtttctatttttatgcttcatgattcattgcacatgaatagatttgtgtgcttagtaataatgaattgttatttaagattgatgatatgatgattgctctactattataggatgattgaattattgtacttgtgataacaagtaattatatgtgttatatgcgaaagtgcaattttaagatgatgaaaagtggaacagtggaaatggtctacattgaattgacggattcttagtagctcaataaaagactaacgagtccagtcgaattagataggttcaaaggtcagggagatgatcgaacctgaaaatgatgtggagatcatgcttaagcaagaatgagttgtgtgttatagttttgcatagagatgcagactataagagtgttgtgtctattttctatgtgattgttgattgtggtttaaaggtagaatcgtgtatcgtatttccagtgggcggaaaggatcctctcactgagtaattctttactcacccctttttcctctttttttcctaggtcacggtgagaatcgtgtgtagtcgctcaagtccgtctcgcttatggtgtattttggtaacatcatatttattttctactattgttattttcttatacgttttactaaagatttttcagtgatttaagatggtttttaagacaagtttatatttgaattaagaaagcggaagaaaggaaaaatttaaataaggtaaaaagcacgtcgtctcaatgttaagggagacgtgtgtgacaattatcattacaagcttttcatataaaccaaa

SEQ ID NO: 23257 - DNA, 1184 bp, Arabidopsis thaliana landsberg
tttaactcacagtacaccatatgacgatttattttttataagtagtgtattttaaaatttaatcctcttattattaaaagggaagtacaaattgaaaatttgtctaatttggtcttaattttgatttcaattttggattttgttttttgctattcaaaatcattaagggtaatttggtcttaacaatctcctaaactttatatgatctgattcaatctaaaccgttcaataaaattaatttccttcaatttaaaccgttcaacaaaaataaggaatctatgttgttattatttatatttagttatgaatttaataattaaggactaagactttatattattatttagttatgtatgattaaaaaattatatttataagtttatgatattaaatttattcaaatatttagtataagaaccaaataaaccgactgtccgcggtaaaccgcgggttaaatcctagtgattattgattatgtattatatataacattttacaaattgcaccaatttttgaagatccaattgtaccaattctataattttacaaattagtgaattttctaagcctttaagataactgggcctaagagtctttaaaaaagcccagaaaatgtcatcgtccaggaatggggataaggggttttagattcttttaatttttgtttccgagtttttcagccatgtttgctcagttagcaccatcgccgtctccttctccggcgaacgttagccacttggttcaccgtcgcaccttccgtcaatgtacatacgccgtctccgcttctcttcccactgcaaattcctctcgtccaccaccgattcaggcaaacattgtcattctaattctactacttcgtggtcttcttcgttatctgaaatgaaattgagaaactcggaaacttgttttgcagattgttggaggaaaggatttgaatttggatgttacacggaaagatgattcaattgggttcaaattagaggcaaatgaagatgaaattgattggatgaatctagaatctgatattcgtctatggactagagcattacgtcctgttcaggtaaatcaattacgagattatgttgtaaagttttggtttttctgaatatgaatttgttggattgttgtttactgtgtgtgtgtacgtgggttcttggtttcatagtggtatccagggcgcataa

SEQ ID NO: 23258 - DNA, 544 bp, Arabidopsis thaliana landsberg
  unsure (1)..(544): unsure at all n locations
gtttagggattattgtagatgtttaatccgggtatgtgaatttaggtttgatttgtgctttagtgatgccatcgcttgtctgcagtttttaacttgatctgtgatctgttttctttgccctgtgttcactctgttccaaccattcttaacgtaatttttgaaatgcggtacgttgatcagcctttcatcaaaccgaaaaggtctcatctttgttgtttttgatttttctagagacagaagcaatggtttgcggtcagatccagtgaaatcaaggaattcgagttcagcagatggaaaggaagtcgctccttcagaatttatgaaagctctgtccaaataacatttgactgtgtgagaatgacgctctccaacccaagtgaaacgatctccttttgagcgaatatcaacaagatcgcaagaagctatcatgtttcgaaaatccctaaaagtccactcatctctttgtggccctcctatctttncacagnttgaaaatatctcattgaaatcactgatcanaatccaagaatcattgcatgtaagt

SEQ ID NO: 23259 - DNA, 540 bp, Arabidopsis thaliana landsberg
aatatttctgttttctatctaaatatagttaaccatcagatcatatccaatcgtttgattaaaatagatctatttgtaaaattagttcgatttacatgcttcaacattgaaagatacctctatcagttatatgttgaaaatttaattattgtgagcaaattattttcatatcagctgagatttaaaaaatggaattagaacctatcatccatgtaaacaaacatctttttcccatattcctttataaaacttatgcaattgccaaatttctgctaaaaaaatcgtaatgtaaaagtgcatgtaaggttagaagtttgttggttttgaataaaaaatatggacatttagtgaattggataatatagaatagagaatatcgactaatacatgtgatttcattttatatagcttagtttttaataataaaaaaacctttaaaaatttggtaatcaaatggatgtctctgaatatttacctgtagatagggaatgaatatttatatgtctatccacacaccctagaccgatcaggtatacaaat

SEQ ID NO: 23260 - DNA, 394 bp, Arabidopsis thaliana landsberg
atgcaatttccatgaataattatacgtttaaagaccctacgctaattggtcgagaatacatgggtgagaaatttaacctattatttaacatgaataaaaattatcggcataaaaaaaaaacttgatgagtaatttgaggagttaataatccaaccaactttaagttactatgatcgacatttccaaagagtaccagcgcaaaccgatggaggattagaatggagaaatatttgccatcgactacaataagatgctgctgcttgttttcggttattatgaattgtcttcagttattactaatgtcactcgtagcatttcacaacattgtgcggtctactacaaacaaattacggtctacaacgaagttcaaagagaaaagtgtggctatgttttt

SEQ ID NO: 23261 - DNA, 2654 bp, Arabidopsis thaliana landsberg
aatcgagtgattcattgttgtgatatgaaacaaattatttttatggcacctctaaaatgattttggataaagatcactggataccaaaaatcattgcaatgtgatgagtaattcattaatctcgaagtcgaaactaactttaacgttgtgatgtgaaaacaaatttaatttggcctttctaacgatcaaaagactggataccgagtaatgtttgttttgtcacattcttttgcataggactcggcataaaactcgaaatccaaaaaccgaaccaaatagttataaaacccgaagataatgaatatataccatgcacagctgaatcttatagtaaaatatatacatttgattagtttattatgagtttttagttttttactatgtttcaaaagaacatagtggttgtgtttggtttaatgatactttcagaaaaatcttaatttattatctaaaaagtaattaacaatttagggcatgattggttctccttctgtcacccgcaaacgcagcgtttgcaggtggtagcggttattagcggttggcaccaatcatagaaaccgctagatatcgctttgtaccgctcgaaatcgccagatttcaaaagctccttcccgcaagcgtttgcggttgcgggcggtagcggttagattaaaaataataataattaattaattaaaataattatgtctttcacccaaaccctatacttattcttatcagaaaaccctaatcaatgaaaccctattctctcaattatggcatccacccaaactgacaaaaatcaaagtcaaaatcaagaatcaaacgtaagtatgatctatcctttcatccattcattagctagtgtaattctcggaatatttcatggcatcgttgttttttttttattttgtttttttttgagttttttgattgaatacatgttttgatttgttttctcgattagaaaatcatttggtcaaacgagaccacatttgcgttacttcaacgggttattgtggagaaataaacggaagaatccaaagaccccaaaatcagatttctaagtgatgttcaaaaagaaaatattcttaagaatattaacgtttggaaaaaatttgagttggagatgtgttaaaaatcgtttggatatcttgaagaaactttatcatatgtgtagaggcaatccggaaaacccgcgagttcaacgttatttacagtttatcacactacttgatgcaattttggtgatgtaccaaatgcataaagtattaagctttttcttataaaatttatttatttttgaattttcagttttatttatggttttaattattaaaaatgttcaatttttctaatattatcaatttatcataataatatattgtatttatatttcttttaatagtaatatattatatttattttgattacttattttttatttaattactatcacacccgcatgtttaccggtcataaaactctcgcaaacgtacacattatcaaacgctcgaccagtcgttcaaaacatttgatcacccttgaaaccgcaaccgcccgtttccgcaaacttccgcagtcgcaaccgcactagctgcgtttaaaccagtcaggcccttagaaggaagaatattgtatgtttgcattcagtcactaattaatttatttcatattttccgagctgaaattgataatcagtttaatatgcaaaaaatattcatttgtataactgtttctcaaataaatgttttattaatagcaattagtttagcaaatataacataaattacttttaaaatacataactaaaataaataaattatttgatatcaactacatacaagtacaactaatgaaaaccacaaatcaaaccacttgcatgcatctgcctgcgtaacgtggcagaaattgttttataaaataattttatttcaatataagtatatgattaaaaaaatactaaaaagcttttaagatttgatatcttacatttgctcagatttttttttatgttatttgtgcatgtatatactaatgaacatatgatatattacttttacagaataaatgtatgataaagtaaattacaaaataaattattgatatatgaactcattcataatacttcaaatttattttattttgaaagtgacaaactaaatttcttttcttataaaatcatatgaatttcaatataaagtttatattaaagccccaagaacaaattctattttttgtttattgtttttatttcactcatcaatttaaattctagtgctagattcttactaatgttttcatctttacaagatttataaaaaaaaaaattgattcattatagtttttgttttctatgtttcactctatttaagtatgagttctagggtttattctagtgatttattctaactaactttaagtttcatgaaacactaatgatctttatagaattgtctattagatcacgaaaactaaatatatgatacatataataaaagtgaattacaaaatttatttgggataagaaagaggtaagacaaatttatttgataaatgtattataataaattattttgctaagaattgcataagttaaaaacaagtacataaatatgattgaaaataataaaatatccaaagtagataatagagaatagaagttgatattttca

SEQ ID NO: 23262 - DNA, 653 bp, Arabidopsis thaliana landsberg
ttttttttgtcttgaggcatatagtaactgcaaaagaaactcccataaggcgtagtgagaattcttcaacagagctgctatggctgaaattactttctctttgtgaatatttctggttacagatgctgcggttgattgcaacagcattgaaagatgtcggtccatattctatgttttatcttgctgctgctgtatctgacttttatgtgccatggaagagcatggtaagagtctcatgtcctatataaccatggctacacattatcttctgtctgaaagatgttttttgtatatatttggtgaaaccagacagagcacaaaatagaatcaggatctggtcctttagacataagactagctcaagtccctaaaatgctatcagtcttgagatcaaattgggctccaaaggccttctgcatatcattcaaggtcaatctctctctctattctctattctttcttgtattgattctccgaaatccgatgatgtatatgcaaattcttgattcagcttgagacagactcaaagattctgatggagaaggctacaaaggctctaagaaaatacaaagtgcacgcagttgtagccaatgagctatcaacccgtaaggaagaagttgtggttgtttcaagcagcggtaatgttgtggtta

SEQ ID NO: 23263 - DNA, 586 bp, Arabidopsis thaliana landsberg
atctaacataagcatattattatatgtctattgaatccaaatactttatcatcattatctacttaacatatcaacaatcattagcaaatttgttttctatttttttttgtattggctacagaatcggttagcaaatacttatatattgactaaaggatttgaacggttatattatatggaaacctttagattcactgaatcatttcaactttcatctccattcaatatatatataagacaaagattaggttaacttcagtcaatctatcctctctctaaaatttgtatcaaatcattcaaactttcattggctgacacaaactatatccgtgacttaagtttacacaagaacaatcatgtcctatacgtgaaaatcttaagcatctgggacaataagtctatgatctttggaactcctactaccatgatcctctgtgatgtgcaggtttgtgcgtaaacaatctttttggtttcctattttggttcttggtttttattatagttcaaagaattttatatgtttgtctttttattagggaaccagaattgacgctagagtaccttggggggattatatgaacaatta

SEQ ID NO: 23264 - DNA, 635 bp, Arabidopsis thaliana landsberg
  unsure (1)..(635): unsure at all n locations
ttgcccatcatcagtttgtcgtcagcttgcacttctgataggtgttgaacatgtctatattgatgcagatgtgggtggttgctccactgtcgtaccaccactccattgggttttcatcagtcgtcaccacatttgcttcagtgaccaccgcatagaggtcatcttcagtcaaattcgcttggttagctgaccttttcnnnnnnnnnnnnnnnnnnnnnnnctcgccttatgaccttgcttgccacagtaggtgcacttcccagaattttttttaatatcaccttgcttcttaaagctagtggagggtttagatgacattatctttggaccacccttgttaggtttttcacccttgttgttataaacaactttggctttaccctttatcttgtactcagccacatttgcatcatgagctacgaaacaagatttgtctctctcggaagactcattctgcagcctagcgatcaagttctgtaagctcaaaggcttttgcttgaattcaaggtagtttttgaaacactccaacttggaggtacttctcgataatggaattcacgtgaaggttcacagatcttcattcctcatcagctatgcttagactacaattgcactcattgacttgatcatgatgg

SEQ ID NO: 23265 - DNA, 991 bp, Arabidopsis thaliana landsberg
gaagaaggtgctgcttcacgtccatttgaaagagcttagacgaatggtgagcaacataggctaataaaatgcgaatagattctagcctagctacaggagcagaagtctcatcaaaatccaaatctgcgacttgggcataactttttgccacaagtctagctttatttcttatcaccacccccatactcgtctttcttgttgcggaacacccacttggttcccacaacatttttctttggacgtggcactaggctctatacttcatttctcttgaagttgttgagctcttcctgcatggccatcacctaattcagatcctgcaaggcttattctaccttgaaagtctcaatagaagaaacaaaggagtagtgctcacaaaaaatagcaatatgagaacgagtagttactcccttgctgatgtcacctaagatttggtccactggatgatctctttgaatggtggcccagacttgagttggaggtgcctgtggtgcttcttcctcttaatccttttcttcatgtgctcccccttgattcatgacttcatcttgaggcacttgttcctcatattgagttggggtccactagtgttgaggaagatggttgatcttgatcttgttgttcctgcggtcgcacatcacatattgccatagttctcattctggccattggaacttcatcctcatcaacatcatcaagatcaacttgctatcttggagagccattagtctcatcaaatacaacgtcactagcgacttcaactaaacccgatgatttgttgaataccctatatgcctttgtatttgaatcataacctagtaaaaacccttctatagctttgggggcaaattttgaatgtctacctttctttaccaagatgtagcatttgctcccaaatacacgaaagtacgaaacattgggtttgttatcggttagaagctcataagacattttcttgaggaggcgatgaagatagagacggtttatggca

SEQ ID NO: 23266 - DNA, 872 bp, Arabidopsis thaliana landsberg
gttgggactgcagatatcctcttaatatcagtacgaattaaagacacctgtctcacaatctcccaactgatgtcatttggtatcagacgtacatgagcaccagatttcacacaaattgtttcttgctgattttcgaagtcagaatttatccaaagagccatctcgcgtatcacatcatgcattttaacttcgctcgtgcgttcacattcaatcaacaaatgtgcatgaactaacaagccaattatatcataaccttggttgtcagctccatcttcatatctgttcggatttataaatccttcgcatatccaatattctatcaacttatccttctctatttcaaaatcttccggaaccaaagaacaatataggaagcataatttgactttttcatcctttaaactatcataactgaacttcaaaatggaaagaatcttttcttccataccgggaaactcgtggctagatgagttaagaacatgaatcgcatgacgccattcttgtacagtctctttacatgccatggcttttccaatgacacatagcgcaagtggcaagccacagcatttttcagcaatttttcttgcaactgggagaaaatcatgatggctctttatagggttttctccaactttttgctgaaacaattcccaggcttcatccggtgataaacaaacaacttccatcatatcatcaacctccatgtctttgcaaacttccttagaacgagtcgtgagaactaattttggatccattttcttgggttggaggtggaactccgatcttgttcaaatctacttcgctccacaaatcatccaataaaagtagaaacttctttctgttaaggatattctttatgcgagagactctct

SEQ ID NO: 23267 - DNA, 503 bp, Arabidopsis thaliana landsberg
gatacctcccctaagcctcagaacaagatgcaaagctttctttgttttatagaaaacaaaacagaattgggtcaacaaaacaatcatagctatactagtttcattttctaaagaatccaaagcattcaaattcgagaaagagacctttctggatgttgtagtcagccaaggtacgaccatcttcaagctgttttccggcgaagatcaacctctgctggtccggaggaattcctgaaacagagcaaaaacgaatcactaagagatcacaatttcaaagatacaatttttaaaaagcattagaaaatataccttctttgtcctggatcttggccttgacattgtcgatggtgtcactgctctcgacctcgagggtgatggtcttgccggttagcgttttcacgaaaatctgcatctttgcgttcgtcttcttcgccggaagtctcgaaacggcgtttgcagtgtaaaaaatgaagctttatactttatccatttcttagggtttt

SEQ ID NO: 23268 - DNA, 422 bp, Arabidopsis thaliana landsberg
gacgtttgtccatctgaatcagaaggaaacaacgaaaaagaagaagatgaaccagagcgtctcgacgaagatgacggagacgaggattccgacggagattcgaggtatctatcgactccatagacggaagaagcgacatggagattctcatggtagatcggcgggaacacaacgccatcgtccttggcgaaaattggcgattctctgatgacaaccattgacgaactgtgatccaatggacgaatcaggtgttggtcacaataatgatcttcatcttcaggcaacttcagttggaatttgctggaaggaattatctcgctagggtttgcttgtgagaaagaaacagttgaagaaggaagaagaaggccaaatccatgaaagtttcaaactttttgggatccaagaagacgacgtgattgttg

SEQ ID NO: 23269 - DNA, 481 bp, Arabidopsis thaliana landsberg
tctctctattatctgttagattctgttgctgatgctcaaatctatggttccagatttctttcctagggtatctatctctagtgttgcctcgctttgagttttctttattgtgtctacttccctttttaggtctagtatggttttgttcatttccatcacctgtttgtatgttttttcctctttttctgtaaggacttctacctgtttgattgtgttttcctgtttttctttaaggacttgtaactctttagcagtgttctcctgtatttctttaagtgatttattaaagtccttcttgatgtcctctaccatcatcatgagatatgcttttaaatctaggtctaggttctcaggtgtgttggggttccctggactgggcgaagtgggtgtgctgggttctggtgttggtgagtggtcttggttcctgttagtaagattcctccgtttacctttcgccatctggtaatctctggagttagta

SEQ ID NO: 23270 - DNA, 464 bp, Arabidopsis thaliana landsberg
gacgcaacgcaacttcgagaagatcaaggatgagattgttcatacttttaaatcatctccatctgcttctatcttgaaggttctctatcatgtccctttttgttgataaatatattatgagacgttttctaatggtatttttatttatgttgcagtctctagtgtcttgcgttttcgatatggcaatgttggaaaactcctgtgtattattcgctcgtttatgcgttgagctttttcaggagcttcctccacttccatcagatgaatatcacggcgatattactacttttgagagactgttcttgcgcaaatgcagaattgagcttgaaaacgcatcccctaaaacagaacatttaccacttgtttatgttgatgaaacaaactattacggattcatcaaaaccgtaagggttttagctgaagtttataagaataacaagatcactgaaacaacccggaaaagt

SEQ ID NO: 23271 - DNA, 733 bp, Arabidopsis thaliana landsberg
tggacgaagtaataaacgtgtcgacaatggaggatattggagcgcaactgtagctgcccaaaagatcaacgctggatatggcatagtcggctacaagacttcactagagtactatgttgggaaacaatcaaatagtgtcaaaggggattggttaatgcaagagtactggtttgagtcttctgatgataacaacaacgagaaggtgagggtaagtgtctttacttggattccaagttattaggattcgtgacttttggatttattgtgttttgttttggttggtgtgtataggtggatcatgctttgtgcaagatttatctgactccagcggcagcaaagaagaagaaagctgaggaagcagagaatgagaagctgaagaaagaagaagacgttgagcagctggatttgaatcaaccagaccaattgcagctgcaacagcctcatgatattgtgtatcaaccgcagtattgtttacttccagaacatcatcagccgcagccttttcctgataacttttctgagttgatcagctttcaacagcaaccagtgatgatcccagacgattttgaagatttcttggctgaattcactaaaccacattcactggatggagatgaagaattcaacaattatggtttgtttgaaggcttctttgacacagaaggaatgataaaacattaaactaactgatctcaatctgctcatactttgtcattttggtttttgtttcaaa

SEQ ID NO: 23272 - DNA, 427 bp, Arabidopsis thaliana landsberg
aactatggttcgtttggatcaaaccagcagcaattctattccaacaatcagtcaatgcaaacaatcttagctgttaaacagttccagcaacttcagattcattcacagaagcagcaacaacaacaacaacaacaacaacagcaacaccaacagcagcagcagcaacagcaacagtatcagtttcaacagcaacagatgcaacagcttatgcagcagcggcttcaacagcaagaacaacaaaatggagtaagactcaagccttcacaagcccagaaagagaactgaggaatatgaatatgtcccacgtaagtgagaggttctccttctgaacaattcctttctcattcataaattgttgttcatccatcacttgcagtctcttggattttagggttttagctaacacagcttaacgggtgcccttggc

SEQ ID NO: 23273 - DNA, 635 bp, Arabidopsis thaliana landsberg
tggatagatcgaccacaaaatcttctcgactatcgagagtgagcttggcagtttgagcggtgttagcaaggagtgccatggcatcgctctgaagggcctgaaggcggtacagcgcactcatgcactgaacagtgaccctcccaaccaagtcaggatacatcgcccacacatccttcacatggctcacgcggttacaccacatgggatcatccttcttctcagcagggaagagtcccaaggggtgcatcaccatctccagaggatggtagccacagaaagtcgtcagagtcttcatggctgctgcttcaacagtgtcgtccgtcctgagtccaatcgtctcagaatcaagagaacgccaacccggctgaaggggatgagcctccaaagtcagccagacccgacaacgaggtacccgatgctcctcatacaactgcaccgtgtacaaagggggcgtagggtaaccggcggagttaagcacttccacaagatggaaggaaaccatcgcgagaaaggaagtcagaactgaaacgagtgtctctccactggcgggggtgggtgaatcatctgcggaagggaacaaaggtaaagattatggtggaaggaaaagaaaagagagccggatgttttaagaagtg

SEQ ID NO: 23274 - DNA, 582 bp, Arabidopsis thaliana landsberg
cagacggggaccatacagaactttctccctatcatcacactgagcggtatgcaactcccgctccacagtgcgcagcaatcttcagcatccatggggtcagaagagtgagcgaacgttggtggatgacctctcatgaattcagcacgcttgtctctgggcatctgaggcatctgaggctgaggtggggcctgctgctgctgctgctgctgaatggcggccaaagtctgaccgatggcttgaactgcctgagtctgcatcagaaacatctgctcgatcgacattgggggcgggggcggcaggtgctgctgctggggcacctcctcctgttgagcggctcgcatcctgctgagcacgccttcctcctctgcgcctgttctctgacatctgcagaatgaaccacacatcagaactgatctggcagatcttgcagcataagaaaagagaatagaattcttcaacagcactgaacagatgagcatcttcactgatctccaacacagaccacacagcttctcagatagaaaggaaagtggaataaaaggggtttctaactatataactactcttattacataataggta

SEQ ID NO: 23275 - DNA, 1009 bp, Arabidopsis thaliana landsberg
ttaaatcctattcaatcattcaacgagtcatgtaactgagatcagggagatcgggcagattctcaaattgatggtttgaaaaaattctccttcaagtcagatcaaagcagatgtggaaaatttaacaagctgaatctcaatctctctttctcataaaagcggatgatttgttgaagatggaagaaggaaaaaggaagaaatctattttttggcttgatttttgtttatttctcgataaagtaaaagaaaaagagagaaaggataagagagaaggagagagaaaggatagtagaagcagagagataaagcaatatgtggttagagggtaaatgggtcaaattatccattcaaagtgcgttctctttagaaagtgcctaaccacggaaatgttttttaaaaagtgctttagagtgtaatattctcattaattaaataatagagtttgttaaaaccatttgtgacaatcctccaaataaaaatgagagcaaacactattttaatattaaattgaatcaaaaacttttttaaatagtgaaaatatataccctaaattggaaatagagaactcaaatataataccacaaactaattttaaaataaaaaatcacttttaaatggtgaaaatatataccctaaattggaaatagggaacccaaatatagtaccataaactaatattaaaataaatcaaaatttcttttaaatgtttgaaatatataccctaaattggaaatagagaacccaaatataatattttaaatttatttctaatttattttggttgaataatttttatataaaattatggtattattgaaaaaataaattagtgataatacttttagaacaaaaaacttcatattaaatcaagtagtgctaattttggaagtttatagagtgtgtgctattattatccgtaaaacttgttttagtgctatttttaggaatttctctaataatttctttttaccaatatatatttcaacatatttgtatttttaaaaagctg

SEQ ID NO: 23276 - DNA, 1081 bp, Arabidopsis thaliana landsberg
ttcccctcaaggacagtattaagggatggcgtctagagtggttcatagttgataattatggaaattctctcccctcccggtcgggaagacagccagacgttcgcactccgagctggaccgagtctcccacagatcaggaagtggctgaggcaggtgtgttgctaactgaagtaggactgctgaaagagagaggtctaactgctgaagctgtggtcgctgactttgttttcaagaacattcagccactgaaagatagggcctatccagcatatctgtatcgagggctggccgactcaactcgggttaccaataggagaatcccttctgtagacttggtaagccgacttgaaatgatcctcaggggtaaggtgtcaaatgttggtgctccagcggcatactcggcctagaacctgcctcctcccaaagccttcaccctttttgtgtcaaatccgcctgtgactgatggcaatttgggccttagagtgtgacctctgctgaagaggtccgttccttagttgcttcgctcggggagatacctgatgatgaacggcagatttattttgaagtgcccctgaaccctagtgatgcagacataaatgacatgctcgatctgctagctgaggattcatctgatggtgctcctgatggtacactggcagtggtgccccttccagaggttggtgcgaccttggatgtcccgaaacctgtcagtactcgcccgaggcgccctagccgaaccagtcagcccgagccttctgctgatgagcagaagaagaagagaagacgcctccggcgagtatccagctttgacgaggatgccagtaccttagctcctgctgccgaagaaatgactgcaactggccttgctgacattgatcccaatgggtgtgctccgcctgctgctgaccccaatgaggatgctgtttgtgctgttactgtggaagatgaggaggaagaaaatgaaactccattaactcggaaaaacagtcggcagttcgtcgctagcggtggaagtagtggagtccttctcctgccttgtctgccttattggtctcaagaactgtcatggccaattttgata

SEQ ID NO: 23277 - DNA, 960 bp, Arabidopsis thaliana landsberg
atttttcatgaacttgatcaagtctacttaacagaaactccatcaaactacacaatggaaattaataaatcagatttgggttggttaagtgttttgtccctgataataaaatactgtttatgccctgatttctatgaatacgtttgtttcaaatttaaacctcagtatttgtcttctctcatccttagtcattaccttccattttttttttttaacttgcaatagacattactacatgattaacaaaaaaaacaaaagagaaaaagacattgctatatcaagaggtgggcctgaatattctaaggctacaatttaaaactatgagatcatcatcattgatagttttttaggttagttcttagataaagtaggtcttaaatttaatgttataattcaattaatttttaagaattgctcttatataagagccaaatctaatatttcttaggttaattcttagataaattaggtattaattataatattttaattcaattaatcttaattgttagataaactaagtattaaatctaattgtttgtcatatttgcttaaaattttatgtcatatatgtttcaagttttatgagttataatagttattaagtttttagaaattataatgtttcaaaaaaaaaattcaaatttttttctttttaagaactccaagttaagagtccaccattgcatattgccaaaatttcaatctcttaaccaaattcttaacttcaaaattttcaaaatcaattataaaaatattcataacaactatgtgaaaattatgctaagaaactaccattaatgatgctactactattcaaaaactatgactatgactacaatttataaaaatatgactacactttaaaaactctgactatgactacaattctaaggcaacaatttataactattgctacaatttaaaactatgactatgactacaatttaaaactatgac

SEQ ID NO: 23278 - DNA, 477 bp, Arabidopsis thaliana landsberg
gaacgtgttgagaaaagacggcccggcattctgtttatctggttaacgatttgactgacgttttggcccatgatcgcggacaaacgagccatgcttctgttgtgcatttatctcttgcagaaaagcccacgagataacaactttgctaccgggtgggcgaaagagaaggagacagcacctgacaagaagctgttggttataaaagatagacgtaacctgttggtgggggacacatagagcaactgctaaacgaagcacgggcataccactgtagccttagacacagcgaatgagatgaggcagatgcactttgcacacagagagaggtctatgacaactcactggtgtgattgctcgcaagtaaactctctagtgcaagcacatcatcagggcgtgtactatcacataagtgactactgatacaacgttgttatccacaatcaagatcgtcataacaaggccatatgtaaggacaca

SEQ ID NO: 23279 - DNA, 607 bp, Arabidopsis thaliana landsberg
  unsure (1)..(607): unsure at all n locations
aaacagcaatgacaacacataggttaacaaacaaacaaatactaaatttaaaataattttataatcttaacaagaagcaaacaagtactaaatttaaaataaacatcataaaaactaatacataaaattagtaattttatagtccgataaattatttgtagatccaccaagatagataaaacattgtctaaatgaagtagatggaggaggagttcttgagcttgatcttgtgggtggacacgtcgcttttgtaaatccttgcttgtttactctcaaaatatgcccgaacatttgnnnnnnnnnnnnnnnnnnnnnnnnnnnnnnnnnnnnnnnnnnnnagagtttcttggtagatttttttaaaaaaagataaagaagcttatttctcactatgaaatgcttcaattgatcatatgtgggaaaatattctaatggtgggatttaaaataaaatttggaatggtttataatcggtatatgatgtaaaatttttttaataaaaaatgagggtgtaatttaaataaattcatattttatgggaaattttcaaatcctataatatatggggtcaaactggggattatatattttaaagatatttggttaaa

SEQ ID NO: 23280 - DNA, 1670 bp, Arabidopsis thaliana landsberg
gaaacgttggaacaaaatatagttagtatatattgtacctgatagtgcaaggtggacattccggtcatgcagttcagcaaagataaatggaagtagtcgctccataaatacatgacaatcatgacttttcatgcctgaaaactttccattatccagatctacacaactagccaaatctgaagaataaccatctggaaatctaatatcatatttcacacattgtaataaactctgtttggcttcttctgtcaatgtatacgctggaaatggagctttgccactactatcaatatgtaagcctgggcgtgaacaaaatttctcaatatccaatcttgacatgatattatcttttgatttacccttaactcatgagagtgttcatgatgttgtcaagaaaattcttctctgtatgcatcacatcaatattatgtcgaagattgaggtctttccagtaagacaactcccacaagatgctttccttgtgccaattatgttccttcccatagcctcgcatcttcttttcatgaccgttcccaccaacatccttcgtttttggtggatttacactagccaacctctcgtaataaacttgctcccctgtcaaagactcaggtggatattcgctagaagcatctcttcctttcagaaagtcttttttgttcctacgggatggatgaccatgaggaagaaatctacggtgacaatcaaaccagcatgtcttccgtccattgggtagataaaaagactttgtactttccatacaaattggacaagtcaatttaccatgagtaatccatcctgataacatgctatacgccggaaaatcgcttatcgtccgcagtagcactgttattagattaaaattctgactcaatgatacatcgtacgcatcgactccagtagaccacaactcttttagctcctcaataagaggttggaggaagacatcaagactagctcgaggatgatttggctcaacattcacaattgtaagaaataagtactttgtattcatgcacatactagggggtaaattatatggattcaggatcacaggccacaacgaatgattacgagacatgccaaatggattgaacccatcagtacacaacccgagataaacgttacggggttcttcggcaaaccagggatgtaactcttggaaatatctccactccactgcatctaaaggattattcatttctccctcctttgattggtgctcaacatgccatcgcattaccgcagctgtcttatggctctgatacattctcttcaaccggtctccaataggtagataccacatacgactatatggtactttggttcttcgacggtcgtccttaggcttccatctttgtgcgccacaaaatcgacattgatcttctttttcgtcttctttccaaaatagcatacaattgttctgacaaacatcaatcgtatgatatggaagtcctaaattacgcatcaacttctcgatctggtaatgtgaagttgtagcctggtttccttctggtaaaaaatctgtaaacatttcgcaaatggagtccaccaacttttcactcatattatactatgccttgttgtgcatgagtcgagatgctaaggataactgcgactgctcttcacgacaatcatcgtacgatggattatttgcaccttctaacaag

SEQ ID NO: 23281 - DNA, 668 bp, Arabidopsis thaliana landsberg
ccttaacgtagcgcatacagctctgactttacttgccccaatgctacaaaaaaaagaaatgcaacatttgtcagtataactaacgatcataaaatctaattatttctggttaaagtagattctgtcattgaatcctgaatgagaatggaagtaattttaatgtacttttgcgttacattcttttatcttataaacatttaagtattcgcatttctttaagtaaaattatttcttgaaggcgtaattagaatagtcaaaaactaaggggggaaattacctcgtgctgcttcccttaaactgatgcatgtaactatccagccgattgaaatcaaatgatcctctttccctgcattgtaaaaatgattagaaaactgaaaaatatatatatatatatatatatatatatatatatatatatatatatatatatatataatagaaaacaaaataatactcacaaagcttggtcaatgttattgattaaccgagctgaatctttgaagtataatgcggaaacttcttcaacaaaattagggtttgcatcatcttggagctcttctaactccatgaattgttcgtcgagatatccctgcatgcattttcctatattagtcattttctaaattatatgaagaaattcatatataattggtacgacgtacgaagtg

SEQ ID NO: 23282 - DNA, 625 bp, Arabidopsis thaliana landsberg
ggagaacgagaagaggaagacgttcaacttctatgataacccataaattagccttaataaacaaattatcatgataaataaataattgaatgggtaagttaacgataataaataaattattaaaataaataaccatattaatatatatatatatacgttagtagataatgttcatataacaaatatttttaaaagatcaatataagtttatcatgtaacttgtaaagttatcgtgatacaatattatttgtattgctaattcaataaataatcaccaaaatcactatcttttaattacctctcgtgatgaacagtggttttacttattaatttatcatgatacaatttgatttagatagttaaggaaatagataatcataaaattcattgtttttatcgctttagatgatgaatagtatttccgacgacaaatgaagaatgttatatttctatagttaaaacgaaactatttatcttattattattttttgttagcgctcacacataaaaaggtaactttggtattaattaagttagagagaagaaaactaataaaaaataacatacatagatttttaatttttcatttctctatgcatattaattaatatgaagctatgttata

SEQ ID NO: 23283 - DNA, 512 bp, Arabidopsis thaliana landsberg
taagcacttgatttagaaatattgcatgcacatacaaaatttaattgaagaactatcaaatgattatttttttcattatcagtttcatgaaacatacgttacatttgaatttctcgaacgctttataaagttagtttttgaaagaaaacttgtgtttagagtatcattattgatagtattcttaggtttagtcttagttttagtttttagggattttttataattaaatttgaaaattttgaaatgaaagttaagaacatctcattttgtctcttatataagagactctcttaatatattacaaatatataattaaaaacattaaatttataactaaaatttcctaagaatcaacctaaacaactaccaataatggtgttcttagtaacttgttgaaaagttgggaccaatctggaaaatgcagctttttaaagcttgaaataaaacatcgggctacatataaaaagaatgcgactacataatgacatgttgaaaagtgaaaagaatgattt

SEQ ID NO: 23284 - DNA, 510 bp, Arabidopsis thaliana landsberg
  unsure (1)..(510): unsure at all n locations
atgcccattcttaaccattcatgcccattcctgccctttgatgttttgtcaccgtttgggcacacgcggtcaatcggcattgcaatcgggcaaaacgtttttcattcaatcctttggtcgtgcccgatgtccttatgcgggtcactacatggtcctttccagtttacccctagctttccagcgtttggctcgtcagtattttgaaatactttgcagagaaaccgatctccttcatggaatttctgttgctggacattcgaattgtagtaccgagccgtttcattctggtaattctgtatttgcnnnnnnnnnnnnnnnnnnnnnnnnnnnnnnnnnnnnnnnnnnnnnnnnnnnnnnnnnnntttgtatggctcatgttggggggatatagatccgatgcagacttggcacttccatctcggctggaatgatacattccgtgccatagactagtgcgaatggagtgtctcatgtggctcgacgaggtgttgtttggtgcgaccacactac

SEQ ID NO: 23285 - DNA, 899 bp, Arabidopsis thaliana landsberg
tggcgataatctcagacagacataagtcaatcagggaaagcaattggtgaagtgtatccgttggctgctcgtgggatttgtacttaccatctctataagaacattttggtaaaattcaaaagaaaagatttgttccctctggtgaaaaaagcggcaaggtgttataggctgaatgattttactaacgcgttcaacgagattgaagagcttgatcctctactacatgcataccttcaaagagcgggtgttgaaatgtgggcgcgtgctcatttccccggtgatagatacaatttaatgactacgaatatagcggaatcaatgaacagagcactgtcacaagccagaaatcttcccatagttcgactgttagaagcgataagacaaatgatgactatatggtttgctgaacagagagatgatgcgagcaaacagcatactcagctcacacgtggtgttgaaaaactcttacaggtaactgagctgtaactagtgcataactcagtcgtcgaataacgataaccccgtcataacgagaataactcagccataacgagaataactcagccataacgagaataactcagccataaagggaataactcagccataacttttttgttttgtttcttgtctcttctctctaatagacccgcgtcaactcgtcaagacttctggatgtacaaacgattgatgcttcccgcgttcaagtaacttatggagcatctttgcatgttgtaaatgtggatgaaaaacaatgcacatgccgtcttttcgacaaagagaaattaccatgcgtccatgcaatcgcagctgcagagcatatgggtgtgtctagtatatccctgtgcagtccttattataagagcagtcattggtcaagggtacgctggtgcagtcat

SEQ ID NO: 23286 - DNA, 1043 bp, Arabidopsis thaliana landsberg
ggataaaagcatttcagacactgatctttggaatttatctcaagggccgaacgaaacactttgggctttcattaccaagttcaagaatgtactttcgaagctcccaaggatctcgcaacaatcggctttatcagccttgcggaaaggattatggcatgatttaagattcaaagaagacttaatacttcgcaaaccggatacaattcaacatgcattattccgagcgaacaattggatggaagtcgaagaacaaaaaagaaagtttcgcgaaaaaaaataagcaagcaaaaccggcagtcactttcccgcccaagaagttcgaacctcgggagaacaaaggatcaaggaagtttggttcacaaccgttcaacaataacgtcaagaaacagtttcagggaaaaggaaagtcaaacacttgggtccgagatgaaagcttgtattgcgatatacacagagtgaccgtgcatctgaccaaggattgcagcgtccttaaaaggcatctcgcagaactatgggcaagcggagatctttccaaattcaacatagatgatttcgtcaaacaataccacgagtcaaaggataattccgaggctcaaaactcgaaaagtccaagattgactaacgaagaggaaccaagaagtttaaaaggaaaaatcaacgtgattcttggaggttctaaactttgtcgtgattcctttagcgcaatcaaaaagcataggaggaattttctactaaaataaagtttgagtgaagaggtagattttcatggcgcttcaatatcatttgacgaaaaggaaacgcaacacctcgaaagacctcaagatgatacactattcattatgttggacgttggtaacttcgaagtatcaagaattctcgtcgatgctggtgctcggttgatctaatctttttaggcactttggaaagaataggaataagcagggcagatgtagtaggacctccatctgctttagtagctttcacaagcgagttagcgatctccctcagaacaatcaagttaccagtcttagcgggaaagatgt

SEQ ID NO: 23287 - DNA, 1313 bp, Arabidopsis thaliana landsberg
aagagacatactccaagagctccacaccgttctatgcttccaccatatactcggagaccatcagggaggcctaaggtagcaagaaaaccatcaacaggggaatataaggttagataaatattttgtaaatctcgtacattgtctaagcttttgaaaaactaaccaaactaatgtaacatgttgtttcacatgttaaacgtagaaacctaagacaggaatgacgcagcagaacaggtgctgacgctacaaaggattggatcataacaagacaagttgttctaatccaatttgagaaattgtgtattcaaatttcagttgttaatataaaatatgtatgatctttaactagttgctatgtttttgtaaaaatatttcagttgttattggttccggaatatataacctggaatttcattttctgctaaaagggccgatgataagttagatgaatgattaattttaggaataagtaaaggaatcatatttgtttgtttagttgcgaactaaaacctgttttgcagtgtgtccacgatttggtacaacaacgatggcagcggaaggtggatggatgtattactgaggaggaaaatctggatcggcggggtttggagaatctctaatgtttgtactgcgcagaacgggttataaagggagaaaggaaatgaaagtttctataaaatatagatattcgagagggataaagcttagtggggagaatgggtgcaattataaaatcagttccataaaactgtttgagaccaggtaacggtcgaggacttgttctctttataattgtgaaaaatagtggagaagtactacttaccttaatatcgtaaggtaacttcacacataataacttcatatataaaatctcattaaaaaaatcatatattcttaagtttgccgcaaatgtgaagaacaaaaagaagaactgaactgaaatgtacttatgaaataagggctacttcttgggagaggtaaaagtaaatacatgtgttacaccactgtccctcatactcattgaggttctgatggtccgaccaacactcaccgtaatcctcaaactcccaggaatttttgtatgtcccttggcgacgtggaccaacctcgttgatatggaacattagcttatctgcgaataagtcgacttcactaaatttgtagtaccttcgcttgtacatactataaaattcccacgggattgatccagcgcaactatggagcatgatgtaaagtagaccagcatgtgggaacacgtctttaataccatccaaaatagcaattgctttctggagcttacacatatgaaaatg

SEQ ID NO: 23288 - DNA, 892 bp, Arabidopsis thaliana landsberg
  unsure (1)..(892): unsure at all n locations
gagaaagggaacgaaaataaatagtgacagctacataaacttgcatacaacaacatatttatatttttgctatcgtaaacaaaacattatatcattatcaattagaagcagtcatgtgaagctgaacaagggaagcataaaccccaccgtctattttgatcaacgtttcgtgagtcccattctcagcgatcacaccgttcttaacgatggcaatgacgtcagcgtttttaatggtcgataaccggtgagccaccacaaccgtggttcggtttacaatcactcggtcaagcgcatcctgaaccagtcgctctgattctgcatcaagagcactcgttgcttcgtccaaaagcaatatcttcggctctttcacgatggcacgtgctatagctacccgctgtttctgtcctcctgataactgaatccctttctctcccaccactgtgtcgtaaccctacaaaattgtattgcttgcatcgtaagaaactttgaaaaacagagttcttacaaatttgttctgtttttattccattacctgttgtatgctagagatgaatttgtgtgcattggcaagttctgcagcggctatgatttcagactcggttgcggcctcttcacttcctttgccataagcaatgttggctcgaatcgtgtcgttgaacaagacaggttcttgtcccactagtcccatttgttgtctcaaccatttcaattgcagcttcttgagctcaactccgtctaaagttatatgaccggaatctggatcgtaaaatctttggaacagcgagatcaccgtcgaatttcccgccccgctttttctannnnnnnnnnnnnnnnnagagaaatacacaaagagttcgtttaatagtctaatcgaagataaaaaattcctaag

SEQ ID NO: 23289 - DNA, 1100 bp, Arabidopsis thaliana landsberg
atagtggttcaaaatgatgtgggtgctaaatgatgatgtggaagaaagagaagatgatgtgaaaagttaaaaagtgaaaaagtagggtgttgaataaattgccattgcacatagccttagatatcatttttttttcttctatttataacaaatttctatatttctgttttgtaatcttctaatattctgatagtagagagttgtaataccataacatgttggaaatgtattccattttaaaatccaaaacatttttataacaattttatctactgttatcaatgtcttaaagctgtatttaagttcatcacttaaatgtttttttggaaattcactgtatttcggaagatattctattaagtattaactatgtttctagctttatgtgctgacttattcatcagtcatctaattttgtggttgattccgttgcaaaattatgtctaagtttgtatggctagaacagcaatataattaagtttgtgcacaaaaaaataaattatcacttagtattaatttttcattatatgatttaatcaagatgcttgcttaaaccgatctagataataaacaaaacttacccatacagtctgaaatcacaggaacaaatgaatttaatcaagatgcttggtaaaaagttatctcatttttaaatttttcacagaaaatacagaaatcacaggaacaaatgaaaacacgctgtaaaaacaacaatattattcaaagctgaattggttacttgtttagattgggtaacaaaattctaaccaaaactagaatcactaacactcattctttaccaaataatacttcaaattcaaataagagtttgattgtgaaagctgtatagctgtacgtatcatgtccatattacagttgtaagccattgttacaaaactactaaaaacaaaaataaataatagaaaggtccgagaaacttgaataaaaatttagaatttttaaaacattattatcgtaaataaaaagagaacctcccaagaaacaagtcgtccttatataaagccaaccacacccctttagcttctctcaccatcatcatcatcattactctctatctctttctaaaacacaaccatgac

SEQ ID NO: 23290 - DNA, 1219 bp, Arabidopsis thaliana landsberg
acgtttttcacattttatcaacaaaacaaattttttgatataatttacatatcaaatatttttaatgattataaattaatatgcaacgggacttgtttcattggaatcgggcaacgaggcaggccttgtcattatctagaattcccaataaaagatcaacaattcagaacctataaaaatcaacaattcggaaaatttgtaacggccctatcacttttgaattctaggtaatacgtttatctcaaacttactagaaaaccaaaaacaagttttcaactacaattaacacttttggcaattcacagtctgtaggttgcaggttttgatcttcactgttctatataatgataagaagaagagtgaaggaaaagcaactcactcaccatgattaaatcaacgaatcaagattttccgcttccaccacatcagtctcactcttctttcggcttagtggtgctgttcggagtcatggcggcagttgcatttgtgatcgtggtggttgcggcaatgtgctactgcctgtaccaccgcgagcaagctcgtccatgcgtcaagcaataatctggaaaaaaaaaagcaaaacataggaaaaaaagaagcaaaacataagaacgaaaaataattttttagcttagttaagccagttttggcttccatcttccaactctgtctcaaacaaataataagtaaaaaagaaagtaaaacataagaatgaaaaataatcttttttagactcatatcttagccttgtcatctcggtcgattttcagttttccataccagttctccatatcttatacaaaactaaacagtaaagaaattttataaataattaaatactcatgtgtttctaatagattattattttagaaatttttttttgatatttttaggtttttcacatgttattaacaaaacaataaaattgtggttacatcaattatttttaataattatgaattaatcgtaatctaagaaatttaattatttctactatatgttaatgaaaaataaataataaataaaaatttgggaacaaagtaaaaaaaagagccggcgccgagaattaccaggctacaagcccaaagtgttttaaggcctgttattgaaaaaagaccaaaaaagtaaaggacataatttacatgtcaagatttacaaatgatgccgatttattttatttgaatatattagctatggccggacgccaataagtttaatc

SEQ ID NO: 23291 - DNA, 583 bp, Arabidopsis thaliana landsberg
tgagtatgtcattcctgaagatatgctgttggaaccaactattgatgatatgatgaatgtttgctctgacgctccagacatgggattagaggtatcccgggcggtatctcgtgtatcgtcgactttggaaggcagtctttggtgtcaagaggttggtcaggattgcccgactcccatgggggtgattgaggatccttcagcctcagaggtggccgttgtagaaaacccagcccccaagggtgatgctggcggttacccagcccccgagggtgtcgccggtaatgatccggctctggtgggtagcgaaactgcaacccagcccccgagggtgttgccggtagtgatccggctccgatgggtagtgcgagctgccacccagcccccgagggtgtccgagcgagctctccttcccacacctccatggacgtccacgtcgggtcgtctccacacgatctgatggagtgatagcgatgcgtacttctttaacttcgagcgagggagtcacttagaggtcggcgaccggatgccagaattctgatatctgctagtggactaaatcaaccccgacgatggcttcagattg

SEQ ID NO: 23292 - DNA, 587 bp, Arabidopsis thaliana landsberg
  unsure (1)..(587): unsure at all n locations
atcgtcttaaactcaaactctaattacaaaataaccggtgannnnnnnnnnnnnnnnnnnnnnnnnnnnnnnnnattgggggtgatgtgccgtgaaatcctatacctaaacctgcatgctaaacgagttcgataagttcaccttagtagataggccggttcttattagacacctatataccaggctcatcaaaatagtagttatggtaacagatacctatggtgggtatatctattattggaatcaagttctagttaattactctagaactaacattaagaacaactaaagatgaagaatcctatatataacatagcaaaggggtaatctaccaaatcatatgaatccctagtgagaaatcctaaccctaacaagccgactactcagacatgatgaataaaataaacaacatgtatgagtaagaaagcataaacaaatcaatagagaaaagagttagaaaatatctcatcactgttattgaaaatctctgatgaacctcagaaaacaggggatgaatagattatgaaaatgctctggnaaagactggttgctagaaaagaacttgtaacatgactttagaataacag

SEQ ID NO: 23293 - DNA, 1853 bp, Arabidopsis thaliana landsberg
atcagctggtgaagaatctccaccggttgtaatgtcgactatgtgctcttcatttgaggaaggatcgccatggactgtaacgtcttcgacgttgtgctcactcttggtcaacaaagggctctccattgatcacttttttgctttcttctattttgtccaatctaatcaatagttcatctaaaccagcgttgaaatacaaatcacatggctctctagctaatactgtggtgctaaattattattttaagaccaatctaagtcaagatctattctaaaattcacttgtacactagtcgatgtgaatatgtattatatgaggttgattctgaatgctaacacatctataatactaaaaaaaaggtacattacaattttacaaatagtgattcctcaaccaattgtatattatactgtaaaataacaactaaattatagtcttttacaataaaatacaaaaatagacatttccaactaaattattattttttagccgaatcaacaccaacaatacgtcaattacatgtagtctttttgtttttgggatcagttacatgtagtcttttacaatgaacagttgaacacgatgagtagactttcagagctaaattgttttgtttttttttgacctacaccaagatcaattattagtcaattatattgtcatccgttacaatgaaaatacaagcgagtagtttcctcgtttttccatcttctttctctccatattttctcaagcaggtggaacaacacgtaccattaaaattatccaccaaaaaaaaaaactaccgttaatcaaagatagaagaaaaacatataacgaaagactaatctatataataataacaatatgaataaaagctttttataattctgtactttcatggtaaccatattttcaaattgtccatcacctcgtttattttgcaaattaatcaaaccattatcgatttcagtttctgaatcctatatatacatgtatttcaaatgatatacctttaataatttctttagaacctctccaaacaagtttcacattattaatggttcgattctttaaaaatatataaattttacatatataattaaacaatattaaattaattaatatatatatatatatattatttttttatgaaacccttttgagtctctccattaatgagttctagcgttctcttgacagtttataaaggcaattagttgttgacttgtggaaaatgcagatgattaaaatgttctcttgccgaggtaatttgatacacatgcaagacgagaagattcagtaatgacacttggctttatttcaaacaaagaaacaatttcattcaaaaaagagaaaaacatagtttattgcaacaacttttgagcaaaggaggtaagataacaacatgatccaccatttgtatctcgcaaggaatccacggataagtgacacaacgagtttaatcactccgatcctcaagtgttaacggcgttaaaacataacgtcataaacacacagcaacacgtcgctgcacatattaccatagggagcacatatcgaatgcaaccgaaaacaaggaaaaccacacataacctgcaaatggacaaatgttgaatatatattagagagagtagcataagtattttgttgggacattattgtaaactttgttcgatgcgcaccagaagagttgactagaatggtctagagatgatgagctgcaaacaaagacccagaagaacaccacgaaccaacccgcaaagaaacattcaaatatcgtcctcaaacgaaacatgactcggttgattctgcaaaccaatcaaaaaccattatccattttgcgggttctaatgcgtgaacaaagaaaaac

SEQ ID NO: 23294 - DNA, 964 bp, Arabidopsis thaliana landsberg
  unsure (1)..(964): unsure at all n locations
tcatatatgagagcattacggaaaatttttttttgagtaatttgtaatttataagttaatttatgtatttttaatttttatttataaatatattgttttgttaattaagattatgtgtaatattttaatgtatgttttagtgttatttataaatgttatatggttttaaaattattatgaacaatataaggactataatgcaaaacacacattttagaaagtttatatttgaagtatacccttggagaagaacatacccatactttatatttgaagtttacatactctatatataaagtatctcttggagatgctctaaattatgaagtattggattatctcttggagaacctaaaactttatatttgagggatagaatatctcttggagatgctcttggtagttcaatattttgtcccttaactgtaacgtaaatgttgttatctttacttagacgtctttgatatgtaaaaattctatctctgtatcctgtttgtactggcctctccaaggttcaccattattggatgatgcactgggttgatatatataacataactttttggcaaaaaaaagaaacaagaaaaaaaaaaacagtctctttggcgatagcgatttggtcggagatttctccgattacattgattgggactttagtgaatcttcacagaagcaacttcacggagaacggcgagaagaatgtggaattgagagcgtcgttagaggatcgagaagcgtcggccgtttcactggagagatctagtgttgttcgttgatgaaggggttctaatttcgatacctaacggaattgatcattgataaggtctcattcnnnnnnnnnnnnnnnnnnnnnnnnnnnntgtgcacagatacgaccttgaggttagtttattccttaaaatctaatacaacanaaatatcatttgattcatgggatatgttcattgaatggatttaggatttg

SEQ ID NO: 23295 - DNA, 1045 bp, Arabidopsis thaliana landsberg
agttggatctggtccgcgggttatagcccatttaaaacagctttactagttagagagtaatttgttatcttacatattcgatgaccactttgggttttgaaatattttgggcccattttatttgtatggataatgtgtatcttgtgtataatactagtttacatgaggttttctaacataaccaatgttgttatggcccgttcattgttgataggtttttctgacaaattttaaatagttgaggttttgtttgggaatttttccgttgatatatatttttttttttggggtgatttaggttaataaccatatttgataaacaaattaaaaatatagcaccatatgtataaaaattaagaaaatagcatgtaaggataagaaaaagacaattttagtgttgaattggaggtgagataatttagtaacacttagtttagttttgcacctatttgtttttttttgctatatatctttttcaaaaaatagattccaattataaaatttattagaaaagccctatgtttttttctacatacaaaatagtttgaatttttaaaattggatttgaatttataaaatagtaaatagtgtttgtaagtaaaaacatgtactattttggatagaaataaaatgttgtactatactattttggaggtataaaaaaactataccctaagatacaaccttggcaacccaagcaaccatataacataagtggtatctgaaaaatctactttgtccttctcgtttgtttgttatgtgatacagaaaaaaaaaaaaaaagagatcgagagaagaaagaaaaagagatgagagagagaggagaaaaggagggacttagaatgaggtggagagagagaggtaaatatgccattattatatataatatagagagtatagatgttttttttgtcttatgttactttcttaatttataagtttttgttagttattcttgcaaatttcccaaaaaaagttttgaaaatttttgacggaaaatttattttggaataatttagatgaaaaatattaatgtttcgttttg

SEQ ID NO: 23296 - DNA, 489 bp, Arabidopsis thaliana landsberg
atgaccagactttccatagttgaagcagccagtagaagaactagggagagcggggaaacgagcaccaggggcactcggctgatttttagaagtggggcagtggtaggacgaatgaaaacaggctgtttgaacggataggagggtggacgaggcgaagaatgattctaattaaaaggtcgaattacaaacctggttcgcttctcaggtccctgattagatctgtcacctccaaatccctttgattttccctggcctgtgttcttggcttctactaccagtgacgtgctgacagctctgctgtaagtaagatccaggcaagtggccattttccgttggagccggtcgttgagtcccctcatgaagcaattctttttcttcaaatcagtatttacttgatcggtggcatattgggaaagatgattgaacttgttgagatactgcattacagtatctcccccttgcttcagtcgaatgaactcctcttgtttc

SEQ ID NO: 23297 - DNA, 1319 bp, Arabidopsis thaliana landsberg
  unsure (1)..(1319): unsure at all n locations
atcaaatctttctggacattttgcttctccagtttcagatgcttgcctcttccttatgaaagtgggaaagggcttgttatagaaactaacctctttcttagacgtttctaaagagattagcgccgtcttcctagactcaatctctttccttgatctcggatgtttctgtttaatactcaacccagacgaactcggcctatcaagagaagatggacaatttgccacaaaatccaaatccaggaaatcagagctaggcttttccttacaggactgaaacatatcttgagataccaaaaggcctggtggagaacttgaaggagagttggaatgatcaatagaaaccacacctctctgattatccaaaacccctaacctttccttcaaccctttatctatcacagcatcttgaaactcacaccccaacgaggattgggttaaaggaatattcaattccttctcaggaaccatcctctgtaagtggtcagaatgaatattctgattttcttgttgacgataagggcaatcaactttatcatgagttaatctttgacagaagaagcaacgtttcctaattcgctcataatcaaaagtgactgaaaccacttcacctgaaggcacctgaactgacttggagttacgcagaggatttctaacatccaaattaacttgaactctcacataatcctgtgcctgagatttctccaaatctaattcaacctttaccacctgaccaacacaccctgcaattttctttatcgtctcctccgtttaataattaaccggaatattacgaagacgaatccaaatcggaaggatcatcaaatactcctcaggtggcttttctacccatcgatccattataacacaccactcatcttgagtccaaactcctgttttcaagatttcaagtaaatcatcatttgatttaaagaaaaaatgaaatctttcttgagatagagcaaccccacgaactctagagtagatcctccagattctaggcatatctaatatccaattagacatccgttgatgagagggattcagaaatcttccaataagactgcaactattcctctcaatcgaactaaactgaggttgatttgatagaattaaaggactatcatcgttgatcgtcatctcaaagattgctttatccaattccatattcatgataagaacccctttaaaacactttcagaagatactcacagcaacacaattcacagagaattgatacaactacagctgcaactacaacccaaagatcttgacttgattgaaactcanaagatttagaacctccacagaaaacggaaata

SEQ ID NO: 23298 - DNA, 885 bp, Arabidopsis thaliana landsberg
agaattttaaaaagaaaaactatgaaatgaatcaaaaatattaccagtttcatatatgtgagaaaaaggagatagctttgctattttgtattattgggaccgtcaatttgacaaaattttccttaccaataaatattaatttgttgtcgacaaaagaaaaagaattaggttgtatatcttaattgacattaaaaaaatagattttatagtcttaagtttacagaaaaaatttactcacactaaggaattgcagagcaaaaggagatactaaaggagaaaaaagaaaaggaaggattaaggtgggaggacattgagaaaatgagatattcatggaatgttgcatgtgaagtgatgagaattgttcctcctctttctggcacttttcgtgaggccattgatcacttctcttttaagggtttttacattcccaaaggatggaaggtaaggctactccaaaatccttaagacagtttgacatacatatcaagctcatgcacaaaatcatatatatgttttgatcataaacatagttatattggagtgccaccgcgacacatatgaatccagactacttcccagaaccagagagatttgagccaaaccgtttcgaaggaagtggtccgaagccttatacctatgttccatttggaggaggaccaagaatgtgtccagggaaagagtatgctcgtctagagattcttatattcatgcacaatcttgttaatagatttaagtgggaaaaagtgtttccaaatgaaaataaaatagttgttgatccattacgaataccagacaaaggtctccctataagaattgtcatcaatcttgagtccagtctgaacttgatatggacactagttggtgctacgtagccaatatctagtg

SEQ ID NO: 23299 - DNA, 1051 bp, Arabidopsis thaliana landsberg
aattctgtattcccgggaaaacaacatcacgagagacagaaatcacacccgtttcaaaattgtatactctccagcctttcttcgcaaatggatatccaagaaaaatggatttgttacgtctactctcaaatttgtcacctccatgcttttgattatgaacatagcaaatacaaccgaaaacccgaatatgattaaccggaggaggacgattatatagaagctcaaatggtgtcttgccttgaagtaatggagttggagttctattgatgaggtaagccgcagtgagtgcgcaataactccaaaattcaataggtaatctagcttgaaaacgaagagcacgtgcgacattgagaatgtgtctatgcttgcgttctactctaccattttgttgtggcgtccccacacaagaagtctcatgaataataccgtggtcagcaaaaaatgaagagagacaaacaaactccgtgccgttgtcactgcgaattgtctttatcttagtagaaaactgtctctcaaccagagatatgaagtttttaagatgcatcggagctgtttgtttcgaaggtaggagatataaccagacagcccgtgtatagtcgtcaacaagtgtgagaaaatagttagaaccgcagattgatgtagtcctatatggaccccaaagatcacaatgcaccatttcaaaaggagaacttgttttatttttgctcaaaggaaaaggatcccttgtttgtttagctttaatacaaatctcacaagtctttgaatcaaaagcatgaccagtagaatctgaaaacgataacaactttaaaactttggaggaaggatggccgagacgacaatgccacaactgagaagacgagtccatgcgtgtcattgatgccactgtttccgttcctcgaaagaaatacaatccattttgctgcttaccagctccaatcagcgttagagtgatgcggtcctgaataatacacactttgtcagttatctgaaaaacacaactctttgctctagtcaactgtgaaactgagattagatgacaatgtagaccgtc

SEQ ID NO: 23300 - DNA, 423 bp, Arabidopsis thaliana landsberg
gtactaatattccctatgtttttattttgtattttttaggaaaagtttatattaaaatatgtattaaagttgattttataatgtattattttttgtattttacaattttctataactttaaaccaatgatattcaattatttttattaaaatttacaattcattaacaataactaataaatattgcatagaaaattaaaaaaaaaaaatctttttgaaacaaatattttttctagaaaatcaaacaaaaaataacagagatagtaatttttaacgaagataacgaggtaaaccatatgtatgcgaagtttcgtggggcacttgcatttgggcatgaaagaccataaaaaaaattaagattatcaccctgtcaactgttggaataagaatttttttttctaccccaaagtccctagtgcacgag

SEQ ID NO: 23301 - DNA, 777 bp, Arabidopsis thaliana landsberg
  unsure (1)..(777): unsure at all n locations
aaaaaaaccccaaacggtggaaaacttttttctataaaaccccttttccaaatttttgtggattagacccaaaagaaaaaaagaaaattttactataaacccttttcgattccactaattgttttcacaaaactctgttctgtactctgttttttgttaggtcattttttagcaaagaagaagaagaggaatggcgatgctagttgatcctccaaatgggataagacaagaagggaaacattactacacgatgtggcaaacattattcgaaatcgacactaagtatgttccgattaagccgattggaagaggagcttatggtgtggtttgttcttcaatcaacagagaaaccaatgagagagttgctattaagaagatccacaatgtgtttgagaatcgcatcgatgctttgagaacattgagagagcttaagcttttaaggcatgtgagacacgaaaacgttatctcccttaaggatgttatgctgcctactcacaggtacagcttcagagatgtttatttggtctatgagcttatggattctgatttgaatcagatcatcaaatcctctcagtctctctccgatgatcactgcaagtacttcttngttaggtacgttggttcgatacatattctgtttctcttgttaagctttggtttgatgattgaattgtatctttctgtcgacattgtagttgctaagaggattgaagtatcttcactcagcaaacatccttcatcgcgatttaagccagngaatctctagtgaatgctaat

SEQ ID NO: 23302 - DNA, 1191 bp, Arabidopsis thaliana landsberg
cctaacaattagaaattaaacacattcacaatggacttatagggttaggcttttttgtgagatagattgacgaaatcacccctggaatttcatcaacatcatcttcttcttcgacaactcaaaaacatttctacgaccaacacccatattccgattaacccaatagaatcaattaactgcttgttgattgaagaaagctaaaccctaaatggatactatatagtgaacccaagggatccaatcttgaacaataatcaaatctatttaaacttcaacagttttccttcttccgtttttaaaataaagcgagagatgatgaaatagtgattcatatcgagaaattaaaattcagaagacgtatagatgataactgtctgtttcttcgaagaagaagatcgaccacacattgatctgaacttctaaattttggttgaggtgatggagaagcaattgatcatcaatggcgagagtccaacagtgggttctatgccattgaagagcaagcgaaataatcaaattctctgttatagcgattgactttgatgacatctccgacaattgctccggtgataaacgcgaaggagaagaaacataatgagtccattgaattgaaagataaaacagtcaatgtattgagttataagtacctatatctataaggaactaaaaaaatgctggattcgacaatggcatagagaaaaaagtggtttattcataattgatccataaaaacgtgattggtaaatatgtatatataagtatatcaaactactttcttataaacataacggttaattattctaatacaatataataaaactttaaattaatactgtcaaatttgtgagatatgttacaaaacaaaattaaattgaagaaaaataaagtaatttttcattcaagataaaattaaataggaaatttgcgatatgttacaaacaattgtgttatggtatcattaaaatacatgacatttattttttgcttttaattttttggttaacctttcatacattttaaatcttgttaagaaaagaaaaaaaaatagaacaaaaaaaaacagaaataaactttgtgaaaaacaagaaaaatatggattgttgtataaatttaattttatgaaaaaatgaatgaaatgtactttgtaaaaaaaagatgaagtaacacgcttacaaataaatttccaaatag

SEQ ID NO: 23303 - DNA, 1051 bp, Arabidopsis thaliana landsberg
  unsure (1)..(1051): unsure at all n locations
gaacataaatctcgggaaaacgatgcaagtatggtgaagggtttttgtgccgctggctgtcttgatcatgcctttgaacgattcattagactggaatttcctctgcccaagagtgtgtattttactctattcactagtctttgcgccgagaaagattatatcagcaaagctcaagacttactggatagaatgtggaaacttggagtcgaacctgagaagagcatgtatggaaagttaattggtgcttggtgtcgagttaataatgtgagaaaagcccgggagttttttgaaattttagttactaaaaagattgtccctgatttgttcacttatacaatcatgattaacacctattgccggttaaacgagccgaagcaagcctatgctctttttgaagacatgaagaggagagatgtcaaacctgatgtggtaacatactcagttttactcaatagcgatccagagttggatatgaagagggaaatggaagcctttgatgttattccagacgtcgtctactacacaatcatgattaacagatattgccatttaaacgacctgaagaaagtctatgctctttttaaagacatgaagaggagagaaatcgtacctgatgtggtaacatacacagttttactcaaaaacaaaccagaacggaatctttcaagggaaatgaaagcctttgatgttaaaccagacgttttctactacacggttttgattgattggcagtgcaagattggggatcttggagaggcgaaaagaatttttgatcaaatgatcgagagtggggtggatcctgatgctgcgccttacacagcactaatagcttgttgctgtaagatgggatatcttaaagaggcaaaaatgatctttgatcgaatgattgaaagtggggttaagcctgatgttgtgccttacacagcgttaatagctggctgttgtaggaatggatttgtacttaaagcagtcaaacttgtgaaagagatgtnggaaaaggtgattaagccgactacagcttctctgtctgcagtacactatgctaaattaa

SEQ ID NO: 23304 - DNA, 1158 bp, Arabidopsis thaliana landsberg
ggcatcgtttctcatctccaacactcttcctttcacttctttttcttgtggaagctggtctgctaatgaatcgaggaagctaggctttgattctttccctagtactagagctgcgacatatctcattagctcgttgaaaaatgccggcttttcctctttggcagtagtacctgtaagccattgtccttctctgtctttggtttaagattgttttttacttcgtgtggatttgtagaaatgtagacgaggttttggttggtaatagagatcttatgtctaaattggtttgaaaattgctaggaatgtaagaaaaacgaaaactttgatcttgggttggtctcgctgattactgatgagtgtagtcactctcctagcttcagattccactgaattcatcttccaaaagctcagagatcactaaatagaaaatgaacttaatcaatgatctaaagctttgttgcttgtttttctttttaagctctctgttgttttacttgcaagagatgtagatataaaggaaccaacttcgtgctcttgttatttatttttcagctttgacactaaagttttatgatttcacatgttgttgttctactttatatgttgtctctatgttttggtcaccgtgatatttggattaggcttctatgaatttaagatgttcttgggaatatttttttggcagaaacaaaactttacgtatgcgtcgaggtgtttttccaccactggagattcttctgttcaaggatctcctgagtcagattgtgttgtgcctcagagaatcaagtttaagcggcttgataaaaccgctaagcatataatgcaggtactacaactcaattactagacaactgtcatggataaatcatgtcatatgacacaatcttctgcagattgtagacaaggaagcggttgaggaagtgagatctcttagagagattccagagataaagcctggttacattgtgcagctaaaagtggtaatttcttttttcttggggaatgggattgaactatcttttgtctttgaaatgaaaccttttcataggcttgccatttacttttgtttttaacaggaagtgccggagaacaagaggcgtgtatcaatcgtaaaaggagttgtcataagcaggcgtaatgctggtctgaactcacatt

SEQ ID NO: 23305 - DNA, 743 bp, Arabidopsis thaliana landsberg
tccgcacccctaggtttccatatgggtttcagcctttgggcgtgatttaggaatatcggaaatcaaaaaggtcatctcttttagcgatagcattgctgttacaacatcaggagatgttttgttggtctttaccacggctttcgagtcactcggtgaaaggtctaggatcttccacgtctacaagagggatccggaaaaagagctaaaaggaaatatatgtggaaccagtcttgttgaggtgagatctataggtgatgaggccctgtttttcgatttgagtatcaccgtgcctgctgaccatacccttggtattgagcctaactgcatctatttcactcgtaatgaccgtttcggtcacaaggacggttccattccatgcctagtcgacatatgtgtgtacaacattgcaacaaggaccttcaaacgcttccctagtctgtccaacttaaaactcaaggatgctatgtggtttctcccctcttgaatttggtgttttgtttcttgtgttggtgaaacattcccagactctgcattgttatcatctttttctttttcatgtatgaagatttgacattgctaagtgtttaaaattcctttaaagacttatgttccaaatttcaaaccattacttcagatcaaattatcatcataaaaagtttttttttttttcttaaatgtctttgtgaacgtaagatagactttactgtgcttctcacaaagactgagagcactgaaagtactgc

SEQ ID NO: 23306 - DNA, 630 bp, Arabidopsis thaliana landsberg
atattaataatctctattgccttctttgctctggtcgaccagtgggtcgaatggctctggggaggagatagttcagctgcgtagaaggtataaattagttcgaagtcgcaaaaataaacaacaaagttaaaagccattaagtaatacctatctgtctttcaagttctgcagctttttcagccgcttttgttgcttctcgagcgtcatgaatgtctttttcgctctttttcattatttcatgggccatacctcggtcgccattttcccaaatatcagtgaaaattttccgcctattaagcttgcttcggccgaggggtccttcgtatcgtcaatagagaaagcagcttcggcctgggccaaaggtttaacatgttcgcaccctaccttctccaaaatagctgcaactccccttgcaccagagaacgcgcacacgtccccgcggtcactcaaaatttcttcaaaagctttggcttcactgcagatccactcaattacgccctcaggatcgccccttatgaagttgtcttcgctcgagtacgcgcccacattggcgaagctagtctttatcttttttacacattctacagatttttcaaaacatctttattttgaagagcgaagttctgcaac

SEQ ID NO: 23307 - DNA, 519 bp, Arabidopsis thaliana landsberg
  unsure (1)..(519): unsure at all n locations
ctatccattatgatccattagcggtgtaagttggctttgagaagccgttctttgaactaatcgtggtttcttctctgatggtggaggtgaatttagagctaaaagaggcctgtcttttttctctcatttcttcactttagactgatatgagtagtaagtgattcaagatgatgcgtcaagattttatagactgttaaaattaaatggaatagagtccattccaagttttagagaatctgttggttagttaaaggaatattttctaggtgactaaatatctaaacttgctatgtattcggatttctcatttaatttactttaattggttataaatctttatactcaaacaatgtaaccaattagccctatatcatcgngaatgctaatattctcttttcttttgtaggtattaatatattttggactttatgattcaaactacgatanatctgctatagtttctcaactactaaaagtatatttacaaaaacgtagcttagcatatctcataaatttaaa

SEQ ID NO: 23308 - DNA, 562 bp, Arabidopsis thaliana landsberg
ttgtaatttgaatagcttgctttgtttcctctaataagctggattgagctaatctttatttgtgtgaaccgcccatgcggcgatctctgtagcttatgatgttctggtatggctttagcgctcaccggtctagaagttccactgcacatgtttgatatgggtaaagctgtaaactattaggttgagatattttagataatttatatactattaaaatcgcaatattagataagaaaattgtggtggttggttcatctcgtcgaatgcttttaactcacccaaacgatcgtattttcccgccatggggtctccttttatttttttcctttgtatacaaactacaaagaaagaaaaagaaaaagagacgtgtgtggcctctccgtatgtataacaaaacaaaatgaagtggtgtgtcaggatcaaattcaatttcaataaccagtcacaatatctttcaattactggaatttctatctacatttggcataacctttcatattattttttacacttatttgtcttgtgcttttgatcctgaaagtttttacccatacataatata

SEQ ID NO: 23309 - DNA, 1373 bp, Arabidopsis thaliana landsberg
  unsure (1)..(1373): unsure at all n locations
gtttatgtgtgtgaatagatccttctgaagaaaaagtcgttgtcacactatttttaccgaatctagctcgttttagtgtgactgtgagtcggacctaatatattagagatttgaagagattaataacattttgggcctctaattacaaaaggatttgaaaactatcatatattttatttcatgggctttattattcttaaaatccgaaatcttaaacttatgtttttaacttcagcccattgtgttgaccttatctttatggtacctatatatattaggagatagaatattccattcaatatttcgtctcgatatgtttgttacaagtttagataagactttgttaatatctcatgtacctagaatctaggaaagatcgttgctaaaccgtgtatatattgagtgcaatgcaaagctatctcctcaaggagaatttcactagcttataatatatactttagcttaatcctaggtttaggagctattgatgagattcaagatctagatagcggagaagctttatggttattggtgagtaattgagtgatctacacaactgttcaactgaagtagaatctttagagtttagactgttcaagagttttcctatataaagaaaattgtttgaaagaagcttttcttctagttagatcttccgttatgaaaaaatcaaaatcttctcccccacgtaacctagatgactccggaaactccacaaaaaccatctcttttgatctcaccttcgagatactatcgatccttccgaccaaatccatcatccgattccaatccgtatcaaagctctggttctcaatcatccgcagtaaagaattcgttgactcgttcctgactaggtcaaagacacggccgcgtctccttttcactttcaaacacttggattccgacaagcttttcatctactcagctcctgatcacgacaacggaaaatcctctccgggcatagccagacacgacatgacgatctcgaatttcgtcaactacatcagatctccccctgtcaacggattcgtttgttgcacacgtggttcatcgatcgcggtttgtaatccaaccacgagacaaatagtaaaactgcccgatgttgttaccaacgaaaattacatgcacgtacgtctcggatacgatccagtggaagatcaatacaaagtgttgttggttgtgatgatgttcgacggctatagaacagatacagatcaggaatatttcgttttcacgctaagttctcaacaaanagagtggagaaagattgaaaacaccactggagaaacttatcacatggtctatggagggatatgcatagatggtgctatatactatggngttcacagtcaatatagttaattcgatgtagg

SEQ ID NO: 23310 - DNA, 367 bp, Arabidopsis thaliana landsberg
  unsure (1)..(367): unsure at all n locations
ggacgaagggccggggatgcacttagaacacaaaacagcacncgcccaggacagcaaacggagaaacccgagaaccaaggacacaaaaggaaccccaanaagaaaacaacggaagagaagaacgcnccccaacgagaaaaggcagangcaacaccgcacacaagcnaccagaaacaacgacaaaccnngcaaggacaccagagacaggagaacgaaaacgaagacagcccggcaacagaacaaaaaacgcaaaaagagagcgaaacaagnggcaacccacagcccgggagcaaacgacaagaagcagggagccccccggaaccggaggcgccaaccggaacaacaccaaagacccaacaaggaaagc

SEQ ID NO: 23311 - DNA, 2216 bp, Arabidopsis thaliana landsberg
  unsure (1)..(2216): unsure at all n locations
ccgtctacaccaccgctgctcgggctgccggggcatccgaagacgtcatgactgcgtatctgcccatcgtcctcgggcaagacgcgctgcagtggctacgacatctaccccgacactgcatcgacgactggggagacttcagtcgacgtttcaccgccaacttccaatctctctccgacaagccagcgcaaccatgggacctcaaatccatcaagcgccggggggatgagactctccggacataccttaaaaggttccagaccatgagaaaccgcatccccgaggtcacggaggcggccgtgatcgaggacttctacagaggatctaacgactcggctttcgtccgagccatactgcaaaaggcgccgactacctccgaggagctgttccgggaagccgacctctacatcaccgctgacgagcggcccaggacctcatcggaggagcaaagcccgcaccggcgcaccacgacgcgacgcgaaccagccgcccgacaagcgctgggagaagaggcctcgcgaagaggtacacgccgccggaccacccgcctctcgcgcccgaggaggacctcgtggaggcgaacgcacgctggacgacatcctcgacgcccagtgcccataccacaaggacatgcgacacactctccgcaactgccgggatttcaagcactccgtcgggcatggcgaccctttcaacctctaccacctcctccgccgaggggaggaccagatgaaccacgacagccccatcagccggaggaggggggaggaggagctttcccgcgcgttgacatggaggtcaacgtcatcttcggcggacatgggtcgctggagaacaagagacaacaaaagatcaacgaccgccagatactggtgcgaccatcggtcctcccgccccataccggtggtcagagcacccaatcactttcactcgggaggatcaatggctcaacttcgaccatccaggcaaatacccgctcctcgtcgatccggtgatccgagagagccgggtaaagaaggtgctagtggacggggggagcagcatcaacgtcactttcccccggacactccaaggcttgggagttcacctcaaagagctccacgagtcggacactcctttctttggcatcgtgtcgacagaaggggaatacccgctgggccacatctacatgccggtcaccttcggactccggagaattacagaaccgagttcctgaggttcgaagtggcgaacttcgactgcgggtacaacaccatcatcgggaggccgggactggccaaattcatggccattccgcaatacacnnnnnnnnnnnnnnnnnnnnnnnggccgcaaggaatcataactgtgcacgctgacttccaaggtgccgcagaatgtttccgagtggccatccaagcggccctcaccaccaaaccgccggcgacttcttcaacgcaggcaaactctaagcctgaggaagaccttgcagcacccgcaaatgaagctcaagccgcaacctctatgcggccgactgaagaaaccaaaaggatcaacctggggttcgctgatgaacgcaagactgccatcatcagctccagcctggatgacaaataggaaggcacgctcgtccagtttctgcaagataaccgagacgtattcgcatggcaacctgcggatatgccgggagtcccaagagaactggtcgagcacaaactgaaggtctatccccaggcaaggccgatccgcgaaaaactacgacgtttcacgcccaacaagagagaggccattcgcgtcgagctagctcgcttggtcgcggctggattcattagagaggtgttacaccccgagtggttagccaaccctgttcttgtactcaaaaagaataaagtggattggcgcatgtgcgtcgactatactgatctcaacaaacattgtccaaaggatcccttcgggctcccgaggatagactaggtggtggactccaccgctggatgttctgtgctgtctttcctggattgctattccggataccatcagattagtttggcaaaggaagacgaggaaaagacagcgttcattactccgtttggtgctttctgttatacctccatgtcgttcggcctcaaaaacgctggagcaacttatcagagagccattcaaacatgcttagccgatcactggggcaagtgtgtggaggctacatagatgatgtggtaacaaaacggagactcgga

SEQ ID NO: 23312 - DNA, 841 bp, Arabidopsis thaliana landsberg
ctcagccaatgactccattgatcttcaagtggtttactcttgtcaggtacggaaagcattggaccggttaaaagaaccttcttcttgtattgactctcaatatagtcacaaaatttaccttcgatttcttcacatgtccgaatcgaaatgaaatcgcaattcataagacctgtggtgaaccggtgataaaacctcttgtagaagccggagaaggttaacaaggcgtgagcatcgtgttcgcggtacaacgcctttgatgaaggataaccaggtggagcaactccaagttcaccacctgggacaaggtcgtgagctatagaggtagctgacatcacgttatacaacatactcttgactttaagcgctttagccatttccggaacccagtgagctaaatcgaacaagattaggtccggtctcaaggcaccaatcgcggcttcgatctgatcgcgtgtaagatccatggctatagacaagaacttcaccaacgagatggggatatccagaggctgtctcggcaccagcagggaggccatcaacatgaggaataacaagaggatgaaagacgataccgtgtggaaatagattctgatgttccaattgtttctgagctttcttaggtagcaagaaagtaaccctatgacctttctcggctaacttgttggctagatgcaagtacggagtcatatgaccaaaagcaaaccaggggaacataaaagcgtgaatcttttggcccatttttttctttagtttccgaaaaaagcagaatacaaaaaagataaaagtagtcaaagagagccaaaagaagaaattgttgttgtgtttcagattataatcatct

SEQ ID NO: 23313 - DNA, 469 bp, Arabidopsis thaliana landsberg
cctttacctgtcttatttgattatacttgacaactcagcggtaacattggcacatgtcttcagtgtaactgagggcgtaacaatatattctgccgccaaactcatccgtatcctaggaaactttcccgccaaacagtcggacactcaacctttcgtattcctttacctgccttattttataattctggacaactcagctgtaacattgttacatatcttgagtgtaactcagccgtaacaatatattttgccggaaaactcagccgtgacctaaaactttttcgacaaacggtcagacacgaacctttcgtattcctttacgtctctttgtcttttcttctatatctctgctacttcatctcatcatttacacgtctcatcctctcttcctaacgacatagatgttcctcacattgacggacaatttataagagatgtcgaagccgtactcaccgatcctgagcgggcg

SEQ ID NO: 23314 - DNA, 599 bp, Arabidopsis thaliana landsberg
gatggcgagagtggcacgtaccctcatggcaaaggatcgcctaaaaggggtggtgtgctctcgggtggcgtggacctgttcatgtagtggaggatccgtgggaacggttgacatatgcaagggttaagtgctacatatgtcgtgtggttagagatcctcagctgagtaaatcgattcagatcgccgttatatccccggagagtggagacttgatcgctgccctgcaacctaagtcaggatgtgaacattatgaataaaaatgatgttgtattgatgagatggtgaaattagaccagatgcaaacagagtctattaatatttaatctggcgttaaaaattgaaagtaagaactcactttagtaagctatttctgcaaaagtatctaagttgattcttgctaaagcctctccttgattcccaaatccagcatatccttgagagtcttttctttagtcgggtaagtcttgctgagtaattccatactcagggttttattcctgttgttttcaggtttaattttgtgctgcttttgatggtgtaagtccggtgggtcggcttcttataagctaagacttctctatactcttctgaggatggta

SEQ ID NO: 23315 - DNA, 639 bp, Arabidopsis thaliana landsberg
tctgtgcagttgtatgctgccgtgcacgtgcacagcaacagtgcccgacactgggcggttgggaacctgcagcgtggatgaaacaacttcttcctccaccaggaaatccatggaagtctcggcgtggtgctctacgatttgcaccatcatcctgagcgaggatgcaagcaaaaacctaatgcctggcccctacctggcgcgccaaatgtcggagagggaattctccagccgggtggcggagtgcacccgccctaaatcctaagatgaggaaggggcttaagcgttttgcctgtcctgctaagcgaacatcaagcacatgaacacacgagatttagagtggtttgggccgccggagcgtaataccctactccactgtatgttggattgacgtggaagcttgagaattgagagtctaagttcggtccaagtgagcttgtgttgtaacgttgcatgcctccccttttatagctaaggagggcatacacaaaggtactgagtcccgacatgtgggcccaggaacataacagatgtagcacttggagccacaaatgttcgctactggagcaatcttcttgcgccctgacatctgagatctgcgtagtatcggcgtgcaggggaagctctcgtatagggatgatg

SEQ ID NO: 23316 - DNA, 673 bp, Arabidopsis thaliana landsberg
tacaaaactgatcaaaaagttagtaatttttttccatatagaaaaatggcactgaatagtgaaagtgaacaacattgaacttagaaatacttcaaattaatctatagaattgattgtgttataagaaaatcctacaatcatttgcactcaaacggaaaaatcgcatgaagtcaggtaaactcattgggttttaaatacttgcatattaacttatgttatactattacaataagacacgaacctgatatgaaaataacaattttcttacaatgaaaatgttatagcaagacgagtgaagaaacagacaagaaaaagtttcgacccatcaaagaagtaccaaaccaagtgacccacacaataacacaagagaaactggagatcttcaaatcaatggagaattgggcccaagaaaacttattatcttacctcaaacccgtcgaagcttcctggcaaccacaagactttttgccggaaaccaacgacgaagaccgattctacgaacaagtaaaagagctaagagatcgaacaaaagagatccctgacgattactttgtagttcttgtcggagatatgatcaccgaagaagctttaccaacttatcaaactactttgaacactctcgacggcgtaaaagacgagaccggtggtagtctaacgccgtgggcggtttggg

SEQ ID NO: 23317 - DNA, 598 bp, Arabidopsis thaliana landsberg
  unsure (1)..(598): unsure at all n locations
taaacgaatgatggactatcctaaactcttttgatagtatagacagtagtatgagctggtactcactgtactggatagtgatgggggtaggtccacagtgaaaacaaagtagaattttatagtatgtagtattttacaccacaaaagttatgtattgtattgagatgtgtgcaacgttccgtagggatttgactaagaggtctcaatcaatctatcaagtaggtagagatggcctcagtgttactttagacttttgagttttgacacgcaaactcatgttcaattcatttttgctaaaaagcctttctattcggccgtgtattaccatatattagatatactagatgaatatcccaacacgtgcgaatttatgtgttactattttataaatattttatataatatatttttatataaagtaaatttgaatgtattatttttgaaacgtaaatataatttgtaattattttttaaaagttcagctatattagtgcataaaaaaaaaccaatgagtttcaatagtgttttttgttggtgctcaagattcttagtcctttgattcaatttttatatgttnttatttatttttgtttcatat

SEQ ID NO: 23318 - DNA, 1082 bp, Arabidopsis thaliana landsberg
ttgtacccaagacagtgttggaattagccaacgaaggtattgtaactagtgcaaagcagcatcttccatactcatgaaagcgatctcaaccttctgaacttcatgtgcttgctacaaggagaaatattgttctactcgagccagccatcatagtggatcatcaccactgaagatcggcatctcgactagtttcacaacacatgggtggtgattgtgagtgtaacacccgcccttccatataggccaagacgacatgttatttatctgatcttgccaaaacattttctttaaactccacacacgaacaaaatattgcacataactctccacacttactatcatgaggaaaaaaggaaaaagggggtgagtaaagaatactcagtgaggggaatcaactctgcccactgaaacatagaacaatttctaaagctatacaaccatcatcataacatataaacttagacacaagcaatcaacctaaaatgttttaacttcgaataacacattcataatgagcatcttatccataatagcacatacatacgtatcgctaggtccagtcattctcgtgataacaagagcctcatgagtggaggttggccctcgtggctcagacactcccatgcatcccaggctcgtcagcgtttcttgacctgcatgtaacccgtcagcctatcactatccacattactagggagaccacgacccatagctcgattctccccagtcatatattcatcatacatacatactcataatcatagttaacatacacatacttataatatcatacataacatcacattatcaaacatcatactcaacaatcataaagtcatatcatcatgtaatcttatcctatacaatcagatctaagcctacatatcatgcgtcaagaagcataacaaaataaaatgatgccatgcttcgcaaatacctctctcaccttggtctattgaagatgaagactcaattctcctttcttttcacttaggcaatctttactgtaaccacatgctcatcagctttaacttggttctccatcaaccaggatctgaatccatgagtcataatagctccgc

SEQ ID NO: 23319 - DNA, 449 bp, Arabidopsis thaliana landsberg
  unsure (1)..(449): unsure at all n locations
aagacttccactgcactccggtattagtgtatttaattccaagttcatacttatgctctcattgcctttttgctcttaattgacatttttggtgaggcaatggggttaaagggccaagaataatctcgttttggtgcnnnnnnnnnnnnnnnnnnnnnnnnnnnnnnnnnnnnnnnnatcagccaaccacttgtgacttttaattttagaaaagctagaaatttgttttcgtcaaaatactcttattgcaaaatttggtctcttgcgggggagaattttgattatgggaaaaagggggagtttttggcacttgatcaattttactcttggaataactctctatgtgcccaaacaagtgtgtttgacttagagataggaaaaagactttgatctgcaaaaacaaaccaagtggtggtaaagagtgatccaaatatgccaaaatatagcaa

SEQ ID NO: 23320 - DNA, 621 bp, Arabidopsis thaliana landsberg
gatagactttgatttttgcgcacttgttgtgctaagtccggctgcacccttaggcgacttctgcgcggatagtcttcgcgatagactttgatttttgcgcacttgttgtgctaagtccggctgcacccttaggcgacttctgcgcggatagtcttcgcgatagactttgatttttgcgcacttgttgtgctaagtccggctgcacccttaggcgacttctgcgcggatagtcttcgcgatagactttgatttttgcgcacttgttgtgctaagtccggctgcacccttaggcgacttctgcgcggatagtcttcgcgatagactttgatttttgcgcacttgttgtgctaagtccggctgcacccttaggcgacttctgcgcggatagtcttcgcgatagactttgatttttgcgcacttgttgtgctaagtccggctgcacccttaggcgacttctgcgcggattggtcgcacgcgagggtggctagcgcttagctcgcggtgacttcgaattggtcgaatgccgaagaccgttgtcgcggtcttttttcgacacatgcttttgcgggggattttctcacatatattacatggctcagcatcgttaaaaactcacccccg

SEQ ID NO: 23321 - DNA, 326 bp, Arabidopsis thaliana landsberg
agagagaccacgaaaatgctgagatggttaggagaaaccgctacggtttgatacctttttgcagcgggcagcatctatgacataaacggagcagtattgacggatgcaatcaggatggcctgggccccagagaagcatatccatgaggggaaggcaggttaataaaagagcgggccaacaggctcgtttgtgccgatctacattcctgggcaccttcaagcacagctcacacgacaaaggatgtcaaaaccattgtggcgcgaacgggagggcagaccacaaaaaactcacgccttatgaaccccagatcacctgcaaaaacagat

SEQ ID NO: 23322 - DNA, 913 bp, Arabidopsis thaliana landsberg
ctccatcgttgttatttctctatttccaaaaccaaaatcaaatcttttactaaaaatcaaagctcaaaaacgagggctttatcttttaatctccgacatatttgctttgattccttgcgatgattgtttttgaaaagctaaccaagatatgatggcgttattggtggtggcggtggcggtggcggagggagctttataccttattcgtcgctttgtttggtgtctctctgctcctaattactttggtatctctgatctacaaaactagaaagttcttaatcttattccacatcagatctataaatttgagagtattgtttctgattgatttgatttcctgagagtaatcacttctaattcaaagtcaagatgaagaaagaaacgagaggttgagacatgatgaaaatcaaagtaacttttgtgagtttatgacgttatacaatcgatgtatatttgttgaatttctattgaataaaaatttgtaatttatggcaagggacacatccttctctcttctacctattacaaatgattaatatggacgtatcaaagtaaactaatggtcttcattgagagtgtaatacaaataagatcttcgttacattctttataaaagctatgtaactgacattgtcctactgatggaattgtttatacacaagtgaataaatggtcaaagaaaaatggacaatgtactttggattggcgtttattggtcatgtatagacttgtttattggtataaaagtaccatgtgaatcattagataaccatatggactagacttcttggactgtcatcaatggataacaactatgtctttgattcgctgtgaatgtgtttatagctcggtaaattagcactttattttgtttgcgcattctacaatgatacatcatatggtcataactcta

SEQ ID NO: 23323 - DNA, 512 bp, Arabidopsis thaliana landsberg
  unsure (1)..(512): unsure at all n locations
ttcaatgacaagtggggtctttcaactttcaacgcatcaagcgtataaatacggccatgcgcaaacttatttcgcacgctttctggccaaccactcctgctcattcattttttagctcttgtgcactgttatctgctaagtttttagctttgaagcttcggcttttaaaaacagttttttagcgcttccgaagatgtctgaagctgctaagaaggctgctgctgaaatgaagctgagtcttgatgaagagaagaacctagggtttcttatagcgatgtcgaagtccaacacagaaaagattaccaaggaaattctggaggggctgtctgaagatactggnnnnnnnnnnnnnnnnnnnnnnnnnnnnnnnnnnnnnnnnnnnnnnnnnnnnccctgggagccaagccattcagtttatggtaaatcaactatcaaagagaatcatcttgttaatatgagaggaaggtatttccgggatctgtccattgtgaaggccgacgaaagggaaaaaa

SEQ ID NO: 23324 - DNA, 648 bp, Arabidopsis thaliana landsberg
gattctgtacttacacatgcatcatgctaagaattctactaataacattttcccccttaaaaagatgccgccacgcaccaggctaacggcacgcaagtctacgggaccaattggggtgcctcggcatcaattggctccccagaatgaaagcagcagcagtggaagtaatgaccccatcggagatcttgaagcccgagtgagtcgacttcaagcggcgcttcaacacaggaccgatgcttgggtcgccgacggagatagaatcaatgaactgagaagggacatccgtcatctgcaggatcagctcgctgatcgagacttagcacttgactgggccgtacagtctcgtttgctaatgtgtgctaaggaagcaagggctcaggcccgaattaaagaacttagctcgactgtcgacaacctgcaggtttactgcaatatgttgcatgaggaagccatatactatactcacaattacaccctagtgagcctgcacaccctgctgaggcagaacccggaccatctcacgttgcgggacgcgcgctgggtggggagttgaccttttgagcccctcctctttgaggttggtgatgtctgactccaacctgacgatgaggccgccagagtgatgaaacaggaataatgtgtataaag

SEQ ID NO: 23325 - DNA, 820 bp, Arabidopsis thaliana landsberg
aaaaacataattattttaggtcgtcaatgtctaatctcatataatggtgcttcaagaattgtattcaatcaaacttacccagagattaacatggctcgcatcacgtaagaacgtttttattttcattatttatttactaaaaagcgtattataaaaaataaattaatctaataaattaatttcttttttttttctacttttggagggctcaattccttgtacggatgcaaccagctgagctaggtgaagttgttgatgagaattgaagccatcaataccagaagcctttctaccgaaaaagtgtgcatggtgctttgatgtaataaaatattctgttaccttatatgttttttaaaacatgtgctgttttgacttgataaattagtcatcaaaccaatgatcgtatcattcgacttcatggttttgatttgctttaaagatgttattatcttatcaccattgatatcctttatatgtttagatttattaacgaaccaaatactcatatatcttcgattggtctaagtagttcgctttgatgttctattttggtattattctttttatttcggctcacgaaaaacgactgtcttaatgaaaaataatattaagaatatattattgtatttgtagagtttccgtacgtatattcattccagcaaaaaacaagcaaatatttatacaaatattgatcgttgagatttttgaatataatgttagatatgtactgtaccaataaacagaaatgtatgatatgtttaaaaaacaccaaatctgctatatcatatgtttagacattaatacgcgaaagatgtggctc

SEQ ID NO: 23326 - DNA, 908 bp, Arabidopsis thaliana landsberg
  unsure (1)..(908): unsure at all n locations
ttttccttttcttcggaattttcttctttattggctctttttcaccttcatctagggcttcagttacccttttccttttttggcctccggacctttgttcagattttcgtagtctggataatcgaaacccaaggcgtccaacactcgattcagccttcgttttggacgggtgccgaacgtgcggtcaacnnnnnnnnnnnnnnnnnnnnnnnnnnnnnaagtatttcgttgcacatcacttcaatcgtatccagccactcttggcaaggagctttaaagtatttcttaaatttgaagtagtaaggcaaacgtacaagttcaccttttttcttttcccctccagcttcggcatctcccactcttttacactagggaaaaccttgaaagccaagaatttctggaccaggtcccttgtactgatattctctgcaattattttgaattcatacattgctttttgagtcggaccctctggtaacatgtggcactgggggcgggtttctccgaagattagttcaagtggactttgcacaagcttttccttatcgtcatcaaccttgacatagaaccactccgatttccagcctgctgcccatttgcttcggtagctgatcacaggaaacttcgtagttttccgataagcaaaattatagcaaccaaaattgtcatgtaatccatcctttctagccttcgtctgatagtgcagctcgtgaactcggcaaaagctgtccgcaaacggctccaccgcttggcttcggagtgcccagatataaacactaagcctaacgatagcgttaggggtcagctggtgaaaatagataccgaacctcttcagtacctctgcaataatcccatgtagggggaatcttaatccagcctttaggaagctcttgaaaataacaatttca

SEQ ID NO: 23327 - DNA, 3213 bp, Arabidopsis thaliana landsberg
  unsure (1)..(3213): unsure at all n locations
attcacattcctgttgggattgctggtccattgttgcttgatggttatgagtactctgttcctatggctacatccgaaggttgtttggttgctagcactaacagaggctgcaaggctatgtttatctctggtggcgccaccagtaccgttcttaaggacggtatgacccgagcacctgttgttcggttcgcttcggcgagacgagcttcggagcttaagtttttcttggagaatccagagaactttgatactttggcagtagtcttcaacaggttcatctttttaaccaatattttcccgttggatttgattttgttgacttttgatttaagatatatttcccagtgaggagacttgttcaactaaatttgataggaagcttttacatcaagtttgtgttgaaaatttgcattgaaagtatttgtgaagtgttttgatttaagatggagaattttgcaaggggattttactgaagaagagtgaatttttggatgcaggtcgagtagatttgcaagactgcaaagtgttaaatgcacaatcgcggggaagaatgcttatgtaaggttctgttgtagtactggtgatgctatggggatgaatatggtttctaaaggtgtgcagaatgttcttgagtatcttaccgatgatttccctgacatggatgtgattggaatctctggttagtttccttctttgtgtgattgatctgatttaaaaacttccctatatcaagcttagtgtcatcttgagacttaaaactctagttgatatttttgatgctatcttgtgaaattctgagaaccgcacagttgctaatatatccttatcataattcttcaggtaacttctgttcggacaagaaacctgctgctgtgaactggattgagggacgtggtaaatcagttgttgcgaggcntgtaatcagaggagagatcgtgaacaaggtcttgaaaacgagcgtggctgctttagtcgagctcaacatgctcaagaacctagctggctctgctgttgcaggctctctaggtggattcaacgctcatgccagtaacatagtgtctgctgtattcatagctactggccaagatccagctcaaaacgtggagagttctcaatgcatcaccatgatggaagctattaatgacggcaaagatatccatatctcagtcactatgccatctatcgaggtagttgatcaaacctctttctctgagctcacttataaagtttctgaattcaagagatcttgattatggtttttgggtttggatttatcaggtggggacagtgggaggaggaacacagcttgcatctcaatcagcgtgtttaaacctgctcggagttaaaggagcaagcacagagtcgccgggaatgaacgcaaggaggctagcgacgatcgtagccggagcagttttagctggagagttatctttaatgtcagcaattgcagctggacagcttgtgagaagtcacatgaaatacaatagatccagccgagacatctctggagcaacgacaacgacaacaacaacaacatgatctgaatctgaatcatcatcctctcaaagaaggacaacaatccaaaacaagggcaggctttttacaacgcattcactcaaaactcgctggtggacagattttagccatgtgcgtatgcgtttgcccttttgttaaataaaaaaactatttgttttgtttgtttgacttgatatctttttttgggattgaggattgagagagatagagagattttacaaactttctctctttctctctttctctctttctcatggataattcgtgtctctttgatttgtctaaggtttgtctttgtttgttaggaagtggtctatatgaacgaaaaatttgtgtatggtgcagttgcgtttggggacatttttgagattttttctctgtcttgtttcctctcttcgtttttattgtctgttacatataaaatatttctctgtatgatgctacatctctctctctttagttgttgctgctacaagatacggatcttctttcctccagaagaatccatctatataatattaccatctatgtgttctactagacttggactatattttaatggaaaagagaaaaaaacaaatcttttgttcactaggtcaagtgatcaatagctttcgagacttatatgtttgcatgattgggattcaaattacagaattatatatattatatactggtcttcagtttgttagaaatctcacattgaaaatgaaattcaaaccaaaccaacacttatatatggagtataagaaacgggctaactcatttactaatattttttttttctaacaacaaataaaaatctctttggacttgaatcctcgaaaacaattcacaataaacaaaaattttctatcgacttgtagactttgaatcggtttactccaacttcaattgctaaaatatcgacacatatgtagatgtccattgtccgatgatgtttataattttgacaaaactcgagtcgaaaaagtagttttttttatcagaatttgtacagtgttttgttgtgttagagtcgttgttctattaaaaaaaaaaacaaagaaaaaaaaactctattagtttgtgtttcttgacactaaacttgatgtaacaaacattccaatcaattgtagttagacactactcactagtgaaaagtgtttccactttgggatggataaaccagagttggtagattcttaacaagttttcattcagtattcccctatgtttcattttaaatggtgtttatcaaatgcagacaaaacatctatcaaattgaattgagactcagcccatttgttattgggctattcttaagctgtacttacacaaaatctccaaataaactgttaacagtaattttaaatttcatgggccacaaacgctgttttgttcacgtcatcctgtcgaaattttttcttattcacgtgggtgggtctctacttgggcccaaatcctcgacaataactcacaaagtccataaaggttaggaaacatgtgggcgtttatcttctcgagccttttttggtaattcgcgcccattgagatattgtattagttcgtaattcaaaatgtcatcttctttttcaataacaagggaactctaaccgaagtacaaactaagttcagaatccatagtacagcccatcaagcattttcaccatttaatgtatgcaaattatctactta

SEQ ID NO: 23328 - DNA, 588 bp, Arabidopsis thaliana landsberg
gctgatgaagacgggagccggcgcgggcctgctcttcatctcgcccctcgggaaacacctacgctacgtgctacgcctccatttcccggcgtccaacaatgtggctgagtacgaggctctggtcaacgggttgcggatcgccatcgagctaggggtcagacgcctcgacgcccgcggtgactcgcagctcgtcatcgaccaagtcatgaaaaactcccactgccgcgacccgaagatggaggcctactgcgatgaggttcggcgcctggaagacaagttcttcgggctcgagcttaaccacatcgctcggcgctacaacgagactgcggacgagctggctaaaatagcctcggggcgaacgacggttccccggacgtcttctcccaggatctgcatcagccctccgtcaagatcgacgacacgcccgagcccgaggcaccctcggctcagcccgaggcaccctcggcccagcccgaggcaccctcggttcggcccgaggtacctcggccccgaggccgagcactgcacgtcgaggaggagcagaacggggcacgcatgatcgaaattggcagacccgtacctgcaata

SEQ ID NO: 23329 - DNA, 478 bp, Arabidopsis thaliana landsberg
ccacatcaaacactagagcaaacataggccaacggattctaaagggcagccaagcacccccgattggtagttatccagaatcatacctggaaagtacctacggccccttcctaacaggagatgacactccagaaattaaagatgccaaaacaggcagagcactggaggtcagggacaatgcgcagaatatatactagaggtgaaggagaaacatagacaaacttctatgaaggagacaaaagtacccgcgaagtcaacgccaatcggagaggctagaccaagggacatagaactcgggaggcaaaacaaaaattcaggttaaacgaatgatttgtcaacagctggatgtggtggaagacggctcggataaagaatactagattgctgagatacagtacactgagcacaaaatagtaccatgtttctattactaatagattctaatctaacactataatattgatcagcataataactc

SEQ ID NO: 23330 - DNA, 1228 bp, Arabidopsis thaliana landsberg
tttataaattaccaaaataacacaagacaaaaaaacagctatattatatataataatattatatttatccttctctttctaactcactctaagtctttccctctctccactttctctagtattttattctttcttctctcaatctattctctctttcgtttttctctttctttagcattttatttgtatctccacgtcacctcactttccttttttctcagaatcctcacacattttttttttcctaactagtgaaaatgatttttttttgtaaaattgttaggttataaacctacaaaatgcaaactctcatcactttcttttaatagattcgcgttgcatccgttaacacataacaaacaaacaagaaggataaagtagatttttcagataccacttatgttatctgattgcttgggttgtcaatgttgtatcttagagtatagtttttttatacatccaaaatagtatagtacaatattttatttctatacatccaaaatagtacaatatgtttttacttacaaacactatttactattttataaaatcaaatccgattttaaaaattcaaactatgttgtatgtagaaaaaaatataaatttttatctaataaattttagaattagaatctcttttttggaaaagatatataacaaaaacatacaaatgggtgaaaactaaacgagatgttaataaatcatctctcacaaactactccacaccaaaattgtcttttctcaatccttatatgatactttcttaatttatatatatatgatgttatattcttaattaaactttgaattttggttatatacctaattcacccttgatataaatctaagattaaaacaagaaaaaagtatgtgaaaataaaacgaaaacttgttattattaataatggtacacgtacatatagttcatggttgagaagataagacaacaactaatgttttgagatagtgtcctttacaagaagaagaaaaggcaaacgtctgacattttaccgatagagacccatgaaacccaataattttgtacaagtgcagtgtattgtacttatatctaatacttttagaatttaccgttaaatgtttgtaataatgagaaactgtacttgagtactactgcgccactgacgttaaagaataagttgtcttgtcttatatttgtcacaaccccactcttttcttatgtgtgtggatttgaataattaggaaaaca

SEQ ID NO: 23331 - DNA, 582 bp, Arabidopsis thaliana landsberg
gattgcaaataattaattggatattagaatattggttaccatttatagcttaataataagaactggtcacagattatccgtatgtactttttaatttcatgaaaatatagaattatataaaaaaaagaggaaatggaatcgttgaccaattttgaagcatgtgagtaagaggtagtatttaatatgcatccaaagtattattaatctatatagagagtaaaaatgataatgtgataagagtttaggaattggaagaagttatatttactatcataatagtaagctttgggttacatacttacatatgtttatatagtaaaatggtttcctaaactaagatagaactaaatctttacatatcaatataataaatatactatatcttcatattaacttctggatcttctatatccttctacagaaaatttgaaatcataaagagatagtattatatataccaatgaccacaattgatgaacaatgtacaataccaaaatctgaattctaacgaggcatggcttcttcatcctacggctatggtgtcgtgtatctggcggttctgttaccatgtctctagtccct

SEQ ID NO: 23332 - DNA, 771 bp, Arabidopsis thaliana landsberg
caaaaaaaaaaacacagtctatatgcatcagaccaattatggaatctcccaaggaacaaaaacatgctcattcgtgaatacagtatccaaggtggggaagttaaagactagatcttactcaggaattcataaacactgaggtcaaaatcgaacaacatcacacaaaggaaacagctctcttggatcaagtaacttgtctttgctatgtggttgcgttgcttttcagttattaccaggagccttctgtacctactgttgggtttgtgaacgccttggcccctttataaagttttaaatctagtccattaaggctcatttatcgttagacttactgggcctgtataggcccgaggacagatgttattttgttatgttgaaatcgggagttcaaattttcgaaatcttccgtattgcaagatacacttgtcctgttaaaatagtacacttgcaagatttttttgttatatcttaaatattttggttttagttagatgtttgtggatcacctatgatttgtaaggttgaatccattgggattggtcaaccatacttttttcggcaatacctatatattaataattcatgtttgtgtttcaatttaactaattttagttaaggccataagaaaatactaacacactaatagctatatataatgcattatcgatgtcatcaaattcaaactggagatctacattactcttatatgaatcgatatataatttttatgcccgtttgatgcacatattttggattgaatgtagcatttga

SEQ ID NO: 23333 - DNA, 505 bp, Arabidopsis thaliana landsberg
gagattgtagatagtagagggtggaaaatttggcctttcctaaataattttatgccaattacttatgcttgaaaaacgagtataaaccatgttaaccccttttcaaagcttttaaaattctttgtaaatcattctatgccaattacttatgctttaaaaacgattgtaaaccatgttaaccccttttcaaagcttttaaaattccttgtaaactattatatgccacttacttatgcttttaaaacgattgtaaaccatgcttctctatgtagtgacagtgtttgttgctatttatcttatcaggttataatgctagaattgtattctagcattataacctgtttgtggcttgtgaaagttgacaaacaatatgacttgggaatttgaattagacattgaaatggagtttctttagtgctcattgatgagcacattacctttcacgcattggttgatattcttgtagaggattttcaataaatagttcaaccaattctttgaagct

SEQ ID NO: 23334 - DNA, 3437 bp, Arabidopsis thaliana landsberg
  unsure (1)..(3437): unsure at all n locations
tgttgttttactagctacttctagtttagcatttaagtcatcattaacactctttaaagtagcaatgttttcatgacaagaagataattcactagaaagcacttcatttcttttaacttctaacgcataggatttttgtgcctctacaaacttatcatgttcatcatataacaaatcctcttgcttttctaaaagtttatccttttcattcaaggcatcaatcaattcattgattttatcaattttatttctatccaatcccttgaacaaactagagtaatctatttcatcgtcactagactcatcgtcactagaagaatcataagtgacatcattacgagtgattaccttcttctctcttgccatgaggcaagtgtgatgctcgttggggaagagggatgacttgttgaatgcagtggcggcgagtccctcattgtcggagtcagacgaagagcagtccgaatcccactccttgccaagatgagcctcgccctttgccttcttatagttcttcttcttctccctcttgttcccttgatcctgatcactatcattgtcgggacagttagcaataaaatgaccaagcttaccacatttgaagcatgagcgcttcccctttgtcttggtcttgcttagctgccccttgcggccttttagcgccgtcttaaatctcttgatgatgagagccatctcttcatcattaagtccggccgcctcaatttgtgccaccttgctaggtagcatctccttgcttcttgttgccttgagagcaagaggttgaggctcattgattggaccgtttagagcgtcgtcgacgtatctcgcctccttgatcatcatccgcccgcttacgaattttccgagtacctcctcaggcttcatcgtcgtgtacctgggattctcacgaatattgtttacgagatgaggatcaagaacggtaaaggaccttagcattagtcggacgacgtcgtggtccgtccatcgcgtgcttccgtagctccttattttgttgacaagggtcttgagccggttgtatgtttgagttggctcctcgccccttatcatcgcgaaccgtccaagctcgccctccaccaactccattttggtgagcaaggtagcgtcatttccctcatgagagatcttgagggtatcccagatttgcttggcgttatccaagccactcactttattatattcatccctgcacaatgaggctagaagaacagtagtagcttgtgcattcttatggatttgctcattaatgaatataggactatctgaactattaaagtgcattccactatctacaatctcccatatactaggatggagagaaaataggtgactacgcattttgtggctccaaaatccgtagtcctccccatcaaagtgtgggggcttgcgagtggaatggaaagcaaatgtgaatttgagctttgcggaatacgagagtagtcaaaggaaaagttagaattaaccggtttcctttgctcgtagtcgttgtggtcgtcgtccttttgggaagaagtagactcatcactgtcgtcgtagtagacgatctccttgatgcgccttgtcttcttcttcttcccttcctttcgtctatgacccgagccggagtcgataggcttgtcatctttgagctcattgacgaaggactccttctccttatcgttgatcacgattcccttccccttaggatccatctcttcgggcggctagtcctttcttgaagagaacggctccgataccaattgagagcactagaggggggggtgaataggtgatctgtaaaaacttaaacttataccacaaaaacttgattaggcgttcgacagtttatgccaagtggctagagaggagtcaaaacacaataagcacgagaatccaatcacagagatgacacagtggttatcccgtggttcggccaagtacaaaacttgcctactccacgttgtggcgtcccaacggacgagagttgcactcaactcctctcaagtgatccaatgatcaacttgaataccacggtgttcttgcttttcttttctcaatcccgtttgcgaggaatctccacaacttggagcctctcgcccttacaaaagatgttcacagagaatcacagagcaagggagggattagcaactcacacacgacacaaagatcacagcgaatacgcacacacaagacccagacttgagctcaaaagactagcacactagaacagagctcaaatcactagaatgtcgaacaagtgcgcgagattgatgtgtgagtgatcaagagtgctcaaggaatgcttggtcttctcctccatgcgcctaggggcccttttatagccccaaggcagctaggagccgttgagagcaattctggaatgctgatcttgccttctgtcatcgggcgcaccggacagtccggtgcacaccggacactgtccggtgcccgatctccttcctaaaatggcgcacgnaccgttgcagatctgggagccgttgcgcaccggacatgtccggtgccccttccgaccgttggcccggccacgtgtcgcgcgcagattccgcggccgaccgttggcccggccgaccgttggctcaccggacagtccggtgcacaccggacagtccggtgaattttagccgtacgtcgccggtcaattcccgagagcggccagttcgctcgagccagcctggcacaccggacactgtccgtgcaccaccggacagtccggtgccccagacgtgaaacagcatcttggctgtacacagccacctcttctcttttcttcttctttctgtttctgatacttggacaagtatattagtacacaaaaccaatgtactaagacttagaaacatacctttgctctagattagctctttgttcatccatgagcatagattcacatttaagcacttgtgttgacactcaatcaccaaaatacttagaaatggcccaagggcacatttccctttcagcaacccttgaccgaagtaggtcaccacaacgtggagtaggcattggccgaaccacaggataaaatcaccgtgtcacttgtccatctttctattgtgattgttttcttccatagagttctcagatattcacttgcgctattattcctaagttcaatacatattctaaaggaacaatcaagtgaagagttctgttctctctacctctattcatatcaccttggttttaattaatcccactaacattctataaaccaagtttgtgttgtttagacttaattttttataggtaaacctattcagcccctctaggtgcttctcctttggcggcagagttgcaagccacaccataaccgacattttacatgtcacctccacttccaatgtatgatggtttatcagctcgaagcagtccctaatgagatcaaagctcaatatcgtcgtttggtggcaatcagtagtgat

SEQ ID NO: 23335 - DNA, 2164 bp, Arabidopsis thaliana landsberg
tttccaaacgaagagacctaagttactaacatacgtatagatagttttttgacttttgagatatctcgtaaaatggcctttaaaatttgatggtatattttggtccatttcctagaacataagttcctctaaaatcgtattaaatcttgcacgtttatctcttgcttgttcaaactttgattcaaagtcttctgtgttcactaattaatatcaaaataagcacatattgatacaataccatggtaacccttattagagctagcttgatgttctcataaatcgaaatcgaatcaatacaaagatcattagggaaattcaccatgtccattggttgcaaaagaaaaaatttctaaacctacaaaataaggctttcaaggatccaaaaggctaccattatttaagtgtggtctcaagggaaacgtcaaaatctaatagcaaaattcactgtaaaaggtatagagaacaacacaacacagagaattgcttaaactttattcttattaataataaactcttttacaagtattatctcttttcttacttgatctaatctacccaaaaaatcagaggcgactgggaataactaagccttaattctctcctctgtttcttatcactaacccgtgaagaccaagagaactacacactcaccttcaagctcttacaatgctttgaagtaatgtatcaaatattctagagtgctcaaggcggctccctctttgtcctagaatacttatacctattctccagaaccctaaacctaggatctccgagattctcttgatatggaatcttccttgtttccaagcctatttctttccttattcttcgagatgatatcttttatatcttctcgatgaatcttgtctttgataccacgccaagccagcttccattcttggctctccacatcatccgccacaacttgccacgtctgctcttgcattcatgttagcaactcaagcgtctgatgcaactcgatgcagcttcctgaaatccatcaacgttttgatcgccatcagctgattgatcaaactctacatcttcgggcatgattcgggttaagaggcagcgagaagcccttgtacatttttgatggaactcatcatactataagccatacccctttgtaaggccaaaccaccaccaccagtaattaacccctgtttcaagggcattcaaattaggcatgagatacatgcaaattcacatcgtaactaaatgaaaaagaaaacatggccttggagaattctccaaagagcaacaatatatgagaaaacgggttcataaaagatccataagaaaacttaaagggaagacaaaaataaataaaaactaacatgagatgtattatagatcccatatgaaatgtctgatcatgacgctagagaattcctattcatgcaatcagaatcaagcaaaaacttatatttaaaatttatatggctacttttaaacaaatttcatagaaaaaaatgttttgttgtaagtactaaaattttcctatattactcaacttatatatgaataatgcatatgttgaaaagaaaaagctagcaaaaactcctatttaaatttatatggctatctataaacaaaattcataaaaaaaatttcattgtaagtattaaaactgtattatattactcaacttatatatgaataatgcatatgttaattttggtaagttaatcaataaacatataagaaaattgattttcttatgtgtagtcaaaatattaatgacatttctctaaattacctttattaatttttggtaaccttattaaattgtgtattcaaatctaaggaagtattttaatgtattttgatacttgttacctataaatgtgatattttgtactctcatggtcgcgagagaagttgaggaaaaggagaaagttgtataataattgttgagataacatattttggtataccgatctttggatacgaggttatggaaactggcaacgttatgaatgcacaacctgaattatcaggcataagtaagaaattttgactttttattttatcttattgaaaacttgttttggttataatgttttggtttttgttcggcagttgatggatctaagagctatatgtacgagcagttatgggaactctgtgcgggacctttgtgtgatattccaaaagttgg

SEQ ID NO: 23336 - DNA, 694 bp, Arabidopsis thaliana landsberg
gaacaaaataatcatcacatatctcgcaagagtatgcactatttttgttgtcaacttgttgcttacatactggcggaggaaaagtttccaggtggaagagaagaggtaaaggagatacggtgggggtgacgagatatccttatgatatgtgggaaacccatacaacctttatggattacgaaaacacattggatacagatgtatgtgggatcaagcttcttaatcattgcacaaatattgcaaactgtagaagcttgtgtaggaaaaaaggagagagggtgggggtggctttttgggtggtctacaactaagggtaccggcctcattgcacatactggattcatactcaactcgcaggtagtacaatgataatacatatttggtgtatatactttacagcaactacacttctgattacttgaaccactgaaaagtcgaagagaatgaaaagggtgggaagggtgtttgatctcaagtggagactctacacattctttgtggaactttccttgacactggagacatgtaaaatagcttgtgctgaaaatattcccattacatgcacgacaatcgaatttgccatagcgaaattctttatggttgcaccaaaaaagagggattacagggaagctacagatataatctttgtcgcaatcaagcaacgactcgccttgttgatcatgcttttttgtac

SEQ ID NO: 23337 - DNA, 316 bp, Arabidopsis thaliana landsberg
gacctgggtgtcatcaccggcgtactagggacaatctgatccccatcgccatcagacaacaatacaagatcaaactctatttcagcaccaacgagtgtcgagtccggattgttgggaagaactaggtaatcatcccaccaagtcccatcgtgagccaactccgactcgatcaacacgagatcatccatgaaaaaattggggataggcgcctggataagctctacctcctcctcaaaatcattcacgagtgatcccatcacccccacgccttccatacctgtctcattctcaacaccatccaaactcgcaattctgt

SEQ ID NO: 23338 - DNA, 1290 bp, Arabidopsis thaliana landsberg
tgtaatgatacctaaacgatatccggttaattcgtatagttattactaaccagtcggtattctaaacgattgagttattggttatgtgagatgttatttaaggaagttgcttaatccattagttgaccataaaatcactaaaacgaaagaaaacaaatgttcaactaccatcttctcaacgagctctcccctctaatcacctgtacgagtccttggcttgaaaaagtacaaaatattccaaaggggcgattcattcgaactaagagttatcatagcaaataaaccgtaatatatatttttttttttgcatgttcctgattttaacaatttttcagtttctgaataggggatgaggatggaggttacaatccaccgacggtttttgccttctacttcgacaagatctctgaaaataaatggatcgtgttaaccaacttcaaggttatacgtaattctgatcaagtcaagactacgacggctgaatatgggatttacttgatggacgagacggttgtaacatccgtagatccgaacaccgctatccagttcaacaatttcacttccttcgacaacatattggaggggactttcgataccgactaactggtcggtaagtctatgtttattaacttatcaattgattcttattaacaacatttttgagggtagggtttgatctaaacttacgctgaacgtacagatctcgttggtgctgttgttgaagttggaattctgtctcattctggtgatcccgacgatggcgtagaggggatgatcattccttttaaattaatggacagatagtaagttttccggcttaaattcccaaaaatattataattttgtgtgtttcaaattgttagatgttttcctgctgcagcaaagaggttctagactgtgaggccactgggagaaaggcattggaatttgatacctgttaccggcgctatggtcatccaaaaattgttgtgtcgcttgctcgatggagggtggttagggagcctgaactggttggtgtgcgcaaaaagaaggttaaaatcgtgagttatggtgcagtttcatctgtttacctggaaccatcgtttgaagaagttgaagaaatcaaaatggtaagaattcatcttagatttacacgtatggttcacatatgataataactaattagtatacgtaatgatgtcatgcgatgctgccaagaatttaagttagataattgtgttttgattactgcaagctttaacatgagttaacggtaaatttgaatccggaatgctatatttatgtgttgag

SEQ ID NO: 23339 - DNA, 618 bp, Arabidopsis thaliana landsberg
tcagtctcactaatcgcagaaagctatggtagccggaaaacgaaaatccgacagaaacccaacaaatgtatccgacaaacttggtctaaaagacccattactgcgccgtctctcttccgctgccgccgtaacaaactcttttctccaagccaacgatctcttcctctcaccatcacagaccctccgccttgaatccctaatctcatctctcccaatctcaccttccccttcttcctcctcctccgccatcaccaccaccacgtggttcaaccgcttcttaacctccgccacagaagacgaagatgatcctcgctggtgtctttatttccgaatgtcaaaatccaccttcttcagtctctactctatcctctcccattcttcgcttccttccttcgctgccacaatcttccgtctcgctcacggtgcttcttacgagtgtctcgttcacagattcgggtttgattcacttcccaagcttcacgctctttcttcactgtctgcaaactcatcaatgagaaattaagtcaacaacttgatgatcctaaacccgatttttcacctaatctgcttccgaattgctacggtgttgtcggattcgggaggtttgagggtaaagga

SEQ ID NO: 23340 - DNA, 961 bp, Arabidopsis thaliana landsberg
tacggtaaaacttttactacccgtcgggtagtctcgggtggtagcgaaccattccgagctattgggacaatcacgacatcgtcgcaccttattcatagaaacgactaaccacattacttattacaagcctaatgtaacctaatactactcgtaataaaacctactagcatgcaactaacaagcaaaggataatcaagccgaagcaagattaaccaacaacaatcaatcaatcaataatcaaacaacctaatatgattgctaacaatttaattcgtaataaaaattacgaacaaacaaacaaacaacaattaccgcaaataaatacgatactaaatcctagcgctaacaaacaatcaagcaaaataatggctaacccaatgtctagcctaagcacacaaatatttcatcctaaactaaattaagtatgaatgcaagatctaatcaaacaaccaagacgatcttacgtaaaaacgttgatccgactatcaacaataaatgcaacattatactaagtataaaaatgcaacctcatgcctacgaatcataaccccaaaataaaacctagtcgtgtgctactacacacgctacggtactcaccttggccttattgtcgagagattaaaattctacccttgaccgcctaataattttgatccgaccaagctatctccaacgcgtactaacgatggatctaagcgttggaccgaaaaccaaattaagcaaaatattctaaaaagaataaaagactaagggcggaactacttaccttattacccgactacgactctcgactcgaccaacttctacccgactcggactccgacgaactaactagctatctaacggtttaagctaaaggttttggtgtgggatggtaatgaactacaagtggaatctcgagggtataaataggtttgggaaacttggagagcaagttacgttacttggagtgccagcggag

SEQ ID NO: 23341 - DNA, 1337 bp, Arabidopsis thaliana landsberg
aatcgagtagtgtaaaggtagtccgggttcctacaatccctatctgcttaataccataaatcgcaaaatctagagtacggttcaggtaatttggaaaatacagaaaaatttaggattcacagtttacttcaaatatgtccatgtaggatttctcatttaactatttgcttaaaagcaataacttgattagtaaatataaacacatgaaaattgagatcccaatcttcattgagcaaataataacataggtaatgtttacaatgttttagtgatgaatgtgtacatgtataaatctactatgttcaagtggaaagagttttgaacatgtgagtaaacttgtatctatgtactattgctgcagcatcttcctatgtatgagtactttcacgatgctcaaaagatcgctaaggacataaaggtcggttacgccaacgatcctgataagctggctgaagtcacgggattagagaaagtcgcggaacgcaatattgttgctgtgaaccttttctgtcaagaccgttcgcttaaggtatcgtttgagttcacccatcatccttatttcgctactgctgttgttcgtagatcttgaaactctcttttccgttattcatttgttactatacaaatccaattttgggactgaccctatttagttttggaaacaagtgtgctttttaagtttcctctctcagcttttatcatgctttttgctccttttttttttttttaattgttccttttataaatttattgtaaatttttgttgttctaagaagtttaattattacaagaacaattcttgggttcaccattttttaatgaccaattagaatttgacatgtcatatatttaaaaaataaattaattaaattacaaaatctaaagtctagcaactattttatcagcccaaactaaaatataatttcgtttaatcacaaaatctaaactttaaccactattttatcaaccaaaaccaaaatataatttagtttaatcacaaaatctaacacctaatcactattttgtcaacccaaaccgaaatataatttcgtttaattataaaatctaaacctaaccactattttatcaatccaaaccgaaatataattttgtttatttataaaatctaaactctaaccactattttataaactcaaccaaaatatattttcaattatttataaaatctaaactttaaccaccctagaggtgaacctaaatattttaatttttaaatattaaacgacatggcattttgttgtattatgattggcttattaagagaaggtgaacaagagtggggtgaacccaaatatttttttattagactatttaca

SEQ ID NO: 23342 - DNA, 2904 bp, Arabidopsis thaliana landsberg
  unsure (1)..(2904): unsure at all n locations
tccgcaacacttggacttgtggcttcgaggcgaacgaatcgttcgcatgatctcactgccactttggatcctgccgagctctcgcactggatgatctccccaggggaagatgacaccacagtcaccggatgggactcgaagtagtgtcgtagttccgcctcgtcaggatcacagcatacagcagcttttgaacttgtgggtagcggatcttagtctcggacagcacttcgctgatgaagtaaaccggcctctgaacgggcaatgtatgcccttcctcctgcctttcgaccacaatcgcggcgctaaccacctgagtggtcgcggcgacgtagaccaagagggtttctccgtccgccggcggcaccaagactggcgcctttgtaaggagcgcctttaggttgccgagggcttcctcggcctcaggggtccaaacgaaacactcggctttccttaaaaggcggtacaggggcagacctctttcgccgaggcgtgaaatgaagcggctcagggccgcgaggcatcccatgaccctctgtacgccttttaagtccttgatgggccccatgctggtgatagctgcgatcttctccgggttggcttcgatgcctcgctcggagacgatgaaccccaggagcatgccccggggcaccccgaagacacacttctcaggattgagcttgactcctttcgcctcgagacatcggaatgtcacttcaaggtcggagaggaggtcggaagccttccttgtcttgactacgatgtcgtcgacgtaggcctcgactgtgcgaccgatgtgttcgccgaacacatggttcatgcaccgctggtacgtcgcgcccgcattcctcaaaccgaacgacatggtgacatagcagtacatgccgaaggtgtgatgaaagaagtcgcgagctggtcggactctttcatcctgatttggtgataccctgagtaggcatcgaggaaagacagggtttcacacccagcagtggaatccacgatctgatcgatgcgaggcagagggtagggaacctttggacatgctttgttcagaccagtgtagtctacacacatccgtcatttcccccctttctttctcacaagcacagggttggcaagccattcgggatggaatacctctttgatgaaccctgccgccattagcttgtggatctcctcgcctatggctctgcgcttctcctcgtcgaatcggcgcagaggctgcttgacgggtcgggctccagctcggatgtccagcgagtgctcggcgacatccctcggtatgccgggcatgtccgagggactccacgcgaagacgtcggcgtttgcgcggagaaagtcgacgagcactgcttcctatttggggtcgaactcggagccgatccggacctgcctggaggcgtcattgctggggtcgagagagacggacttaaccgcctcagctggctcaaaatgtgccagcgtgagcgttcgcatctggcacttccttggagaggctctccaggtcggcgatgagggcctcggattcggcgaggacctcggcgtactccacgcactccacgtcgcattcgtacgtgtgtcggtacgtggagccgacggtgatgaccccattggggcccggcatcttgagcttgaggtaggtgtagttggggacggccatgaacttggtgtagcatggtctcctcagcactgcgtggtaggttcctcggaacccgaccacctcgaacgtgagggtttcctttcggaagttggagggagtcccgaagcagacgggcagatcaagttgcccaaggcgatggacgcgtttcccggggatgatcccgtgaaagggcgccgcaccggcctggatcaaggacagatcgatctgcagaagcccgagggtctcggcgtaagatgatgttgaggctgctgctctgtccatgaggaccttggtaagcctgatgttgtcgatgacgggatcaacaacgagcgggtaccttcctgggctcggtacgcagtcggggtggtcaccttggtcgaaggtaatgggtttgtcggaccagtctaggtagactggcgtcgctacgttcaccgagcagacgtcctgccattcttgcttgcggtgtcgagccgaggcattcgctacttgcccaccatagatcacgaagcagttgtggacctccggaaactccgcttccttgtcgcccccttcttgttgttgccttggtccttgccaccttctgccgagggcccagccttatggaagtaacgccggagcatgacgcactcctcaagggtgtgcttgacgggaccctggtgataggggcacgactccttgagcnnnnnnnnnnnnnnnnnnnnccctccgggaggctttcgagggttcttgtgttcgacagcagcgacgagatccgcgtcacggctcgcgctttgcttgcgccttcttcttagccttcttcttcgtgccacgctgggcggacgctcggggacgtcttcctgctgccgtccctgagtctgcttatccttccgaaagatggcttcgaccagctcctgaccagaggcgaacttggtggcaatgtccatcaactcgctcgccttggtgggagtcttgtgccccagtttgctcaccaggtcgcgacacgtggtgccggcgaggaacgccccgatgacatccgagtcggtgatgttgggcagctcggtgcgctgctttgaaaaccgtcggatgtactctcgcaaggattcccctggctgctggcggcatcttcggagatcccaggagttcccagggcgcacgtccgtgccctagaaatttccagcgaaacgncttgaccaggtcgtcccagttggagatctgcgcgggaggcagatgctctagccaggcccgggcggcgtcggagaggaacagggggaggttgtggatgatgaggt

SEQ ID NO: 23343 - DNA, 749 bp, Arabidopsis thaliana landsberg
acggggttattttgtatatttctagctgaaccccctccaacaaaagtattatttgatactggtgccacacattcttttgtttctacatcttgggtagaagcacataacatccccatagaaccaatgatcccacctttaagagttaattcagttgggggaaaagtttagtccgataggatttgtctgaatctaaggattgaaataagggggataaacttccccggtagcccagtagtaatgggaactcaagggttagatgtcatcctagggatgaattggctacacaaaaatcaagccactgtcagttgtgacaagagaacagttaggttggtgtccccatccggaaaggaagtaataaccaagttgtacttacctgaactagaagaaggagtctgtcaccatttatcagtagatgacaaggagtccaatccaattgaggcaattaggatactgtcagaattccctgatgtattccctgaagagttaccaggcatgccacctgaaaggaaagttgaatttgccatagagcttatcccaggcaccgcccctatttccaagagagcctatcgagtgtccggaccagagttggtggaactcaagaagcagattgatgagttgttagagaaaggttacataaaaccaagtacctcgccttgggcagccccagtgttatttgtggagaagaaggatggcacgaagaggatgtgcatcgattacagagctttgaatgaagtcactgtcaagaacaa

SEQ ID NO: 23344 - DNA, 251 bp, Arabidopsis thaliana landsberg
agttgtttgcttatgaagattaccatatttgtcgagtattaggattttcaaaccttttttagcggggttcctagacaacgcaacataaagctgaccatgagagaacactggtttgtgcaagtaaagtcctacttgttgaagagattgtccctgactcttatttataggcattgcaaatgcaactgggagtagaaattgtcttctacgcatcttgaaaggaagtctagtgtctgaaggtgttatgttttatt

SEQ ID NO: 23345 - DNA, 380 bp, Arabidopsis thaliana landsberg
  unsure (1)..(380): unsure at all n locations
ttcttgctttgttgtactatttgtttccttttggcaacttttggtataaaacctttttttttgggtaatcctgggatattaaatgcatggtagagactatatcaacaatttagagttatcaggaaggtttgattgattaaacaaaaatgtataagtacaaggatcacaatttctgactggttatatgaaagacacgaaactttggagtgatcttacgaatctaatccaaaaaaactttccctaattctctgacattactctctttttgtaaggcatgaaccctctcatgttgttcatctcagtcagcaacgatttcaactgagagaaagctgatctaccactcctgtttcagcgttttcagaattngaaaagaacattga

SEQ ID NO: 23346 - DNA, 954 bp, Arabidopsis thaliana landsberg
  unsure (1)..(954): unsure at all n locations
tgacaacttcaattgcaaatctaataagttaaactgaagactgattcttagaaagttgcaaaagtagattaaattttcatttgggcatttcatcgaacatctggaagacacttcagaacaaaagactaagaaaactcaaaaccaaatctaaaacatgaatctacaaatcttatgagagcaaacaagcaaatctacactagaccattgtttttcttcttcatcttcttcaaatcttaagccctctcacctctaatcctccnnnnnnnnnnnnnnnnnnnnnnnnnnnnngtaaccctcttagcatgaatagcacaaagattagtatcttcaaacaatccaaccaaataagcttcagctgcttcttgaagagctgcgactgcactactctgaaacctaagatccgtcttgaaatcttgagctatctcacgaaccaatctctggaaaggaagcttacggatcaaaagctctgtgcttttttgatactttctgatttcacgtaacgctactgttcctggacggaatctgtgtggcttcttcactcctccggtggctggagctgatttccttgctgctttcgtcgccagttgctttctaggagcttttcctccggtggattttctagctgtttgctttgttctagccattttgagaattcttgacaatgaaaaatttgaagcttttgattgttgagactgtcgtgtttgattggtatatacagagtgaggttgggatgcttttttatactcaaagaagagagaatttggtccgttagatgtgttttcctctaaacggtcaagattgtttttatctttgctatctgcgtcgtatgttaagtaaccaatcagagtgattctttcagttgtcgaggattctacacgtgggatatttatgatgacgtgttaattattgcgatgtgtaacggtgtttgtgatccaaagactctgagtgagacag

SEQ ID NO: 23347 - DNA, 2046 bp, Arabidopsis thaliana landsberg
  unsure (1)..(2046): unsure at all n locations
ggcatgtacgtagggcactagctcctctctgctagacacgttagcacactgctacatctcccattgtacacctggaccctctccttacgcctataaaaggaaggtccagggccctcttagagagggttggccgtgcggggaaggacaggacggcgcacgcgtaggcctctcgctccctcccgcgcggacgcttgtaaccccctactgcaagtgcacccgacctgggcgcgggacaaacacgaaggccgcgggtttccccttttgtgcctgcctcccttcggctttctccccccttcgtgctccgtctcgcgccgacccatctgggttggggcacacagcgacaatttactcgtcggtccagggaccctcggggtcaaaacgccgacagttggcacgccaggtaggggcctgttgcgtgttgacgaacaacttcccgtcaagttccagatgggtagtctctagcaacctcttcaacccgggatgctactccgtttcgggagtcttgagttcatgtccctcgacgggagctacgacatggcactccttcctccgtcgcgcgacagatcaacccgtcggtgtcagcccgcccggcggtggcggaatcgacgacgtcttccccccatggcggaagagcaacatccgggtttgtcccgtcgccttcctcgccgcacgataaggaggcggggcaaccatggccaagcagaaggcggcacctcgttggctgtcgagcgagtcgacggcgccgacgccccaacggggcacgtcgggcatcgacctcgcgtctgagacgaagacgagcgccgtctccccgcaacacgccaatcccaagcaaacggacgacgccagcacgctcgcgaaaggcttgctgggcgtcgcctcgtacctgagacgacggcgcagtcagtccctgacgtgacttcgtcaccgcccgtcgaccaagaggtacccaccgattcccatctcacgccttttggattcagcctcgacccgccaagcgacttcgctttggcggacgctctcgtagaggcgagtccaaaccctctggggtatcgtatgcggtcaccctgggaccggttgacggacgtctcgacctacgggccctcggggtccgaggaagatgacaagcccgacttctgttgggatttctccggacttggtaaccctagtgccatgcgggacttcatgaccgcatgcgactactgctttccgactgttctgacggtagccgcagcctcgggacgaggactgcgccaagtcgtgaatgtttccacgtcgatctagggggtcctccgaagcaaccatctcggtatgtctgagaacggtgatctccctaggcctgtgccacgcgttgacatcctacgggagctagctgtggtccctgttccggcgggggtcatgacccacagctcgagcaaatccgtggggtgccggccaggctcgacgagggagcaggagcgcttgagccgatccgccgggacgtcgggcaggagtgggcgggccaacctccggccggagaagtgcaccatctaccccagggtatccagcaccgcatcaccgacgatgtcagggtgaggccaccacccgcaatccagtggggtcggtcagaacctggctgcagcagtgatgcttctccgcgcgatgccagagccatccacncaccgaggggcggcgaatccagggagagctcaagaatctcctggaaggtgctgcggtccgacgggccgagagctctgcctctcgaaggcagggtacccctcgaacctcatgccgcaattcccgattcatgcgggaagcctcggtctacaccagcggcacgcgcaacaccgcgctctcgccccgggccgcctcggcaacgagcaccatcaccgcgaccgtcgggcccacctcgacgagagggtgcgccgaggctaccaccccaggcgtgggggacgctacgacagcggggaggatcggagtccctcgcccgaaccacccggtccgcagccttcagccgggccatccgatgggcaccgttcccgacccggttctgacccccgactactatcg

SEQ ID NO: 23348 - DNA, 443 bp, Arabidopsis thaliana landsberg
gcattaccagcctctgcaatcactttaccataactgttgttttcttgatccgttgataatgatctgactgtgacatttctctgaagacacggttctgctccctggctttcgtctgattctactgcgtttgttgccgaagagaagcattgttcttcgttatctgatgtctctgagtccattctgccgtcgagaaacaaacacacaactgcacaatcatccatcttcgaagtcgggtacttaagtttccattcgcgtacagctgaatccaccacgagcctagctgctgatgcccggcttgtagctgatgctacaacttcaactacttcttcgttgcttagcacatcccagacctatcaaaacaaagggtggaatcatcagtacaagaaattcatcttgataaggcttaaaaaacactttaaaagatcagtgtattactccatctg

SEQ ID NO: 23349 - DNA, 975 bp, Arabidopsis thaliana landsberg
acttaggttttgttttaaatgtctacaggtaataagaagacaaagatgacggagagaaggtgaaaggaaaagcgaagaagtagggcgggggtaagaagaagcaggatgtgccacatgtaatagaaacataaaagaagcgaacaaggaaagcatcccgccttattaagacaccgtttgtgggggtggatgtgaagcgaaagagaatgcggaagtctgattgattaactagttgtgtaacacttggtttattgaaaaacatttggcttgttttgcattgtaatgatgtttacttttacaaaatggttaaaaactcggttggtttaactggtttttaggtacatctatgtgtattttatgatcggtcaaattgcataacaggttcaactgtttattttggtatgtctaatctagttaatctggttcaactacgaagttcaaatggttcaacggacatagttcatccagttcgactgattagttcaaatggttcatccggttcgactaaagtccaaatggctcgactaagaagtccgaatggttcgaccaataaagtacatccgttcgactgattatataattgttagcaaaatttactttcaaaacacagatagttatattcaaacatttagattcatacattgtattcaaaacatatatagttagcaaaataaagattttaaacaacaatttagatttagatttatcttacaaacttaaacaaaacaaaggcataatgtttattgaaagagagagtcaggaggatactcgcgtggaggctcatccactctccagtagtaacttcgatcatcaggttcatcgtcctcctcaatgggatttgctccgcgaaaaacgaccaattcggtgacgatccatcgtgctcaacacaccatctccttagtggcagtggaatgtcagcaactttgtcgaaaccatatctcactcagtctttcggatgagcctccaaccgcctgggga

SEQ ID NO: 23350 - DNA, 491 bp, Arabidopsis thaliana landsberg
ttggatgcttttaacaatgttttgccaaaagaatggtggactgggaccgaagttattgtggcgaaaggcttcgcttcaatccacttgggaaaatattctacagccaccacaacatatcttaaattgccttgtgctggtggaagtggacctaacagatccatgccccatctttgcaatggccaggttggtggtatcagttgggttaatgacgaaggttgcttctggtctcttgcacatttttggcaattttcgcacttttgaaccaaatccgttgcatccgaagctgccttcggccaataaaattcttgtctgaagactttgcccagcaaaggtctacatctaatgtgagatccacacaatcctgcatgtatttccttcatcaattctataccttcagctctggatagacacttgagtaatggagagcagacttcatgtttgtataactcaccttctattattacatatggtcgagctcttgcctctatttc

SEQ ID NO: 23351 - DNA, 609 bp, Arabidopsis thaliana landsberg
  unsure (1)..(609): unsure at all n locations
cacaagatacttcacaggttgctgatctggtttactatggctttgtcatttatatcattttgctggactataacggggtctatgttcctctattccgatgtcaatgggcagtaagaggtaatggagttaaggtagaagatggattcactcttgttaacttgaatcaaagtcagatcagttttatgagggatccatacatactaccctcataagctaagcaagtcttatactcaagggaagatgattcttcaaattggtatgtagttatgagaggatctgcaagaaggtacagtaaagaagatgctcaagagggaaacgcagaaattggtcctctgccagcagctattgatatggatgttgacatggatgaatctgaaatatctagaactgattgtgaaggcatttatgtgcaaaatgtagctactttttcattttctggacttgtctagaactaatagaaccgttgtgatctctgnnnnnnnnnnnnnnnnnnnnnnnnnnnnnnnnnnnnnnnnnnnnnnnnnnnnnnnngtaggcgaattcacatgggttaagctaacaaagaagggtggaagaaagaagaaagccacaaaagcccatgatgatgaa

SEQ ID NO: 23352 - DNA, 861 bp, Arabidopsis thaliana landsberg
cttaatccatatgtgtttgaaaaaaacttatgtctattttatcttatgcagatggtgcggtgatgcgttcttggtttgacgtccctgaacttccttttaaagtagtataactttacttcactctcggtctaactataacgtctcagccactcttatttttatgaatcaaaatcactttatagactggaagctccaaattaacacttttggctagttaaaccttatgactcaatatctataattagcaattgttcttgctacttgcttaatcctcttcattccattatgatttagcattatttgcgtttgtcatgtgaaggagatttgtcacgtttggctttttgaagtattacaaatatatagagaattaagtattacacttttatttggtgatatgctttatttttattacaggtcttatattcaagcgggagagacatattattagaagaataaaatagatgtaaatataatttacatcataaaaataagactaagataaatatatgtcttttttagtcatttgatacactatgcattcagatgcagatgtacataattaaaaaataattcaaacgaacacatgtgcattcagatgattcatccaaatgcactatcaacttcaggattgaacatcatccaaatgatgcatctgaatggatcttctggatggatcacccagatgcactatctaactgatcaaacgaacagcacctatatgcgatatcacatgtcgttctgttgtggtcctcattactagttaccacaacgcctatgtaaactctaaaatgtgagaaaatatgtttgaaagtaatttttaaaatttggaagtaaacttttaaataaaatattttaaaaaat

SEQ ID NO: 23353 - DNA, 597 bp, Arabidopsis thaliana landsberg
  unsure (1)..(597): unsure at all n locations
gttcctccagcacccaatcaaaacgttgttggttgtaaatggttctttactttaaaatatttgtctaatggtgtacttgataggtacaaagcgcggcttgtggcgaagggattccatcaacaatatggtcatgactttaaggagacattcagtccagtgattaagtcaaccaccgtacggtctgtgcttcatattgccgtaagtaaaggatggagtatccggcaaattgacgtcaacaacgccttccttcaaggcaccctatcggatgaggtatatgtgacacagcccccaggatttgtggacaaagataatgcccaccatgtgtgtcgtctctacaaagctctctatggtctcaaacaagctccacgtgcgtggtaccaagaattgcgctcgtatcttcttacacaaggcttcgtcaactctgtcgccgacacgtctctattcactcttcgtcacgagcgcaccatactctatgttctagtttatgtggacgatatgctcatcactggcagtgacacaaacatcatcacgcggtttattgctaatctngcagctcggttttcacttaaggatctaggggaaatgagttattttctc

SEQ ID NO: 23354 - DNA, 583 bp, Arabidopsis thaliana landsberg
caattcaaatgctaaagtctgtgaattgtcaacgttcattgcacagattacttatcctatgaatttaagaatatagtacatctgaatacactgtaatcttaaatgcatatatttagtagtctatgcaattaatgtggataacagataaacatatcacacacactgattattacgttacgtataagatcttgggcctggctttgtataagtgaaacagtcagatatcacatgaaggcccattaactttaaggtaaataaacagagaattaagaaacagagagaattcgaagttagagagctacgcgtcgagattctttcttgctgaataaatcaatcacacccgccggaaaaaacagtaagagcataggacttgccggcggtaacggaggaatctgagctctacacaacggacacttggacatttcactgagccatgtatctatgcaatccgcgtggaaacagtgacggcaaatcgtcaatcgcctcatcttctctccttcctccgccatcttgtagacacacggcgcagaaaggtggagacgaatcatcgttttcagcgctctccaccgacggaacgtgaatg

SEQ ID NO: 23355 - DNA, 911 bp, Arabidopsis thaliana landsberg
  unsure (1)..(911): unsure at all n locations
agatagcatagaagtcttaaagaaataaaaacataataacttgcataaatgtacaaatttgtgacaaaataacatgaaattatgaaacacataccatgaatgtctaaaacaaaaaccaaaataaccacataacaaaagaaaaacacaaatacagcttctacgaatcattaaggcgaggaagctcgaattctttccgacaaatctcaaagttaagtgtaccagcaaactctcttaattcatcaaacatctcagcaccaagtttgatccttagaactgcatttttctatcacacaatccatcgaatgactttccaagtgtcaaacattcgatgtattttatcgcgtagattgcacaatcacctggatcgtgattcacgggaccttcttcgtgaccctcttcacctccaccattgcgtagctcttcttacgtctttagaatatattcagacaacatagctgggatcatcttccttaaaaacatgcaatgctgaaccatttctggttcatcaacgatagtgggaatgttgttgtaaacgtagatcctctttctcttcaagttaatatccaaaaccaccaaatgctttttattgacaaaaaaacaaggttaaaggtgtccatattaatgaaccatttcttgtttgtcactgtgtaactgtgagctgtaccattctggtgattcgcataatagtcggtccacttgtaggttttagaatccgaggaaaagtgtttgtagtctttctccatctttctgatcaaatcttgatcaaggaaagcaatgcggtgatttgagtattttaaaggattacacataaaccttttgtggaacatagtctttgcagctcccatgtgctgcaaaataattcaaacaacatttataagcgaaatgtntacaactacacaaagttgaaaaat

SEQ ID NO: 23356 - DNA, 877 bp, Arabidopsis thaliana landsberg
tatatcgataaataattgtgtgtacaattaagttagacaagttcaaaacacataaataatataactacatacattatatcaatatatcatatactgtttttgtatgtgatcatgatagtgaaatattagaataatagatatataaatatacatattatagtagaattgatatttcgagttatagataaatctaatcataaaatatatattaaatagataggaatttatcaaaatgaacatcaaaatcaacaaaaaaccataatcatattttttcgacaattttaaaaagtgttttctgcaaaataacccttcaagtcaatcttgtttgcaagtttaccctccaagtccaaattatgtaagtcaatctcacaatctcaaaattcacccgcaatacagccctcccgtgtagtgatgacatgacattcgatatttttttttgaaaccataagtgttttgtgcaaaaaaaaaccctcaatttttttcttttttgcaaaacaaacctccatgtcaaataaatacaggtcaaaccacaatctgaaaaatctcctacaacatagcccttccgtgtatcgatgaagtgatagtcaataactcattttagagtacgtgcaatgggtttagattttattagtcatttatctaaggtgcaatgtgcaatgagtagagtttatatgcaatgtgtaatgggtagaaaaatttaatagaataaattaaaaagttaaatttttgaatcgataacataattaactaaaaaaatacatagagaaaataattagaaagaaaatgaaaatttggttctattttgtaaagaattatttaatatctggatagtttgatatttaaagtatttgattggtttgttctaaaataattaata

SEQ ID NO: 23357 - DNA, 1167 bp, Arabidopsis thaliana landsberg
cccaatcgtacgaggcacattttcttcttgactgaatcttacacatctcaaagcaagtttaccgaaagcttccatttgcaatcttagattatcgtcactcgcgttgttcaacagtgactggtctatcagttcagtgaaggaacctcgctccagcaacttgccaacataattcaggcaatgggtcacaatcatcatccaaagtgcatcgtatagacgtcaacattcccagtgacaaagcctgttctgggatattcgggctcgatatagctggtcacccgcatagtatgtcagttacacctaattctcctcctataattggtatgctgaggctgaaacaagacaatgtacccataaggtttccattagcatagggtcttcccctgcacgtcctatacccgtaaggtttccattatcagtgtattggcaaacaagaaccagatgaggaaactatagacaaccacccaagagatttagaacgtttttgtgactactcatcaaagatgaaacctcgataccacggactaaattgtcagggtcgtagatcttgccttgacatacctttatcagcacgcttctgttttctatcatacctttgtaacacatgaatctgtctacagtgatcatgtaagtccagtcgaagttatttgtagcttgagtgaggcgaaacgtacggatgggattgtatatacctcgtgaagatgcaatgagtttcctccaacaataagctcccattttcttgaaaaggaatctcctcttgtttcttcctttcctccttctttaccctcaacaaattcaaacagacatctcttagccaagataattgaggtaaagagctttcttgcaaacaatgagacaaagaaagaaggagatggacgcaaatgcaagtcaaagtctcaggcaaagtgaaaacatagataaaagttattgaagcggaaagagtaaaaaagaaggggtttggggtggcatggtacggtgttggcaacttggaagaaggaagtctggtccgtgtggcagtttggtaaatggaagaggtgcaaatcttgttttttttttatgtttatgcgagtctcatagaccttttagctcaaaagagcttccgatctgtcttggtagaatgatatgaaagaagaagagtcataacctgccccagctcaacatatattaaag

SEQ ID NO: 23358 - DNA, 349 bp, Arabidopsis thaliana landsberg
tgcgtttaatacaccacctcgcgaacacgaagactcttacaaagtacatcaatgtaagaaagtttactctcttaacttacaacatgcaaacaaagagggtactagagcaacgtttacaccttcaagctgctccttcgatggctctctctgcagttccaaggtctctcgcaaggaatatgtccacatggccatcccaagtgatgaagaactcactggcttccagatattcgactcgatgaacatcaccggcggcagggaatcttgaatcgccagtaacgagatcacctctctccttcttgctcagattccacacacttctcttgtcctttatgactacaaggatcatggc

SEQ ID NO: 23359 - DNA, 1499 bp, Arabidopsis thaliana landsberg
  unsure (1)..(1499): unsure at all n locations
gaaaccatttgaaatctttttgtactcttcttctctctattcttaatctgtaacaagtattctttggggccgggcggcttcaagtccgccaatctcctctgttttatcctctgcatcgagctattttgagccaactgtaactgggcttgggctttgaaatgaaagcacaacccatcttctcgccacataacccaatttcaatcctaaaccacgagattgaaccattcgtaaaccaacatgacaattttagtgtattctcttatgtgggctttggattggtgttcttaaacttgtgtagagcatggaactttgggctgtaaatttagtgttggacaacttagcacatgtggtgatgtcattgaaaattcaaaagaacattatgatggatgatttgtcaagttgagagaattcaacaagtgactagtataaccaaatattgttctgcacaaaaggtgttcgatcaaatgtctccacttaaaggtagactggaaacgaagaagaagaagatgaaaggattcaaatcttggattttcaaatacaagcttgagaagagacgaattaggaaactacacattcaaggctggatcaaaagagtaagttggaggaactaaaagccaatgcactaaaagccaatgcctgttttagtttaacctatctatcatgttagcaacaccgtattgtcattcattagaccattatactacattttacttcagatgagttcccagaattcagcttccctgaagtgttcttgaactaaccttactctgtgtgaatatgcgtttggtggtcaaacttggttattagtgtccgagctaagacatggtagtggcagacacattgttctcctcttctatcaaaagggttagaaattactccatctgttcctttttgtttgattttttaggaaaaatacacatattaagaaaacatattaaagttgatttcaaatgtattattttttttgtgttttacaatttcctataactttaaaccaatgatattcaatcatttttattaaggtttataattcatcaataataactaataaatgttgtatagaaaacctaaataatcaatctttttgaaaaaaatatttttttttaaaaatcaaacaaaaataaatagagggagtataatctatgcagcttctcatatacttcgattttgtctgagacttcttctctccatcaattagcattgtatgagccaggcaaatatatattaataaatctggtttttttatcaactactaaacgtccaatctattaagaaacaattccatattagaacagtttattcaaaatattttggcatattccgatctcacttgttgggtcaatgtgtcacaaaagaagttagttcgaatgatcatttgaagaattattagagtagaaagcagtttcttgttttcttttggcttagaaatgttttgattcctttagcactagaatagattttgtgtatctatcgagctnttttgtcatactgttaacaaa

SEQ ID NO: 23360 - DNA, 750 bp, Arabidopsis thaliana landsberg
tatacattaaattgctttatattatcacatattattgtttcataattaagtaaaagatatttatttatctatattatatatttatttttgttaaacatttgtatcccgcggccgctccgccaatctatggacaaacccgctaaaacccacaatctatttgggcttgcccgttaggctttctattttatggacataaagcgatgtccaatcccaccctgccgtggtacaatataggctaatctcaaaggccgagttacataatactttgtttatttatatgtattaaaggatttttttgttacaaaataagtgttgttttcaactttagttaaaaaaagaaaattagttaatatttcttgaccaattatgtttaccgtatatttttttattggttgaattggttataattaataaagtctttatataaaaagaggtgagttaaatgagatttttgtgattttttaatcttttgtaaaatcttaaactacaactataaattaaaacatatggagtattatataaaaaaactgctttagattatcatcaattatatgccctaggaaaataatgtcccattgaggattaggatctagtcgttcctgaaaaacacattgctgacttaatattggcagaaaataccattttgaaattatgagtgtgacacataaacccttcaattagctagaaactttatcgtcctgtatggaaaaatagcccatttagttgaggacatgactaacaaaattcatg

SEQ ID NO: 23361 - DNA, 498 bp, Arabidopsis thaliana landsberg
  unsure (1)..(498): unsure at all n locations
cccaaaagcctttggaactgatttttaaaattgttttacttaagctttaaaggacaacaaagtgggtagtgggttcctactaagtctgctagttctggtacaatcttttcccccaaaaacttgcaaatgagaaatatatatggcttgataatgtcaaggatctaataagcatatacaaaagaatatattcggattttttgaaaaataagttgaaagaattgtagattatatcgacatgtattatacatatgtacttaagcagtgaaagagagaaggtgctctaaactgatctaagtttcaaaaccttatttatttttcacatctcaagcagaaactcaacacccaccttaaataatcagttgtttccttgaggaggaccggccatggttcccatcagnnnnnnnnnnnnnnnnnnnnnnnnnnntgcctttggcgttattggtccttcctgcagaaaaaaaaccggtttttatctccacagatctatcaacataacca

SEQ ID NO: 23362 - DNA, 472 bp, Arabidopsis thaliana landsberg
tatctataacaatctcgtaaggtatcccgtggccacataagatatgtttccacacgaagctctcgacttgagtgtccttgatgctggcataagattcggcctctatcgacttagagaaataattggttaagacgagaactaactttttctgcttcgaggcatgcataggtctgattatgtccatcgaccaacacatgaatggatatggcgaggcgattgatgacaagagctcggccggttgatggatcgttggcgcgtgcctttgacatttttcgcatcgtttagagaattttttgcaatctttgatcatcgtcggctagaagaaaccgtggcattttatcttgatggctaaggctcttcccccggaatgatttccacacgagcctccgtgaacttctttcatgactttgcgagcagcttctatttcgacacaagtcattaagggtccggatagtcgccacttgtagagttt

SEQ ID NO: 23363 - DNA, 606 bp, Arabidopsis thaliana landsberg
ggataagtggtcatctgcttacgatgtgaggacgatactactatcgattcagagcctcctgggaggttttctatggtgcataacttttgatttcttgttagccctttttgttggttaatccaatatctgatacatgttttcgttgatcagaaccgaacatcagttcaccattgaacactcaagcagctcagctttggagtaaccaagaaggtaaacagacaggggatttaacagtcgttatgaaatcaaacttctttggagtaccacagttatgagtttcttagagtttcttatgtctcttttgtttctccatacgcagagtacaggaagatggttgagaagctttacaagcctccaagtgcatgatttctgcaagctgttctgattcataaatctccaatgcctctgatgatttcacataaaacgatttttcagaagaaaacactgtcattcatttgctttattctttgtttttgaacatcagaagttctatctgtaacgttaccttgagttcaaataatgagtagtatttcagagattaatcaaaaggagaagatacttattattattcatctaaaatggaaaacactcatattaaagtacaat

SEQ ID NO: 23364 - DNA, 558 bp, Arabidopsis thaliana landsberg
gtgaaggcaaagagaagcaaaaaaagcactaaccagcgttgggttgcctccaattcagagacgcgatgttgaagtgacactggattccaacgtgcaagagacgaagatacttccgggacagaagcaccttgtaacctcagctggctagccatcccatccaccaaagcctgatgaggagaacagatgagtgtaatgacagcggttcatgcaatgtaaaaatcaagctaaaatacatcacagtacctggaggttggaaaagaacgaagggatccccaaatcaggagagatcagttgataaccaggcgtaaggccaccacccgaagcagcttgcaacaaaccagtaggaatcagctcggtgccttcaacagagccaaacactcggtcagcggggacctgccctctaaagcgactccctggtccaaggcttgggctaccaccatacagccagagtgtggaggagatccgcatgaacgtccatggaagtacaggagggagacccgctcgggcacctcgggggctgggtcatagtttgactgccacttgagccggatcatcccg

SEQ ID NO: 23365 - DNA, 565 bp, Arabidopsis thaliana landsberg
catccgctggctctgacagtaggtcttctggaaccatatcttcaagagtctgatcaaagtttgccagggacaactcttgtagaccaatgagggcagacagagcaggagaaggaactccactactttccccactagcgacatactgccgactgttcttccgagtcaaagggacctcatcttcttcctccccgacgttttcatcagcaacacagacaacacacccattggggtcagcagcagatggagcacacccattggggtcagtagtaggtggagcacccccattgggtcagcagcaggtggagcacccccattgaggtcagcgtcagtaaattcaggaacagacacttcttcagcagcaggaaccgaagaccaacatcccgatccaaactagatactcgccggagacgtctctttttctttttctgctcgtcagcaggaggatcaagttgattggctcgggaagggcgtcttgggcgaacactgacaggcttctgaatatcaaggttgtatcagtttctaggggaggcacaccaccaacgtccagcaggagcagcacaaaaga

SEQ ID NO: 23366 - DNA, 637 bp, Arabidopsis thaliana landsberg
ctcaaaagaacgcaacttcacatcacgccatctgtgaaataagaatatctatcattagtttgaccacataaccaaattattgtattaataaccctcatcaaccaaaccagtctttttaccttccagtcccaacttcttcaactgcgcttactagagcttctacctctgtaacagagaatggtctcctggttctgcgttgtgaaagctctgtacgcttaggtttctcgttaactggaacaagtgcaagagcgtcggattccatggccaaaactggaaccagcgctcttgaatctgataaaggttgttcatcagctggtatgtcactcagatgtgggactaattcatcattgttctccacactatttcccaaattaatcaagtaatcttcatcttggggagggagaggaattccagtctctaacgctggagaagctgcggacctagcaagatcgaatgattgtccttaggtatatctctagagcttcaaatttatccatacacaagcaaaacttgcagtaacaaatatatatatatatatatatatatatatatataagatcccgttcgttagtacctttctgacaactttgtaaagtaaattggcagagaaaggacaggagtttcagaacaaagaggg

SEQ ID NO: 23367 - DNA, 1081 bp, Arabidopsis thaliana landsberg
gtaagataatgtttcttatacgaaaaagaaaacttgtaatagtagagaagaaaacgaatagtaaatttgtttagtagagaataaagctaatatgataaattaatgtattttaggttgtaattgtttgtttctaatttttgatagacactataatagaatatttttcttttgtcaactagatcataacatcatgctaaataaaactcccatgtgggagatcgatcttttttctttttggaggtcgatctcttgtaggctagacaacaacatatggcatattggcatgccactactacacaccccaacggcccaacccacaaaatacagctctagagaccgtagtctcacccttagaacttggtggcatgtatcatccgttcaaaatttcaagatttttaggttttggactctcttaacttataaatgataatattacttgcataaactttatatagaactgtcaaacaatataagaaactatccagagacaagtctggccatgctagacacgttttttctatacgtgacataaaccaaccaagagccgtcacgccgtaattatcaatgtcacgtcttatccactaaataagtaaatacacaacgatcgattagtaatttctatgactgaagcaacctcatcgaatcacataatttcttgatatcaaactagttctatctaatcaggttaaatagtcttttaaaaattcaaatttctacaaattagtgacatgaaaattttgatataatataaatactgtcgtattaagtgggtaatgagttaaaaacaaaataacatcgaataaaaccataataatacgtgtagaccattagtaattagttacactaaagattataaaaagggataagccgtaataatattatggtaaataaatcaacagattcttgatttgcttgttacgtcttcagtcaaaaatattctaatctacgaatgagaacggtaaaaaagggaagctaagagcatcattaatggtagtttcttagcataatcttcatatagttcttatcttatgaatattcttataattgattttgaaaattttaaagcttaagaatttagtta

SEQ ID NO: 23368 - DNA, 618 bp, Arabidopsis thaliana landsberg
acctaaaacaaatatcaaggaagtacaaacgaaaactcaaataatatatatatatatatatatttgaatatgttttatgatgatgtcttaatggatgacgagatgatgattagtgatgatataatatatatgtgcaaatgaatatgtcaatttatgttatttgattggatgtataacctaagtacatccgcccctgcatgcatgcatgataattggactagtctcgatcggaactgaatagctttcgtgctagttaatttattagatgaacttgtaattggttcagggccggcccaataatttattggaccttgttctatgctccaaatttttttacttaaaattctaaatattttaaactagatcttattttacaattatttgaaaatttggaccctaaaatataaagaaaaaactgaataaataagtgggacccggtacactagcacactcagcatctcccaagagcctggcctaaactggtttcgtgtctgataactaagttgacgaaattttggcttagtgttgcggtggttgcataaactggtttcgtgtctgataactaagttgacgaaattttggcttaatgttgcggggttgcatgatgttaatatggag

SEQ ID NO: 23369 - DNA, 539 bp, Arabidopsis thaliana landsberg
tttccccccaccccagaggatcccctacacactgccctggaacaacgtgcagatggtgatatttggggtcatgtcgaatcaagatcggttgtgctgtcatccagcaagtggcctttgattgcgcttagtcgatctgttacggtttgatgattcgatcgtgggatggtttcgtgcattacttccaggtatgtttctatgacgagtttgacctattcataatgataataatgatgttgagacattttcttgagtctcaagtcttagttagggtttcatgaacttgcaggtggaagatcttttattacatctattgttttagcagctttgttgatatgagagcaaaagtggtgtcagaagcttttatatctgacacctccttatagagtacgttttgtgcacaatagaccattattgtttttagccgttctacaaaaattcttatgaaacttgttgaaatgcagctttacttagcgatcttgtgattgtttgtgtagtgtcactaacattcttcgtgtagtaatcgcaatcagatttgacga

SEQ ID NO: 23370 - DNA, 1038 bp, Arabidopsis thaliana landsberg
aatcctaaaatttaaaacttattatatataaaagaaaaaattatataaaattcacagtttagattctcctccgattgaatttttaatccaatcatctttttatttcattatagagaatttgaacaaacctcctaaatcaaaagatttcaaaaatattaaatcactttttcaggttcaatgatttcacgggtagaacgtattctgacaccaaataaacgtaaatttaaataaaacaaaaaactttagttaaatattttgttgtatacaaacaaatattatatctcacataatgtttttacacataataatttatttcaatcgtttaatcccacacatagtgtgggttcttatctaatatgcttttatacacaatcatatgtttttctagaaaatgcatgtttttttatcaccaccacctacaagaacattataccaaattctgacgaaaattatcttgaccatgtaatgaaatacagtgcgtgtgtacgactcagttatgcgcttcaactaggtaaaatgttaagttataaaaaatttccgatttttgtattggtttcgttgagtgttctttgcaaatgtggcttaataataataaaaatagttgggtcacaggttttaaatgcaaaaaagtttagacatgactattacccatatttattaatgcaaactcataattatatattgtaatattgattatatacttacatgtcaatagtattgagagaaaaacaaaaactgatacaataaaatttatatggaagaagatgatgcttgagaagttttgattttgttgttttacaaagtttgaaagcgagaaaaatagtgatagtggtaagaaatttgtgtgtgattttcctattacattaacttgaatttggatttgaaagaaaccaacattgtattgcgacaaaaaatctgcaaattctaagtttagaaagtgtgtagttagaaattctttttatctttgtagatataaatgatcttttacttccatttatgtgggtatgatgaatccatgatgtatgtatgaagatttct

SEQ ID NO: 23371 - DNA, 612 bp, Arabidopsis thaliana landsberg
tcttatggttgagaatcttggtggctataagatgaaggttccaccttttcgtgggaagaatgatctggatgcctatttggactaggaaaagaaaatggaacttgtgttcaattgtcaaaactacgccgaggttaaccgcgtgaaggtcgccgcaaccgaattctttgactatgatcttagttggtgggatcaaatcgtcactacaaggtggcgtaatggagagtatcctattgatacatgggaagggttgaagcttctcatgaggcgtaagtttgtgccaagccactatcatcgtgaacttcattccaaacttcaaaagctcgtccaaggtactcgatcggtggaagactattaccaagagatggaaactttgctgttgcgcacgaatagaggggaggatcgtgaagcgactatgtcaaggttcttgggaggattgaatcgagaaattcaggaccgtgtcgagatgcaacattacgaagagttagaggcgatgctacataaagctatcttagtggagcatcaagtcaagagaatgggtcctctcgggcaaattatgattcaaacgaccaagctatcaagagatgtcaaccagcttcattccaagagcgagct

SEQ ID NO: 23372 - DNA, 549 bp, Arabidopsis thaliana landsberg
  unsure (1)..(549): unsure at all n locations
gctggatcaggagggaaagcatccattcctgctatgtgttcttgtagtatacctaggcaaagttagttgtttggnaaacnnnctatcgactttcactntaatctgatcacaatgatgattcatgccttttgtttgtagctttgcaaaatcatgaaagagcacaagaactccagaattccaaggttcttagtgaaggcttgttatggatggtttcagcagttgatgactttggtgtctcacttttgaacttaaggttttgaagtaatttctactttaaaatttccagcccctgatttccctgtttagtaaagtggaatatcttgtttctttttgtccatttgacaggatatgatagatttttgtccatttgacaagataggatatcaaataatttcttaatgatttcaaaaatgtgaactattaaggtacatttgtgtggattttcttttggatttctatttcttttcgtacttgtattctgttcatcaagggactgcggctccaagggagttagtaagacgtcgtttcaacatcaacctctgtagagat

SEQ ID NO: 23373 - DNA, 1554 bp, Arabidopsis thaliana landsberg
cagagtatccaggtaaaacagagtatgtgtttgaccttgataaaaaatgggcaatgtgttcatacttacaattttttaagctccgtaagattttggatctcaggaactataattccagttagttcacttgaggacaagtctctggtggtaattaaagatcataacacacatttaaagtgtaagatgttacgaaatgcagagcttaacaaaaaactgttttaatgttacgaatagccatggacgtacaaggaatggattcttggtggtgtagacatattggtgtactcgcaggtaagaccatcccacaataattgttgaggaacacatggatctccttgccaactaattctacttaatccatagcttgtttctatgctcttgatagcaaggactaacacacaataacagaatgaaaacacttaagtatatacaaaaaagtatatatatactcagattttgctgacataccgtcatttgcattagtttcagactgcggaaactccactgttataaaagcctcaatagcattgaggaggggagggagagttgattttggagtttttattagttgcaaatggcatgtccctccttcacatttaactggtgatgtattgaatagagtacccactagaaactcgtcaggactaacaggtccatagttaacatcttggcctgcgctaatgttgaattccctggtatcattttcccttaaggattggatctcagcgacgtggaggtatgcataaactaagtcgtcaggtgtttccaaattccaagaaatggttaatggtgaactcacatttgcaggtgtggctgccgtaaccactacgtcttccggtatgtcatagccgttatcatcagaagtgttgaccgtgagacttgttcttaacagtctccattccggcatgaaaaatggactccaaagacgatcatggacatcttctggatacctgaagagaaaggatggaaagtattaccgaacagtgtatccagtggaaaccaatctattcattaccaattggttttgagttggcttaccgaacagtttctttggaatcagtcaaatggacgcggaacaatgtcttgagggaaccagattgaggaatataagtattatttctcaatggtcgtagttctaaagctgatattagcggcgtagttgttcccgtcttaacaagacaaatctgcaaagaagttgaccttggtatgtgaatgatttccgcccttgttccgtttacatttctttgtaaatccaccgtggtccatatatttggaccaagataaaggtcgaactttgggtgtgtattaagattatcgtagtttccataagtaaacatggctacgatcagatagtttgtgccttgtatgacggtaagagtatagcagtttcgtactccatctggaaaatatctcaaaaccgtgtatggctttatatactccatccccggaatattttgaatcttgccgctttttccacttttgatgaaatcggcgtctgatgtgaatgttaactttgttaatggttcggtataaggagactcatcggcttgcaac

SEQ ID NO: 23374 - DNA, 858 bp, Arabidopsis thaliana landsberg
tcttgaaggccttaaatgggccattttacgaaaataaaagaaattgtagatcggcccacacataatatatcagttgacttgggaggaggacttcttcttctgttcagagtcccaagttcgaattagtatcaaatattttaattgaatgcaaatttcaactgtttttttttctcaaccacacacattttaacaaaaccaagcagtgaaagtatatacatcacttgtttatttcaacacaaaagaacatctgagttaccacactatggtcagttatataaggcagctttcttcttctccaactccgcttgctctttttcttagtgacactgactcgttacttcgtcttcttcatttccgcctcctttgcagctttcttcttctccaactccgcttgcttgacattctcttcatgtgctttcttaaacaaccttataaaactcaagagtgtcgcggtaactgcagcaatcgatcaccatgtatgttattagcaatgagccactttctatggtattagaataaatgaggatgaagtttattgtttccgaggcataccttgttcaaatggataatggtagccaaaatagtgtgcaagtgcctcagcatttcctctctgttgtccatcataattagattgattcaagaaaaaatggcaaattcaggaccaaacacattgtcaaaggtaaggcgcttggaatctagtagaggttgacaaaaattaccgcggggtagtaaagagccatcacagttgctacttgagtctcagcattggatatgaactccttcaataactgaaaaaaaaacattaaaactagattttagcagcggggggggatggaagatttagttatgtggcacagt

SEQ ID NO: 23375 - DNA, 1548 bp, Arabidopsis thaliana landsberg
ttcttccttttgctacgagttctttcaaattatttatcgtatactgtcttcttcgagcctttggtttaagggttgtcattgatgttcttccttgtttcacttttattcgtctcacgtacggtcgtgtccataattccagagaacatttttggtttaattcttagttggtgatattttcttaattgttaattgttctaaccgcaggagtaacgtcaagaaactttactatagagaacaaatgcgattatactgtctggccgggagttctaaccacgaatacggttagactctcaaccaccggtttcgagctcaagaaaggagagactcgtatcatcaacgcgccgttgtcatggactggtcgtttttggggtaggtctctttgctccaccagctcaacagggaacttctcctgcgctacgggagactgcgggtccggaaaaatcgagtgctctggaaacgcagcgcctccaacgactctagccgagtttaccctcgatggtttcaacggtcaagacttctatgatgtaagcctcgtagacggttacaaccttccgttagtggtggttccacaaagtccacaaaatggccagacatgcatcagcatcggttgcgtggtcaacctgaccaagacgtgtccgtcggagcttcaggtgatgggaagcttaggcgaggaagagccaatcgcttgcatgaacgcttgtcagaaattcaaaacggcggagttctgctgcaccggcagttactctacgcctaagaaatgtccaccgtcgctttacgcgaagaatttcaagaacgaatgtccactcgcttatagctatgcttacgacgatgcaaccagcaccttcacatgctcaaactcacctaactacgtcattaccttttgcccgccgattacttcgaacatcaccaagtaagttcccggaaatacccttcgtctagtaactttctatttcgtcaaagacaaagacgtatagagttgtttaatccattcttctagagatattggatcatacacggcattaattttgaccattcattctagagatatatttttagaatgttgatacattttgaaatggaccatatatttcgaattgacaattacaatgagaccatccaatccaactcatcattcacgctgatgagttgatccaaaatttccagcgtgtttaatatatgatcaaatgtatcaaaaattgcttataaaaattggttgtctagatgtcttaaattgtccatctagcctaagtcgtcaataaataatcacatgggtttccaacttttgtcaaaaatattgaaaatcagtaaacaaaaaaaaaaaaaaacacgtagggtagggagtttatgccgtttaggcggcagatttattcacatcgaagataattttatgagaaatttttaataaggaaatttaaatgaaaataatgataaatataaaacatagttgtaaaagaaaaataatagaaagaattgaactaattagtctttagagcatctccaatggagacttcttagatggggtatctagttaagaaattttatgagact

SEQ ID NO: 23376 - DNA, 387 bp, Arabidopsis thaliana landsberg
  unsure (1)..(387): unsure at all n locations
gctgctgggacacggcggtttatggnggttttcgagatggtcatcagcaaaaatcgntggcgggtcggggcatgaatcataaagtcgacaactatttcacagaaaacagcgtggacggatnnnnnnnnnnnnnnnnnnnnnnnnnnnnnnagggtaataagacgacctgttccttctacgatacaaagactttgatgcgaaaggtaggattgtcagtaccataaattcgatgtatgtatagacaatagtatgctctgtcggaaagatgatgagaagttggagtactgcaagttatgcggaagaccaaggtatttggaaagggacggaggaacataagtaccagttagtaagatggggaattaaccagttggggatagatagaagact

SEQ ID NO: 23377 - DNA, 2843 bp, Arabidopsis thaliana landsberg
gcagatatatttccttagaccttccacacgctttagagacttaccttttcctttgaagactttttactttctgttgcaatcagagtgtctcattcctcttcatctttcttttgtctaagccacttagtcttaacacctgcaatgttggagagattagcttctactcgtggattcttgaatggcaaagaggacattcctagccactgggcagatgtaggagaactcaagattccaaggtttaaatttgattttggtttcgaagcctctgaagctctcaagggtttgggtttggaggtgccatccactatcatccacaaatcttgcatcgaagtcgatgaagtgggatcgaaagctgcagcggctgctgtaatatttgttggttgttgtggtcctgcggagaagaggtatgacttcgtggctgatcatcctttcctcttcctggtcaaagaatacagaagcggacgtgttttgttccttggtcaagtcatggatctttctaagcattaatttgatgtccaaaggtctcgggatttgaggaaaatcttcttatgactttcttgacgtatttgattccatgcatcacttgagttaaaagttgaaattgactttagttataatcctcgtgcttttcatctttttaaaaagatttatctcttttcaatgatttttattctttggcctaatatgatggctatataaactaggtttcacaaacaattaatattaagaatgtatgaaaataactatgaaatctcgatcgaaaattcttgaattacaaaggtttttttttcctcaatttgaaaaaaagaagaagaagaagaagttaggatcttttagctcaaaacaagccaattagcgtttatgtgtgtaaatttgcagatttcttgcttaatttcatatctatttatttatttatggaccgattatcggtttatacaatttacttataaaattattcttgatacattcactatcatttggttctgttcttacaaagaaaagcgataatgtgatgagagtttaggaattggaagaagttatatatatttactctcataatgataagctttgggttacatatgtttatatatagtaaaatggtttcctaaactaagatagaactaaatctttacatatgaatataataaatataaaatattttcatattaacttgtggatcttctggatccttctacaagtactcgttgtcgagaccatctctggtacttgttcgaaacataaaagaaaacaagagaagtcggtttaagagaatccaaaaaaatccaacttatcctcgccgtgagaaagatggacctgaaagaatcagtaaatgatcaatacgacatcctggagaacctgaaagggtcagttgggaacctaaacgacatcattctgaggttaactcagcacgttatcgctagcaccgccgggaaaacctcgaacctcgtcttctcgccagcgttaatcaacgtcatcctcagttttgtcgccgccagttctcccggagacacagacaccgcagacaagattgtctctttacttcaggcttcttcaaccgataagcttaacgctgtatcctccgagatcgtcaccaccgtcctcgccgacagcaccgcgagtggcggcccgacgatatcggcagcgaatggcttctggatcgaaaagactctctatgtgaaaccttctttcaaggatctcttgctgtattcatataaagctactttcaaccgagttgactttcgcaccaaggtactctctttgatccaaataaacctaattcccttatatagttactaggtattatcttatactaacattaacatgattagtttgtatcatgtatgtaaaactggtttctatacaaaatcactagggattggactaatatattgaaaagtgtgcttagacaaagtatatacacaaggcttttgtgaaatcaaatcacagatgttgatagctagcttctctgtttttgtttgtattgtttttgaaaggctgatgaagtgaataaagaggtgaattcatgggttgaagagcagacaaatggactcatcactgatcttcttccaccaaactctgcttctcctttgactgatctcatatttgctaatgccttgtttttcaacggaagatgggatagtcaattcaatccatcgctaacaaaagaatccgactttcaccttcttgatggaaccaaagtacgtgtgcccttcatgaccggtgcccacgaagacagtcttgatgtttacgaaggtttcaaagtcctcaatctaccgtatagagaaggacgcgaagacagtcgtggtttctctatgcaaatctatctccctgatgagaaagatgggttgcctgctgtgaggtttttagcctctttacctctagctttcttactcacaagcacacaactactaacttgaagcattaagaactgacttgaagaatgttgagcagagactgaaacttaaagaaaaagttatgcaaagatagagaagtgtttaactatgaagatgcagagaatgagtgtgatgcagagctgttaaagaagaatgatgcaaggctggaaaaacgaacacacacggtttaacgagttcggaacctcaacgtgaggaacctacatctcgccgggaaaaatcccggaatccactaaaccacttcaagattacagctttgttctctcaccctctctaggaacttacaaagctctctctctcttatgttcactctgttttcccaaacccttagccttacacttacttctctctcacttgtctcactcctctgttacagagtcaaaacaagacaaaacttgtggtccttaaacttggtctccaagctggtctctc

SEQ ID NO: 23378 - DNA, 638 bp, Arabidopsis thaliana landsberg
gagacaccgtcagagtcgtcgaaaacatcaaaccggctagaaaaattatcttctttttcttcgtcacctacttcttcgtcagcagcttcttcgttacatgcttcatcgtcacttgcctcatcgtcttgataatggtaacataaatcttcaaaccccctacccggaacttcgaatctagattctactcttgagtcagaacccattggccgtttcatccttcctctggatccgtccttccgactaataccccttggctctttcgccgtaaactccacacaaagacgtaggtggccgattttcatcaaccttggataacattgcaactgttgatcattagagacaaaaactggtggagtatcaagcggcatatttttcagagtcttgttggagaacatgtaactcagctttaactaatgggtcctctgattcaatccgtaatcaccgagcaccaacttcaaaagcctatcgtgcgttgttttcgcttctagctgcacaactctacaccctctttcgacgagattatatacgaatctctgtttcttaaaccaaataccggaaacaaatatgacccggaaccggattagccatatcgagagaaagatgaaagaaattgaagatgaatgagaagatgaaagaaa

SEQ ID NO: 23379 - DNA, 1175 bp, Arabidopsis thaliana landsberg
aaagtggaactcaaggaactcaaatatgatgagctttgattcaaattcttcaaatacaagcatgttaatgtaattttttgctttaaatatatgtagagaatgtgtaaatgttatcacttatcattgcaataacacataaagtttgaagttcaaggtttagagagatgaaaaaatgggcagaccaaccaatgaagctccggcattgacaatgtatgtattcccggagatatatttagacgagtcgtgaacgaggtagcgtaggagagaagtaagccccggatccactgtctgttgtacctttaatgggactgtcctctcgataacggtcttgagccactctttttgcataagaccttgtgtgatctctgactttaaaagccctggtgcgatcgaattcactctgatcttgtaaacacctaactcaagtgccatcatccttgtcatggtgtcaacaccgcctttagaacaagcgtatgcgactccaccaggcacctgaccgcggtggagcccggatactgatgaaatgtttatcaccgagccaccaccacgtttagcatcgcgcattaaaatgcatacgtatttggagactaaccaggttccggttaagttgggcttgaacactttgtcccactcgtcttctgacaaatccaaactcgacttgacattgcctctaaatcccgcattgttgatcaacgcatcgatctttccgaagatttcccaagctttcttaaccgctttttgaacggtggctgcgtctgatgaaacgtctagctcaagagcttcagcttgaattccagctgaatattctaagcgatttatttcagagcatagagatttgagaagatctacacgacgagctgctgcgataatcttacagccagctctggctagatcaagacatacctctcttcctataccagaggaagctcctgtcacacgaaccactttgtctttaagttcacactatggctccagttgcttcaatacctgctttgttagagtcatattcaagatgattaaaaagcatatatgataaattttcatatcattgagctgacacagtgagatataagagaggaagtatctcacgcacagtttgatgattactcatgttgcttctctttgtgtgatctttcgaaggagaaggatatgcccataacatataaagacttgtc

SEQ ID NO: 23380 - DNA, 547 bp, Arabidopsis thaliana landsberg
agaaccaagtttaagtaaaacgtattttatgaaatattgcaactattttgtttatgttttgaatgttgcgaccgcatatgcgaatggtaacgttactgacatcaactatccaataaacgacatagtggatattgatcagaatagtcactattcgtatggaacggatgacaaatagcttatacatcttgaatatccactctacatccagccttaatatataaatcttatatacaataattgaaaagtattggcaactgaaataaaaaagaataacactttcttttgatatgtaaaacttaagacttcccctttttctaatagaaggaaaaaaaccatattcgccaaaactacaatacactaatttaaaaagacaaagatgtaataaaatcaaaggtaattgataagttgcattatttttctagtgattattttggggaaattcttttccaaagtagtgaatataaaatatctaaaatgtttaaattaatttacaattcgttaacttgattgatttatctaattataaatcatatactggttcttaaac

SEQ ID NO: 23381 - DNA, 740 bp, Arabidopsis thaliana landsberg
gctccttgtcaccgcatcaggctcaatcttgttcgtaacccaaataaccattgtatcccatagtaacaccgcaagcttctcttctttaagagcagataaagacttataacctttgtgtagagtataaccttcattactaaagggcagaggcagaggtgttccaaatctctctcttgtaaaatcaaaacataataagtaccagtctattgattccttatctttagcataccagtaagtatctccattcaaagacacgccttgtttcatatactccatatctcgttcaagagtgccatcaggaatcatccatgaactagagctcaaatcgtagatattgaggttattttggttgacaccgaaaagcctcaggattttgtggctaccgctggatttgtcgtatccgagagcatacctgtcgaagcacccgaaaggaggtcttggcatgatccgttttgtttgtccccaatacgggttcaaaaccacaagcattttttcccgtacgcataaaaatacaccgttgcagtgaatgacttgagatttttggaataaatcatcttttttgtctctgctaacaattttagccttaagctgaatagatagatcaaagctgttgttctgacttctatggagattgacgccgacccaaaaaacattaaattgtgtgatcatcagaaactctttttcccctgataccgctgctttgtcgatgttcttattcgcaaagctccgattttttgata

SEQ ID NO: 23382 - DNA, 465 bp, Arabidopsis thaliana landsberg
aatcggacatacataaaaagagaaaagtgttggctagcgtgatggtggcgaagatggcgatgatggtaatagtaacaatgacagtaccgatggtgatggtgacgacaacagtggcggtgccgatggtaatagtgatgataacagtggcggtgccggtgacgatagtgagacaacagtggcggtgccggtggcgatggtgacgacaacagtggcggtgctggtggtgatggcaacaatggcggtgtcagtggcgatggcgacgacaatggcggtgcggtaacgaaaagataagtacaaatatatattgatctaagaaaactaaacattaagatactatacatggaacccagacaaaaatcattaaacgagatgacatcatctgaagtttcaattttcaaaatctagcagcagaatagaatagtacaatggtgacgatggcttcggtagcgattttctggtgatgat

SEQ ID NO: 23383 - DNA, 477 bp, Arabidopsis thaliana landsberg
cgactgttcagtgaccacggttggaggtgagcggttgccttcttttcctataaatagtgcctttgcctgcctggttttttcacatctctcgctgttctccactgcctgctttctttcttctacctacatttccaccatgggcaagaaacgcaagcgcgacgcaactcctccatctgaggattttggtgactcggagtattcagaggaggagttctcctctgaatccgaggggtatccggctcccatccctctgcgtgagtgatgattcagacgactcccaggggctcgcggtggaggtctggacttacatccgggccgtcgagcgttcggggctcgcgggctcggatgagtcggaggactcctcggacgaggatgactcgtccgaggaggacggcgacgacggtggcgagggcgacgacgatgacgacgacgacgactgaggcggtagcggtgacgacgacggtgactgccgcggcg

SEQ ID NO: 23384 - DNA, 643 bp, Arabidopsis thaliana landsberg
gccatggtcccgatcgtactcctctcggcgtcgtatctcattctcatgtcgtcgttcgcgggaagcgttgatggagctccacgcatctcgccgactgttgatggcgtgtcgcagatcgctcgggggatgagcgaggggtagaagatgattagccgcccgagtgagcagccgccgatagccttcaacatctggggtctagggaagaccatcagctatctgagctaacactcctccgacttcactcggtgtgttcattgcacgagcgaagttagggttcaggtttcgcgcgaagaaagggttcattgcactagcgaagtcagggtgacgaatttctttccatccttctttgagggcgaaggcacggaagagcagcttgacgggcctctatccctcttgcttcttttttcctcgtaatccgtgtccactcttctgtggacaaggtggacaacagggttcttcgggtaaatgaattcctggctcttgacttgcaggaggtagtcttcgccggggcgttggaggttgcctatctgctgccttgtttcggctttctcggagatttttagggaaggttcttttctggtggatcgctatgcgtgtagaatctttctcgctgctacagcgagatggtccgaacagaatcaga

SEQ ID NO: 23385 - DNA, 561 bp, Arabidopsis thaliana landsberg
aatgtcgaatatacaatatatgattctccattaatgcatatctatttcgtcatgtcgaatatttttctggtcaccaacatattagagttttatctaatttttatgttgtgtaaactctttatcattcggcgaattatacgtacagtaaatattatttttgataaacaaatattaattcaacggattaatattttgtctaaaagtttgagatgacgaaagagaagcagtactcctacgcgtcggagtcgattcctttggtgaacatctcaatcacgccgggaggaataaaaagcgcgagcagaggatttcccggcgggaccggcggtatctcagctctacacaaaggacacatggacttcttcttcaaccacggatcaatgcaatcgacgtggaaacagtgactgcatgctgttatccgcctcatcttttctccctccgtcgcattttcgagacaaatcgtacaatacggtgatgcatgtttttcctcggccgggtttttctccatctccggtgatgatggaccgtgaatgtacggtaacgacgccaagaacggctcgcgag

SEQ ID NO: 23386 - DNA, 518 bp, Arabidopsis thaliana landsberg
  unsure (1)..(518): unsure at all n locations
acgaaggatttacaaccctgcgaccgacataccatccggttatggagggatttatcaacttaatatcgtgaaagaacttcattgttttccggcggtaaacttgcggagagaactttagggtaaacactttttttgctttcttttaatttctttgaagacgttaattatcaagtcgattatatatatataaagtaatgatgataaggcaagcgtattagttacatcggttccccaaaaaaattcatgatggttcacgtctaatcgtaatatacgaaaactgacaatatctatagtgagagaatttgaaatgatatctataatcagtaattaatatcctaaaaatattctaaataatagaataattattgcgtttatatactgtttattaaagtgataatgactgtccgcatataatcattaaaaaaaatacaaaagcagacatgcatatcagaatactgtcatttgtgtattacaaatcttcgattntacaaatctatataacttatttcttattaatt

SEQ ID NO: 23387 - DNA, 554 bp, Arabidopsis thaliana landsberg
tgaagaccaaaggtcgttgaagaaaaacaaacggccacgaaaatagaaaattaaataacacttgtgcagcaccctgcaggtacggcagatagcttggccagcaaggtcggacaatctgcaccaggcgcagaccgtccgccctcggagtctggatcgcccacaccacaccaggaagcctccaacgatataccaacatcaatggaagaagacgacctactgggagaagacctggtataaattgtgtgaatgcggggagtgaattataaaatgagtaggacatagatgggtcaagggacacttaccttcaccaaacagatgctcagggtcttcaactttgcagaactcgaaaaaccagatcacttggtcgccaacgctagatcgtcgattcctcgaagcgcggaaacaaatcgcgatctaatcgcaacgcgaaggatgacgaaccagtacaagcaaagaaatatatatatatgtataagaacattacaccatacaagataaaatattataaacacgtgcagaataaaagtaagctcacttctacggccacacgaggg

SEQ ID NO: 23388 - DNA, 933 bp, Arabidopsis thaliana landsberg
aatggttcaaggtaaaaaataacaaatttgacctctataataaaaattattaaatagtacaagatctaagatttaatactcagtgattatcatggctaggaaaaaggtacgacttgtagtgataatcatggaggttttgattcacgattcaggcaagtctcaccttcttccatgccatggccatcactcataattatctctcacttagatttgctttattttctttgtggtataaaaagagagtcatgcacttgttatcttatatagaaagaatcaaggataagagataaagatgtgagaatccaaaatattatgaattttaacaaatattagataagtagaaaatctaacaaaatccgaaaatctacatatactatttttttatgttaataccattgtagacttaaaatttttttgaatggattttgttggaaacttaataaaaaataagaatattattctattttatacccttatgtttatcttcatctttccaacttttgactcatttttactttcactttctaggtattttcatctttccaacttgtgattcatttttacttatttcactttcactttttaggtttgtaaatttcattacacttatacagctatcgacacctaaaagaatttacagtcgtgttcaggaaagtacaaaccccaactctttctacgtttgaatttctctccccatgcacttccgtcttctttcatgtatatttctttgtcagttttaagttcatgtttgtgtatcgtttttgcttgatcctcctataaatcaatatatattgccttatatacactacagaaaaacagttattattaccgtctgaaaacactatcatttaatacaatagcggttatagaaacgctttgtcatcgaccgcaagatttattcttctttggcccttcaactctaggtcatctttt

SEQ ID NO: 23389 - DNA, 610 bp, Arabidopsis thaliana landsberg
  unsure (1)..(610): unsure at all n locations
attaaatttttttgtaaatactactatataacacataagtacaatttaccaataatattttntggtttatactcatacaaccataatcttatttctacaaccaatttttatcaagtaataatattaaattaataaaacctacagcctaatttgtacagcaataaaatctacaactacagtcatcacacatacaacaaaaattctacagttacagacgaactaatcacacacaagtgtatggttttataatatatattaaacaaaactcaaaatccaaaccaaactactgtatttaatttctatcatgtgtttttaacacaaatcgaaaaccaagcaaactattgtgtttaattctatatgttttaattatttttccaaaaattgttggatgcaaaactaaggatttaagctagtgtttattaaaaagaaaaattagaatgagaaaggcttcaaaactaaagttgggttgtcggttggaaacaagagttcaagagggtaaatcatagttgatagtactattatgaatgtcgctcttccgggattgcattcgcttacaaattattcgacgcatcggcttggtcgaatatggatagtttgagatgaaatgaaa

SEQ ID NO: 23390 - DNA, 3260 bp, Arabidopsis thaliana landsberg
ttcttttaacatcatcttacaattgatgtcctttttattataggttaaacctctattttctcggggatggagtataaaatttgacgtcttaataatatttcaaaattaaatattttaagattttcatccttaacacaactacttaaaacataaattctgtcgatgacaaaaaacacacacataaattctgtctttttttataatggtgaatagcatcatcaaacttatattgtttagaacttatgcacaaacttctagtaaaagaatatagtccaatatgtattgcatttatcataagtttaatctatataataatggagaattgttaaaaacgtctattttctaatactacttatcaaaaatggccatcctaaaaccttataaaaatatacccctaaaaacttatttataacgttttacacaagtataattggccggatgtttttctattgtttctgttgttcttgaaaagtttttaaaaactttgatgggcatcaattaaaggtaaataaatagaaaacaattactgaacaaaactatttttgtagaaaaccaaaagtatcaaaaactaaaaaacaaatgttattttttgctcttgatacacaccaagagtcaagagactccatgaaatatagagatgatagttactaatactaaacatataatattttaagatataatttttgtttagaattattcatttaacaaaacaaaattatggaattttctttaaaatactccctccttgttttaatagttgatgttttagagaaaaacgtttgttccaaattatataatgtttcagttgtcaatacaatattcattaatttttattgtttttgactatttatcttccgcagagtgttatatcattggttgaattgtgtgtagataattaattattgttattttagtttgattcaataatatgtgtgagaaatcttaaaacatcaattattaaaaacgtaggagtataattttaaattttatcacttttctagaaatgtttgtggattgtctcatctctttattataacttttgatatgtttttttttataacttacaaatgttcttcccttcatagaaatatatttcaaagatcatgtttttacttataaacgtgttaaaaatctttggaaattaattacgacataacgtaaaattttggtagaatgtacataatattctaacatttgaattcattatcacaataattaaatacataaacatagtaaaaaaaatccaatactatcttttgtgaaaaagagttctctcacgagattcataacttagaaaaatatgaactaagacacttgagagaacaaatacaataatcttcagtttggctaagtgcctttagaatgaaaggtgttttgcatcgagagtgacactgggagcatagttgtcgtgtagtatctttggtaggaaccacttcaaatgtgtatattatagtctcgaatatggatcctgcgatgaagcgtgagaaatccccaaaaacacagtcaatatggaatgtgaccacacaatcatcgcatgtgtagaaccacttacttggatccatttccgtctcgcaaatatcacaccaatatttaccacttgccttttcaccataacatagggagagaggatgtctatcgtatttgtgcttaagtgtctttggcaaatttgcacaacaaaaatccaaactaaagtcacaaacatcacaaccaagcatgttataagacagcttatgacatgaatcacacttggtactggcttcttctttgtaatataagggatgtacatggccatcatggacgaacggttcggaaactgaactgcaatgtacatcaagcattaaatcatcagagatgtacctgaaaccagtcgattgttttccacaagcgtcacatgagaaccaatctatttggagatcttttcctctagcatgtagggtaaatggtctgttgtatattaagtggcgtctcttcataggcagatgtgcacatttttcatgaaggaaaaaagtacattgatcgcaacaatatatcgaaccagagttgagaggaaagatgcatgcttcacatcggctactttcatcataaataacgtcttcattggtaagccttagattatgtttctcgtggctgaaatgatttatcaggttatcaccaaccaccttaaacggaagatcttcagcttcttctggtatcccttcaagttctatcccatcccaaacgttgtaacttgttgcacattgcgaatgaacaacatatttggggcaaatgaagcaagtataagccccatgaaactgattcactggtcgacgacaaactccgcaatccgaataccctgggccaatatggttagtgagagttatgcgatgaacatgccgattaatgattatgacatgcggtaagccaatacaacttcgatggaccataaaaccacattgaagacataaataagagacttggccgtcttcatgcatcccacaaacattacaagtaaatgagattcgtctcgataagagggtaagatgatgctcatgggtcttggaatgctcaataacaagaggtggagggcttctcacacagtttaggcacatgctgaagtcacatattaagcagtaatacatcacaatttccgatctcactccacacaaaacacatgctttttcggcatcatcagggagggatttagatatggtgagctcaagagggtgattagggtgaaaaggaaggtttacttttttctcatgatatatacactccaaatgagcatactgatcccgagaaggtagtgaataataatatttaccagcaacaactgagtgcccacatactccacaacaattgtatattccacttatctttggaaagacagatggtaggtcttgaaaatcatgagtaggtggcggtggtggtttccgcgcacatgatgtgtcgacgttgaagtcacatatggaacaatgataaaaatacggcacatcagctaagtgatgaatgccgcatatatcacattcatatcttggaggcctctctgtaagccggagaggatgttccgggtgagaagggtggttgatttcaagtggtgactcggcgcattccttgtgaaacagaacacgattgcagtcagaatcattacatcgatagcctccatagtattcaccttggtttcgaaaactgcagccttcacaccgatcatgaaatcgaaaggaaagggacaaaggatatatgtgaataggtagttttatcgataatatagccatggctccgta

SEQ ID NO: 23391 - DNA, 5339 bp, Arabidopsis thaliana landsberg
atcttttgtatatttttatagctagaagcctacaatactttccatataataatatttcttaagttttattatcttatataagttttaggatttgaagacatacatatagacctatttatgtttcgtttaggtgcttcctttttcaatgtctaatatgaatatcttgtttcaacaaaaaaaaatattttttttgttgtattagtttattatatggagacacttatgaaaaacttgttgatatatcttttttaaagcaaaaaaataaaaaataaaaacgtggataacaaaagaattttttaaatatctgatgtgaaaaaagagaaaattgtttcttttcaaactgcgtttgaagaattggacagtttctcgacattctatcaaaaccgccttaattttcgatgaacttttaatacgaggctttgttttgtttattgcagcagtactgttggggccggtttattaatgggccgtctcaatactacaaattgtcttgtagggactaatttttgaaataataaattacagggtgaataccatgaatagataatgaaatgaaggttcattatgtaaattaatattttacttctgatttcgtttcaacgcatcaacaagatttttgtgaaacaaaaacccatttttatcaaaaaccaaaccaaacccatagggttgtgttgttgctgttctgttcctatcgaccacggcggcgacgaggcggagaagaccgacaaagcggagaagccagcttcgaaaccctctagcatttattttttaaaagcgaaattcattttaagggttttggtcatggcttcaatctcgacttggttccgatacatggctcacaagctcgagtattccctcactctcagtctcaaggtttggtttgtcttcaccagctttctttagatttctcttcatagtctccgatctttacaatctgggaattggttttcgggaactatttgataaatgctcttagaattccggtttaggggaatctgcgtttattgtgttctcattctgcattcgaatcaatctgttcataattgaagatatactagctatctgatttatgaaaaagttaaaacctttcatgttgagaatacaaagagacttactttatataggtattgctgtttaatgttgatagcttttgattcttgaatgcttttatagaacaacttcactcacaagacaatgttgatgttgtgttataactttcgataagatttgaatgttttgcatatagtgctcaatgtctcatgatgactcttgtgttgatagctgattttaacaactttgtttagtggtggaaacttatgattttttttttatgttaaccaattttgacagagtcataggagtaataaactgagtgaccgggaacttattcaaataatctgcaagaatctgttctatgggaaaataacctacttacactcggataaaggaccagaaatgtcaccaaccatgacagcaaatgaaaacacacttcttattcgtaagataccaattgctaataccaggtatgttttcaatttccaatctttggtgttccagtgtatgtttctgttacatcaatttctgttacatagtgtggtccatctcatagccgatacacactgtcatagtctttgtgcattgaattaattgaaataaactatagtgtctgtggcaaatgttactatatttgtgtcatttcttttaaccacttgaatcccctgagatctttgtgccccttcatatgatttatgaaatccatttgaattccatggttaaggtttgtattcattggagatgctgtcgtcttaaaggatccaaacgattcagataagtatctggtaagaagattagcagctgtagaaggattcgaaatggtatcgggtgatgaaaaagaggagccttttgttcttgagaagaatcagtgttgggtaacagctgaaaaccaggagctcaaagctaaggtacatacataactaaatgatcttatgcaaaaacccaactatatagtctatagtctctttctgttcactttatccttacatgtgtgtttttaacaggaagcatatgatagtagaacatttggtccagtttcaacagcagacattgttggaagagctatatactgtctgagaacagccgtcgatcacggacctgttcgaaacaggttaaacataatcttgtctcttaaatttgcatttcagtaatcttgttttgtttttgcttactctaatagttcccttcgatttcagccaaactgcaatgggacaagattctccaatcctggccgtggaattggacgtggacgagatggctaagaaccataaggcatagagagacgcactttcttgtgtttgtttattattgtcaaagctaaaattgccttctttgattgagatttgagaaaacaataaatcattacaacaatgaaactaaaatcctaaattacactttccaaaacaatcttgaaaccagttttgtttgtaccttgaaatatatatttttgcaccaaatcttgatgtagcataaaaattattataatttttaggtaatttttcaaaagaaagtgaaaaaaagtggtggtccaggagagatcgaaccagcgggccatagtggatctgagagacgccaaactatgatccatccactgctgtaagcgggaagtagtcgctgctctgtgaaaccagcctcacgcattgccttccgcctttagaaaccgactgagccaagccttcgcttgattcacacggattactcacagcttggactgggcagctcagaaacatgccaacaccagaaccgacccgaggaaccgaaccagtgtcccaccatcttattgtccccacatgggttacaagctactgttacttagctcgacgttgggtacatcgtttcgtgtaatatataaacaaacataaaatgagtagattgaccgatgtgggacaaaagactctgaatatagttttgatttgtgaattatctcttatgatgtgggccaaagccttattttgagtcccattatagactaataaaaagcccaatagtgaaatagtatagacagattttttttttttggtgtgggaaggggagtcaataaactccccccaatttattaagaactaaataaaaagaaattacaaacgaatagtacgagagacaccagacctattaacatcctcgaacatgacagatttgagatagaagaagagagcggcaaagaaatcaaatgcaagaagaacatgagttaatattattcccaataagactcacttacttgagaacatcagagattgaacatttaattactttctggtaacaacattcaggtaaaatccttgccaatttaccagcatctacgtagtgtcacaaaacctcaactataattttacgtactatctaaaggttgtgcttggttttgacctcaaactttgctttaaagctcatctttttgcgattcttgaacgcgttgctttgctcatcccaatagttagggaacttcaacctcgcaacaacgtgtggcataaaccaggcttcgtagatgaagctatttaaaaacaaacgatcagtaaaaggatacatctacacataatgatctataagcaaattcctcaaaaaggatgttacacacattttaataggcggccgagatatgataaccaacacctgcaggtcctcatgaccggtgtttttgacctgtaagaaccgtaataaatgattgtgagctagtttcataagataacacaaaagttattttagcagaagaaaacgtcatctttcactgattcataagaatatacacaacgttagcgaaaaggtcagttttctaataattgtctctacatgtgacataggacctgcggcacctctaacactctcaagcaatcttaaacataatagtatgtttttgctcttacttgttcaatgttatttcaactaacatctgttgcatacgaaattggattgtttatcatcagccttacatggagtttcttttgccctcaatcaagattacaattaaaggggaaactctaacaatctaggatttcaaactctaagaatcaaggaaagagccaagtcatctgaaacgatgtgggaggtagaaagagatacctgatgagcatcattgatcggaatatgaattgtactgttggcaaagattggaaattcgattggtttcccagggaaatttccatgtgtttcagcgagatacagagtaccactgccctttatgacaacagaaacctgttcacaggagtgcctgtgaattggtgtctctgaacctggagcaagcgtctgaagccatattttgacctgaacatccaaccatgataaaacacagataagagccgagcggataccaatggaaagagttttaaacctgtatcagctctgaacattgcctctttcattccatgcgatacggagccagcaacagtcatgtgggaaagacctggtctttcatagttatcctgaggaaggtcactaatattcctcacgattggccagcctagatcaccattcaagagtcaagaaccagtattaacatcacaatttctaagtatttaagctatgtaagcatttctaaacaaattttggatcctctaataagctacagatcgatgaaattgcagcgaatctgtaccatatcagcaaccaaattcactatgaagcattctgaagcacctccataaacctaatttagagttaaaatcaatcacaagttcagcacattttggtccatctgattctaccaggacatacgatttcacagctaactaagaccttagattctatcactgatacatagataaacaagatgaaatctgcattcacaatataactagatacaatctaatggcgagtagggatgaaaacaggcgaaacgcaccattgatgggacaaggagctcctagagaagtttcagagaagtagaacagaagaagcgcgacggaaaagacgacgacgatcggagatgaagaagcggaaccaacagaaagtacgatcattttctcgatgcttcgacgaactaattttcctctctttagaagtctcagaactgttaaaagagtaaagatacttcgaaacagaccccgaagctttatatatttctgaattaaacccgatactataaaaaagagtcagaaaatactatttttcattttcgataatccaatgttgaagataaaaggagggaattaattaattttagaaatattaagagaaagttttgatgatatatagtttttttattaatttatatcacatccaaagtaatcatatacgtattggtttaatgtgataatttcagatagtatagggcaataatgggaaatataagaaat

SEQ ID NO: 23392 - DNA, 575 bp, Arabidopsis thaliana landsberg
  unsure (1)..(575): unsure at all n locations
tacaagcggatacgatttggcttttggactaaacatgcttattcccatcccctttcaatcatccaattatgtcaaaaccctaaattgaatttagctaattaagagattgattttgagatgcttacagagaaggatttgccnnnnnnnnnnnnnnnnnnnnnnnnnnnnnnnnnnnnnnnnnnnnnnnnnnnnnnnnnnnnnnnnnnnnnnnnnnnnnnnnnnnnnnnnnnngagctaggcccgtcgttaccggcggacgcacctgtgaggattcctttcctcatcgcgtgaacgacccgacggatatcgaatcggaagagtaatcggcgattggaccgccgatagagatggagataatgtctacgccgtcgtgaatcgctgcttcgaatccggcgagtatgtccatgtcagcacagccggatctcgcccaacaaaccttgtacatcgctaacctcgccgacggaaccgcgccgcggcggatgccgtattgctatgccatagagactcgcgtttggactaaaacgccggctacggtggatgacgtgtgcgcccatgtccgtcgatatcgatcggtg

SEQ ID NO: 23393 - DNA, 962 bp, Arabidopsis thaliana landsberg
taagttgctgaattcagagagtcacacattaggtatgtgtaatgacaacacactccttcaccacacactcattcacccaactctttcattaatgtttaaggcgtgtgaagaaaacaaaagtgtagtgaattatgctgacgtggtcttttgaggaagaataaaagtttaagttatgttgagaagaggaaagagaaatatgattaaaatatgttcacccctcttaatattgtttactacattaggttaacagtattaattggttaaagttaataatactattaaaaaaacagatttttttgtgtgtatctaatatgatttgaattttaaaaatcggatacgaatttcttaaaaaatgaatagtgataccaaattctatacatatcatcataaaaaaatagaatagtatatatttgttcaaaccaaaactttgatttcgatgaatccaaataatcaattaaatattttttgatggaaggatactaaaccctaagataatatatagagaacccaaaggttttaatctaaaacaatgattaaatcacttaacatccttaatcaaaacaaacaattcattttaaaacgtatatagtacaatgtatacgtaaatagtatattcacaaaatagaatagtatctctcaaaaatcttccaaaatcaaaatcgatttattggctattttcctttagaatttccaacatcgtaaaccctttatcgcttctagatctaagaaatccataacatgatcgtcaatttgctgttcataattctcaattttattttccatggttttacaaattaaaattctcatatgaactttgatgggaaagtgaagattaatttgacataattggcgaaaggatttccccggatttttctagtattctctggctgacgaaggataaatatagtcagagtattattgcgctaatggtgttgttattaaatagagtaaatcagatttga

SEQ ID NO: 23394 - DNA, 2763 bp, Arabidopsis thaliana landsberg
cttctatattcacaccacactcataactaaaatcaatgtcaagaaacaacatacacctgcaatttttaacaattttgttgtatttggcttgaaaaggatacggtaatgcatcatttgcaggatccagattaacaatagcaaccttcctgcaacaacaacaaaatagtaactcaacgttaagagaatttacttacagagaagttctcacgaatctgcaaatctctctaccaaaaacaaagacaaggcaacaacatttcacaatgactctgctcaaaagtcagacaattcaaatttctggaattcaacactattatttactaaagtttgcaacttgtaaactttacaatgcgagggacagcgaaacaatcaatacaaacagaattacagatacaaaagccaagtaagcttcattctttgatccaaaaagagaagagaagagaaagaacatgaaacctgcccattagagagaggaactgagacattccattgcaataagtggtctttcccgatcctggaggacctattactacttgtccaaacaccatgcttctgaagacgaagaagaagattgataccaatcggagtcaaacacgttgtataatatcagagccagtcagacaaaaaaacacagtaattgcaaagcaaaatcatctaatcatcaaactaacataacatgaatattcaatagagaacatcaaaacccttctaaacactgaactcgtagcacaatagaaatcggaaatgtcatttgttcgtcggacacagaatacaaacacaatcctccaatattattaacccaattcctaaacctcgtttataatacaacaaacaattcactggagaaagagaagcagagaaacaatttgcttcaagagcatattcattatatcagaagcaactggagacacagaagaaaataaatagagaagctcgcctgtgtagttagccggagagagaagcaatgacaggtctgtttgccggagcaagagaaactcgcagccggagactcgtcgaagactcgattcaaggcgaagtaagctcgccgaagactcgatcggtatatttaaattagggctttaattttaattcggtttattcgtgctatactcgaaccgaaccggataatcgaaattaaaaagaaggaaacgatcaagttattattggagtatccgaacccaaaccgaaaagtgaatttcgggtcggtttgttttcggataagttaccaaggcctaataaattggtaaaccgtaaaccgatgcatcagggtttaaaatgtaacaaaataatattttaggtgacaattaaaaacgtaacaataaaacaaggggttatattcgaaacgtttgcacctaaccttataacttcgcatttttatactctgttctgatcgcagcaaagccgacgttgaactttctcgccgccggagcgcgtgatctccactctctgtcatcgaatcactctaattgaagattctccgatggcgattgtctatgctgttgtagcgagaggtaccgtggtattagctgaattcagcgccgttacgggaaacacaggcgccgtggtgcgacggatcctcgagaagctttcaccggaaatctccgatgaaagactttgtttctctcaagatcgttatatcttccatattcttagatctgatggtcttacctttctctgtatggccaatgatacctttggaagtaagtatttttcactttctccgaatcgtaatctctcttaagaaaatttagtctttgtaattgattctgagttttatgttttgatgtgttggtgattggattttcagggagggttccattttcgtatttggaagagattcatatgagattcatgaaaaactatggcaaagtggctcataatgctccagcttatgcaatgaatgatgaattctcaagggttttgcatcagcagatggagttcttctctagtaatcctagtgttgatactctcaatcgtgttagaggagaagtcagtgaggtataattgtttcttcgtatgatctctagatattactcagctatatccattgaaaaggttgaatttttatgagttattacgccttcttggctcacacaggcttctttaaatctgtcttgggtgaaagatgaagtttgttatctcattgttgtgttatcgtgtttacagattcgatcggtcatggtagagaacattgagaagataatggaaagaggtgataggattgagcttcttgttgataaaacagcaacaatgcaagatagctcgtttcacttcaggaagcaatctaagcgccttcgccgagctctttggatgaaaaatgctaagctcctgtaaggatctctctcacttctagattctcttcattccttttctttgctaactaagagatacgctcttctacattctaggtgtttcaactcgcctttgcagcatagtttattgatatgtttcttaaactagagatacagtagttctaagattcaacattattttcgattttgggaaattctcctcgacaaaatatctaatttttggctgataggaactacactgccttgattccacctctgcttaaagaaatttcattattgttttgttttgatgcttgagttccagatcacttttattaatcaacaaaactgcttttcttgtttgtgttcggcagggtcttgttgacatgcttgatagttttcatgctgtacataataatcgcatctatctgcggaggaatcactttaccatcatgcagatcttaaaatctggcgg

SEQ ID NO: 23395 - DNA, 2556 bp, Arabidopsis thaliana landsberg
accttcaaccctaaaacagaggaatttatgctagaaagaaatctattttataaagttagaatctaagagaaacctatcaaagtcttcctagaatagtaagcacatgtttcaatcctgtgaagggaagatctgtgtctcataaatatacatttccaagacctcaatgaacacattaagggtggcaagttgccagtttatttccacagaagaataggagtaagtaccatgttggcaggggagaagtctgaggctttctccaaatctgtaatcctcgagacatatagcacatgtttccccggccttgtggtgagcagaatcagtgaaggtgaagcaggggagtgtgtggacgagctttgcatctaacctgatggtcctggtgtgcctccctcgccattgggtccagtgtctgggtgcaaagaaggcaatcaacaggaaagtgacaataagaaggagagagaagaaggagatggccaacacagtccaagcgctccctctgtctggcggattaaggcagcattcaccatctcggcctctcgcgtactttctcaaaatctcaccggcgacatttgaaacgaagactgcatcaactgtaatgtcctgagggttcaccttcactgtgcaaaacagatgttggtcaatctccaaacttatgggggcgttgactaaattaaataactccaatgaaattcagctcaaccctagctcatcaggagaagaaaagatggaattttaaacttgggtgggaggcaaaaggcttactgacgatgagatcttcgttgtcaatgttgtcatagacaatcacagcttgaaaacctgagttctgggcattgagcagcttatcctcaaaagaacattcgcctctgattatcaaagcgaacttagtagttctgtgttgcgtccagttggatgcggcggcgtggagaagcggtgagcaaccgtcgagaggatctgcgacgtatagagctccacagattccgtttttggtcacggagccgtctgagaatcaaaatcaacttctttttaaccagattgttcgagaaattgtttcggataaggaaaaaggaagagggggagaaattgaccaaatttggctgggagatcggcaaaagaggcggagatggaattgaggacaacagtggcgagtgagactcgtaacagagaggagagaaaaggagctgcaactagtagacagcttgagacgactagtctcatctctctctcttttcgctttctcggtcgatcgatggcttttcagtttcaggctgtcgccgaaatgcattggtttcttcaccagagagaaccttctactcgtctcagaggctttaaagattagttcgttaatttatattttatatacggaatgaaaacgacgacgtacaaacaaagcctcctttgcaagcaaacaacccccaagccaaatgaagataacaaaacagttgcaatgatgtaaatgacttgttgttgagatttttatactaaaatgttactagctcaaagatttgcttctattctctgtaaagacgtggtttaattatctctatattgattgatttgtgtattatcaaagaaagggagattttttcccaaaactatttgttaaataaaattaaagaaaaggtaaatgactattgtcaaaactcaaaacagatcaacttcaattttaatgttgacatcaaagtagaagaaaaaaagatttaataaagtactattttagggtcaagattttaattaaatttgtaggaaaataagattattgtagaacctaattaattattacatatggtgaaatgacaatctagtcacagtaaaacaatagagagactctaacaaagaccgacggatctgagcaaaaacaaacgataaggatttggtcttttgttatgacccttgttttgctctctctccattttcttgttataagtttcctccacaccctgtaagaaagaaaaacatctgaaaactctgccatcggaaaatggagaaaccgggtatgtctttattgaaaggatcactttgtgttattgtttttcttcttctgttgtcgttggttgagagcgtcaatggcgggggatacgtgaagtatggaaccgaagctaaagtggttccggggaaactaaatgttcatcttgttccgcattcgcatgacgatgtcggctggttgaaaactgttgatcagtactacgtaggatctaacaacagaatccaggtatgttatctacagatgaatgatgaatcatatatatgtatgtatgtagagacgagtctaacgtactatatatcccaaatgaatcgtgagtttcagaacgcttgcgtgaggaacgtcctagactcggtggtggattctctacttcgtgatcccaatagaaagtttgtgtttgcggaaatggtaaaacattaataatggttttgttcataaaaccataatatatgttttcttcttcttcttcttcttcttcttatcttatgtgaatatcaatgtacatgcccccggccttctttacgcgttggtgggaagaaaaaagccccgagagacaagagcaagtgagcagactagtg

SEQ ID NO: 23396 - DNA, 632 bp, Arabidopsis thaliana landsberg
  unsure (1)..(632): unsure at all n locations
gtggatgtcttggacatcttgatgtaataaagtattatttccgctatttattttgaacaatgtgtgatgatgtccaactatgtaatcactatttacgtgagtttctgatcctgacacatagatggatcacattcgatttgccttccaaaatcgggtgtgcacataagtggtatcaaagccttgctgactgtaggaccgctaacctagacgaaaggtcactttaaggactatagaccctattctcaccttgacctttggtgtcacttcaaaagttggtcatcttgaccaattatatgttatattactatctatatactcatcttacaaaatttttatctcacttggcttttggtttacttgctagtcatatagttctgttctcactcttgtacttacgatgtcttttgtagatggcccatcttagatgcactgcatgtaagtcggtgatcctttcttgccctctcagcatgcgaacgtccactgcgccgcacggtgataggacagtcgagccacctggagagacttcaccgcacctgcactaggagcaggagcgtcgacgccaggagcaggagcatcaggactcttacccntcgcctcagtaggaggtggagctgcgaggtagtctccctaag

SEQ ID NO: 23397 - DNA, 2377 bp, Arabidopsis thaliana landsberg
acaacaacacaaccattatgtagttcttgtacttaatctaattatttttttgttaataaccaagacccacccttaattgggccttgttcacctctgggcccaatggcctttttctctcttttccttcactcttcttcttcttcttcttcttcttcttcttcttcttcttcttcctcgtgcataccttgctgtagttccctcttttccttcacttgctccctcatagttcgaacccgtgcataccttttaatttctgttgaatttctcattgtctttggtatggtcctaatctcaatacgtctctgtttctcatccatctctccagggatctgaaatttcttcctctgcatgtgctctcgtggtttcttccttgataattccttgctcattccctgcatgtgactcccgatcatcgtcttcctcttccaagttacgaatcaaaatcatagccgagattcagatttcatagacaatggcgactaaggcggcttcgtcttccagcctccccaaatctggagccatttccaaaggctacaatttcgcttcgacttgggaacaggtaatcacacaatctgatgatccaggaagatccattgatcagtctagtgtctggatctgaatgatgctctgtttgttgagaatatactgaattgaaattcccgttgcagagcgctcctttgacagagcagcaacaagcagctattgtttctttatcccacgcagtcgctgagcggccatttcctgccaatcttgtgagtctaatgttattagttttggatttagttcagaatgttttcccttttttgtggtttgatgtcagtgttagttcatggttttaggtacatgagcatgttcacaggcctgagaatggcttgtctgtctccgtggaggacacacatttgggagattctggagcaattgaagctgttttggttaatacaaatcaggtagtctcttgtactgctacttgatattccaatgcttagctgatttgcagtattataggagttgcttttgtatttgtgggcatctcttttttcttgcatctttatatgtgtactaatgcgacttcattttgacgtatgttggttttattacagttctacaaatggtttactgatcttgaatcagcgatgaagtctgaggttagtccgttagtgaaagtcatgttgtaccttggttaaaagttgggaaagattacttgaaatgtgtctaaaatgattttctctttttctgagttagacagaggaaaagtatcggcactatgttagtactttaactgagcgcatccagacgtgtgataatatacttcaccaggcaggttttcaacaagttttatgaattgctgtggtcttatcttgccaataaattataacacgtctgcttcattattgaacttgggatttctcctgcgcaggttgatgaaacacttgacctatttaacgaactgcagctacaacatcaaggagtaacaacaaagactaaaactcttcatgacgcatgtgaccgactggtaccgtttcctcttgtcttttatgcagcaagattatttattgtttctcttaatctcttgcatgttttcccgtcctacctgctatacataatcaaaatgacaaacaaaagttgcttaatgcatcatggctgttcaagagtttctgactcacactatttgactgttgttgtttgcttggctgagctaattttcactttcttccactttttctagttaatggagaagcagaaattgatggaatttgcagaagctctaaggagtaagctcaactattttgatgaactggagaatgtaagatttacattctggcctaccgacataatttttggcacatattaaagtatcagcatgtagttgcttcggatggtgctcttgttttattcattaacgtaatatatttgaattttggcctacttgtggtactttagctcatagttctttactgaagactggttgtagatttacgaggaaataactcaacaaggtgttaaactgctctaatatcttcttctttctttttttcgcaggtatcctctaatttttattcaccaaatatgaatgtatcaaactcaaactttctcccactactgaaacggctggatgagtgcatatcgtgagtaaattgattttacattcaatattatgaaatttacatccactacttggcaattttccataagaatgccgcactaattctttcatttcccttgaattgattgtaatatgtctcttttaccttgaattctgtaggtacatcgaagataatcctcaatatgcggagtcgaaagtttatttgctcaaatttcgtcaactccaggtactacaaagagcccttcctgtctctgtcactcgtccctctgatgt

SEQ ID NO: 23398 - DNA, 3152 bp, Arabidopsis thaliana landsberg
  unsure (1)..(3152): unsure at all n locations
caagcggacacgttcggtgagaagccttgcgctaggagtgtgttcgcttttgcggttgttgggaaacacattttggtctttggaggtgagatagcgatggacccaaaagctcacgaaggtccgggtcaattgagtggtggaacttttgcgttggatacagagacgttgaagtgggagaagctggataagttaggtgaagaggaagagactccgagtatcagaggttggtctgcgtccacgacagggatcattgatggtaagaaaggactggtgatgtttggtgggaaagctcaaaccaatgatcggtttggtgatctcttcttttatggagttgactctgcataaacgctgttcggtgacggtgatgatgagtgtttgtaaatatgtgtgtgtgatgcaataagggagggtcgtgaatcgtaaaactatatgatcctgtatgtttgtttgcatgtttcgtgtacggtgtaccaataaatttcgataaaataaaataaataaacgaacaatgatgaatgtgtttgaaactaaaccaatttagaccaagactgcatttcgatttatattaaaccggtatatgcataatttaatgaaccggattgtttggttttaagtcctcttattattatgaaaacaagtcgaggaggagattttatggcgcgataacggcggagtgcgacccccgtcactctcgtcgagttttggtggaggctttcaaaatcaatgagcattttgtgatttcattttcgtatatcttatcgtcttttcactagcaagaacaaatgctctttccttttctctggggttcgctaattatattcaaatgctgatttagttaagaacaccaaaattagttttgactacagtcatgaaacgaaaccaatcttttgaattgaatttagggttttagcttctcggattgatgttttagggttttattattttggctgtctacttgttgatttttgtgtttcaaagcacactacaagttcagctctcatctgaaaatagatctctcttggtgtgtttccttttatgagaattcatgagattggagtttgatctgttagaaataatttcagttacaattgagagacaatacacttgcgagagttttcatgcgcacactttatttcattgttatctgagaaaattagttcaaactgtgacgcagattgttgtatttggtaagtcctctaatgctacaagtttgtttattcacattaaactgttttgtatcattggtgggcggtgccatatgcactccacagagggatctcatgaatgtctagtttgagactgaattcttgaaactggtaatatagtctctgactctcttatgtttactcgatccattttatcttaacaggatgctggaagatgacgtcttgcgttataaaagaaagttcagctcgagttatttcaagaattagagaagatccaaaacagtatatcataagcctctttctcaaccaatataccaatacatgcatcaagacattgtcagccaaacagagatcttaataaagggaaccaaaagttacagaagctagtaaaacctctttcttacatcaggtaacaatatatccacatactacatagtctacatttacatatcacttttttgttctacgttcttcttattattaaaactatcccatcttgaatccagagtcataaacaatctaactggattgtcttccttgcgcttctccggaccaactatcttgactaaccacttcggcttgaatgaagcaataacgtgtgccattatcaatccaagtaacagtccaggccaataccctataaccactgctttccagtttaacacttcttcatcttcgtcttcttcctttggctgtggtgttggtggcgcaaagcaacttccttggagaggaagaccacaaagacctgcattcccttcaaaggaggatttagattgcccagtgatttgtgtcccttgtggaatttcacctctgagttggttatgggccacacttatgtacgccaaaaacgagagggtcttcagtccattaggaatagtccctgagagttggtttcttgagaggtctagtgactccagctctgtcacgtttgccaaagacagaggaatatggcctgtgaatgcgttgtttgataagttgagtgcaatcaattccttcaaaagaccaatagattctggaatctctccttcaagcttgttcccagagaaatcaatggcggagtagaaagtaagaaccttgccttgctccatgtatagacctttgtattgcaaatccaaagtatcttcataaacaaaccgatcactcgaatagtctcccatatatagcctctcttcatcatacatcttgagagattttacactccaattcgcaaagtaattcgttggtaagcttcccgtaaatctgttatgcgatatttcaagtatctggagcttgggaaatgcaagaggactttgatcatctggtggagacataggaccatggaaactgtttgaacggagagtaaggactttcaaattgggcaatgccttgagccacaagggaaatgaatcattgattctgttgtgatccacactaagaaaccttatgaatgagcaattcacgagagatctcggaagttctccggttagttgattgtatccaacatcaagtgtctgcgtcaaagcaccgctataaaactcgtctggaatgtttccttccaaggtgttcttccggagattcactatggtgaaattacccatacatggaggaatagagccagtgaagttgttgtaggacagatcaagaacatcaagagaggttctgttacagaccgagagaggaatgtctcctgtgaaactattgttccaagcagacaagttgatgatagagaccggtggattagggaatgatcctttgaaagagtttaaagcaatatctagtacttggaccgatgagttggctaaaacatgatccaatgaaccgttgaaaccggtgaatgaattgttactaagatccagagagactaaaagaggaagactccatatccaatcaggaacgtttcctttgattctgttgctggaaagatctaaataccataacttctttaaggactntaagaatctggngaattcactgatgttgcatccagacaagagcaagatctccata

SEQ ID NO: 23399 - DNA, 1634 bp, Arabidopsis thaliana landsberg
cttaaactctgtctctatggattgcgtggtttcaatggattgtcttccagatgatctccttgtccaaatcttatatttacttcccacgaaagaggctgtttcaacctctgttctctccaagagatggaggactctgtttactcgcagtgataatcttgactttcacaatcccatctccgggcgccccgaagatatcctaaagagtttcaatgatttcgtggacagttcattagcttttcaaggtggtaaacatataaaaaagttctcacttcatactaaaactaatacatttgaatatgacgtacttgaccactggatttgtaatgccctggaacatggtgtctctgaacttcatctacacctaatgcatgaatcgtggccgtggttgttttctatcccatctaaagttttcaacagctcatcactggttaagctgtcattgggatcgagactatactgcccaagttttcctccggatacatctctcccagcactaaaggttctgctccttgattcaatcttgtttcgggatgatcaattatctaatgtgtttctcgctgcatgccctgcacttgaggacttaaccatacatcacacgtatcacccatgcgtcatatccagcaaaagcattaagaaactttcacttagcgttaacagtggttattatggtgctggttatattcttacacttgacacgccgagtgttgtcgacctctactactctgattcccctcggcataacgctccactttttcatttagattcacttgcgaaagttacattggaccttcatttcatagaagataacaatcgcgaggtgcaaaatgacgctgatgtgaaaaatctcattagggagatatgcaacgtcaagacccttcacttgacttgttctgctgtcgaggtaagttcttaatgtatcgtctctcatgattctttctgttaaaaagctgaacaaaggtggactaccaatgttcaacaaccttgttgagttagtgttttcgagtaaaaaagaaggttggagagtgcttctgcctcttctgctagagaattctccaaaccttgaaactctggttctctcggtatgaagaaaaccctgaacaaatcttcatttatatgtatgattgtgacatgtgattaaagtagtatcttctcttgatgcttcaggatctgcatcgttacacatttggacgaagacatcggtttgtagggattccaattcccccgaataaccaaataaaggtactgcgtatcatgcagtaccaaggaagtgcaactgtactgaaacacattagtcatttcttactgaatatggattgtcttgaagttatgaaagtcaacgttgcagctgcattggatgaccccaaaaagatgcagctcacagaggatctgttaaagcttcccacagcttcatgcaagctcaagattcaagtcctgtgatcatcctcatccataaccaagttattacatatttcagaaatttaatagcaacttcttttcttttttttctttttttctgttttagtgatttatggttaacgaaaaatatttcgtacacagcaatcagagtctctaacgtgaactatcagtgagaaactttaagcaacctcgaggcttcgtgactaaactcaaaacat

SEQ ID NO: 23400 - DNA, 505 bp, Arabidopsis thaliana landsberg
  unsure (1)..(505): unsure at all n locations
tgatctccagacttcttcttgtggaattttggaatcaacgagtaatgttagtgccttctgatatagagccctatctatggggactttgagaagacgttccttgctgacatctactttctcggtacaatcactggggcgaggtgcattcgattcaacctcacttatttctccagacttcttttctgtgatttcttgagatgtaacaactgcatcagaggcgctggcattctcagacctatcacgttcaatgtcttcctttatttctctccatgtgtcacgttcataacatgttccatctgcccgagtaaaacgcttcagacaatggattttggtatccgttggcaactctggtgtctccacttgggttccnnnnnnnnnnnnnnnnnnnnnntaaaacattttctcaaatgatccctcaatcttcgccagcttggcactgccgaaaacatcaatgacttcgagattttcgagtttttcgatgtttgggatggcgtctaggttgatg

SEQ ID NO: 23401 - DNA, 714 bp, Arabidopsis thaliana landsberg
ctaccccctatgaatttgtagaaaatgttaatctatttgtaaacttgaaagcgaaattcataaaaatagttacaaatgtgcttattgactaaaacgtgacccttataaaagtaatggctatctccaccacgacatctatgtatacaagtttgagtcaatgtagggtggaagacgtgttaccttcactttcaagaacttcttaagagttatcagagcatcattatcaataggtttttaaaaagtttaaaaaaattcttaaaatattatataaaataaaatatgaataaaaaatagaaaaaagttcttagaaaagttaaattgactcttcaataagagatttttgatacattctcttaacttattaagagtctcctaatatttaattattattttgtatataaaaatgttaagaattttattaagaacccatcaataaggatggtctcatgtcgagttgtagtttaaattttttttgtagcggagttcaccagcgaaaaatatatatacaataattttatgaatataacggtctattcatgataaaaacatcattagttgcggtgtctagagtctagaccatatgttttctcaagactagttaccacataaaccacctttttgattagcttagattgtaggttgagtaagcctgaaacgtgtcttttcaatccttttattttcaaaaaattccttcatttctttttgttgaaagga

SEQ ID NO: 23402 - DNA, 763 bp, Arabidopsis thaliana landsberg
caaacgttgtgtggtaattgattaaatctatcctctgtcaagctcattttgtataacctatctcgggttcctctttgtgaggtgtgtaagtggaactcttccccagagatgccgccacagcacccttcgtatgttctcctcctcgtcgagcaccacaaacccttacttgatgtatagtctgatacattatggaagttgtttggatgatattgatgtaacaagcactgtacactattttgacccggtcaaggaagatgaaattattgtcagagacaaggcctttcccatggagttgcgtaatacgagtctggttggaatgtcccacggatggggagttttcaatgtggagacaggtgatggtagacataaagctgtttatgttagcgactactgcaatccttgtggctccaaaccaaatcccaaaatcattcctttgcatcccatgtatcccatcggtaaacctaatattactcaattacgcctcatcactaacgctgcaatgacttgttcacctgatcaaagtaaagattttgtagtggctgccaattgtttaggacttgagatccatttctttaggccttgtggcaaaactgacaactactcgggtttaggctataaaaccgaatcccacttttttgatcagtcaaaggttatgtattcaaagagagataaaaagttctacactcctagtgttggaggccatttgttgggtttctgggattcttgcttcgaggatttgactgcctccaaaaacatgagttgc

SEQ ID NO: 23403 - DNA, 657 bp, Arabidopsis thaliana landsberg
  unsure (1)..(657): unsure at all n locations
taatagaaaacttgtcaacagctatgaattcgcgatatcaagtaacactaatattagcgactaaggggtattatatgggttaacaacgacagtttaaaactgcgttctcggctaataaaacaattttacaattagtgtctaatatgattctaatatgaagacaatgttaataaaatgattacgtgttcataccattacccaagttttcggtggcaaaccgatataagccaaaataaaccatcaccataataaaagaacccatccgggggaccataaccaaatagcaaaacaaaacaggtcataaacacagagttctgatacgaaatagttcgataactttgaagttatgaagcaacaccagcaagtattannnnnnnnnnnnnnnnnnnnncttcttgatccaaggcagctacatcaaaattcacacactcctcgatcccaccagcggcatgggcgtgaatgagaaacaacgagaaaacgcctgaatcaaaggacgatgtgacctgaggtatccatgcaggcgatcaatcgagaaagggtgtacgagatgggatcccggacgagtttcctgcttgaagaggtaaggacatacagcaagcgctggagtctgccacatcgctagtcttgcgactgaatattagatcagagttggacttg

SEQ ID NO: 23404 - DNA, 596 bp, Arabidopsis thaliana landsberg
gtttctccatcttctagttgattctccgcagtttgtaccatccggggtcgtttggtcgcttgttgcatttcgcggaagtgaatttgggggtccgaagatggttcgccgaactctagaatttcctgcatttaaagaacggacacgagattgaatggtactaacattttgactgagtgatacatggtctgtttgcaatgtttcgacggttttttccacgcttgaaaacttttgcgtcatatctgtcatagcttgttgcatggccttgagggtttcggctatcgaaacgttggtagcatcctctccagacattgaggatcacttcaggtatgtaatgcacagaaaaaatctgatgactcaagaatcgtccgtccccacagacggcgccaaaatgtggatgtcggattcacactcaagtatttatttgtttagtgagaaggattattcttgaggtcaaatatactagaaagtaagtagatgattatagagaaaactatgagtattgtaaaagaaaaaagaaaatgtatagctaatttgcccaaaaatatgcgtgtgtcttacatgacctttgactcacaatatatatcaaagacccattt

SEQ ID NO: 23405 - DNA, 2934 bp, Arabidopsis thaliana landsberg
acatccaactgcgagtaagttatgcacgctcctaatagagaaccccaaactgcagcatctggttcacagttcatactttcaatcatttccattgcctcattaaaccgtcgcgcacgcccaagcatatctaccatgcaagcataatgcgcggtgattggcttaaccccaaaaactgattccatagattcatagatcttaagcccttcctcatccatcccagcgtaactacatgctgagagagttgcaacgaaggtgacttcgttaggcttagtactaccagacaaaggcatctcacagaaaacctttaatgcttcctctccaagaccgtgtgaggcataaccagatatgattgaattccacatgataatgtcctttgaaggaaacctgtcaaatattagtttagacttcacaagctcgccgcatttaatgtacattgtcattaaaacagacgcaacatacacatcaacatcaaattgacatctaaccaactgagcatggacctgtttaccatggtggaggcttgctaagctggcgcagaccgaaagaatgcttatcaatgttggaaaagtgggtctaactccctgtttctgcatcagaataaataaatcaagagcctccaattcaaaaccgtttctttcgtgaattttgatcaccgtttgccaagatgcatcatttctctccttcattgaatcaaaaacccttcttgcttttgctatctctcctttctgtccaagcccggaaatcatagcattacacgcaataactggcttcactggcataacttcaaaaagttcttcagcatcctcaattcgcccattctgtacatagcccataagcatggaagtccatgaaacttcagttttctctggcatcacatcaaaaatcttcctagcatcatccacacgattgttttgcccatatcctgtgaccattgtagtccaagtaatcacacttctctctgacatctcatcaaaaatctctcttgcctcatccactcttccttctttgcacaatccatgaatcatactagtccttgcaatattatctttatccggtatcatttcatacagcttacacgcatcatcgattcgcccatcttgcaaaaacccaataagcatcacagtccaagaaaccttattcttctcaggcattttccaaaacaacgactctgccacatcaaccttaccattgtgcacataccctttcaccaacgccgtccatgagacaacattcctctcaggcattaaatcaaacactttcctagcttcgtcaatctccccgttcttcatatacccggacaccaaaccattccaagagatgatgtttctgtcaggcatttcatcgaacagtttccgtgcatctcggggcattagattcgcaaagtacccagcaaccatagagttccaggaagagattgatttcgagtcacatgaatcgaaaagcttccgagcttcatgaatcttgccgatacgagagagatgagtgattctaacatttgcagtgggaggagggatggttgtgctatacgttcgacgtaggagtatctgtgacttcatactcagagtactaccgagctctgagtgatgaacctttaacttgcagaacatgagttacaacaaaaacaaaaacctaaagaggaaacctttatcaaaaagagatttaactaaaaagtaaaaaacaaatcttgtaggacaaggaacgatttacggtctagaaatacatttctatagcccaattgtagttttctatacagatattcgacctaacgaatcaaattaggtacgtatgaaagtaaaaacaattggaagttaattggttattacgtatacatatatgggtactcttgactttttaacacctaacatatttgggtctctttaaactccctctgtttcacggattctggtaataaaactccgaaatgctctgaaaaatcaccaaggcaacactaatatgaagttcttaaagataaagatcgacaattccccttctcactccattctcaatgaaaaacttcaatcttactcacaggttctcttagatatcatttacacacacacacacaaacaactcagtggtaattacattactatctctgtcttatcaaaatctcaatctgaatataaattccagaatcgttatggcgccaatggcgagaatgagatcatacggtaacattccacaacctcgcgtcgccttgtattactgtcaaagaacaactccgggaggtcttctcatcagtgaagccaccggagtttctgaaaccgccatggcgtaagtcttttctaaaaccaattcacagaaagttgactttttatgattttcattgacttttttaatctcttaaaggtatcaaaacatgccagggatatggaggaaagaacaaatcgaagcatggaagcccatcgttgacgctgttcactctcacggcggcatcttcttctgccagctctggcacgctggtcgcgtttctcatcaaggtttatcaaagaaactgttttacaagtttactcttttaagatttgaaaattgctaaacatggttctttgtgtaaatatttgtagattgtcagccaaatggagaatctccggtctcttcaacagataagccattcgccgatgatccatcgaatgagtttacacctccgagaaggttaagaactgacgaaatcccgacaattatcaatgattttcgtctcgctgcaagaaacgcaaccgaagctggtaaaaaaatccaaactttcactttccaaccaaaccctagaaaaaaagattccaacctaatttttttattatctttttctaggttttgatggagtagagatgcatggagctcacgggtacttgattgaccagtttatgaaagactctgttaacgatcgaaccgatagttacggcggatctctagagaatcgatgtagattcgtttacaagt

SEQ ID NO: 23406 - DNA, 595 bp, Arabidopsis thaliana landsberg
tggttgaatcttcagttccaagcaatctaatcttgagattctttaacgtttcttcttcgtttggaaaattgttgaaccaaaaagagaaacggcggaggaacaggtggacataaaactccccagaagaatccgtacctatctctttttcagttctttttttaaaatcaatggtcttttcaccggacaaaacagcgttgaacgagtgatatatgatcctgttatcaggtaagcacaaataagctaacaacatgaacatagtcaaaagccctgtcgtctcatgaaaagttactttttgataactcgaagttgttcaagctcgtgcttagatttgttgaggaagtatacaaatcatcaagcaaactctataataacatagactatagtaaaatatgaattcaataaatctataccaaactcatgatagaagtatttacaacactggtaaaaccctaaaaacctagatttgaatttcatccccaagcatctaagctttagattactcggagcagtaattacaacacctgaaaataaaaatcaccaccacatgattcaaccctaaaagaataaaaaaaagaaaacccctaaccaatccatg

SEQ ID NO: 23407 - DNA, 1853 bp, Arabidopsis thaliana landsberg
  unsure (1)..(1853): unsure at all n locations
gccaaatttgatatcgttcaaattacctagaactactctctcaaataagagatcaattatagtactttaggatcgaattcacggggttcttttgttcaaacagtgagttaaatgttgatattaagctagcagggtatgagtgaaaataaaagagaacaaagtaaaaagacaacagattgattgtgttgtaaacgatttaataaagagctaggaacaaggtattctcaggaaactattggttagtagatctaatgaaagctaggttgttatcgaatcattcttaaactcgaactctaattatggaataaccggtggggtgccgcaaaactccctatatctatagctaataataaccggagaagccgagaaactatcaacctaaatatgcattcttaatgagttcaattgttcatcttagtagataggccgatttttattacacacctataaaccaggctcatcaaataatagatccaactatagatacctatagcgggtatatctattgtctgcattcaagttctagttagctaatctagaactagcattaagaacaattaaagatgaagaatcctaacagataacctagcaagggggcaatctactaaatcatctaaatccctaatgagaaaccctaaacctaacaagaaaattactcaagcatggagattgtagcacacaacatgattagaatagaaatcttataagaaaataacaagagaaaagaatttagaaaaatcttctctaaaggaagtttccacacggttatgctcccaagaacagaatagaaaaagggaatagcctcccaaagcttacttccaaacaatgacctaaaaactatatatataggttctaaaaacgtgttgggctttatttaaaaataggagaaacttctgggccgaatctgtaaattttcaaaacttcaataagttgcatcccaaaattactattaggtattcgtgtcgctcaacaccatgggtggtgtcgttcgacacctacgtgcattttcgtctccggattgcttctacagcttaagctttctgttttgctccagaatgctccataatcttcaaatgaatctcaaacatataaagacccgaaaaagactagaaaagactctaaaaataacaaatagactctaaaaactatacctaaaacatagctaaaaacagtgaaaatcgaggtatatcaagaagcataagaaaaagtcgatgaaccataaagaggcaagggagatagaggtttctttggccacaagaataataatgattgttgcacatcataaactcatgaggctaagtattgttaagaattcatgaatgctacattgtgtgaaattgttgttgttttttttgtatgaaactcatttaagttattagatttgatcattgcatgaaaatattgcattccataattacaataataaaatgttcatatatgtatatataatatttctatttgtaggttaaaggatgaattattttttttgtattaaaaagttttggaccaaagatttaatcctcctacaaacaaactatatccaatcatagctgaaaactaagtcagaagttttattatctaaaacaaatcagaaacaggcatttcttcattgtctgatggtcgattggttggtgacgtgcctcgactctcgacagtgtggaggcatggcaaaaaataaaaataataattggtatgttgaagggtaaaacggttaaaaggaacgaaagaaaaatatgttaatgtgtgagtatatttaaaaataatttttttagataaaaagacacactntatatgaggttttcataatatattgatccataataaataagaactttatcaaaaattaataaaag

SEQ ID NO: 23408 - DNA, 296 bp, Arabidopsis thaliana landsberg
  unsure (1)..(296): unsure at all n locations
atcgcagtacgtcccatgtaggattcccatctagagaagaagctcttgaaatcttctgtaattatgcttttgaacaaagctctccaccggatgcttgggagaagcttnnnnnnnnnnnnnnnnnnnnnnntggtaacctcccattgggtctttgtgtggatgggttcatcttatttgggaaaaagcaggacaagggaatcggagtgcatagctaaaacctatccggcaaaaaatcatgactataaaagcgcttaaaggtccaaaagatcaagctatttctccctggattttttaat

SEQ ID NO: 23409 - DNA, 551 bp, Arabidopsis thaliana landsberg
ctcttaaaatgttcagctctacttgagtgtatacatgcaaaaaatgaattgaagattttatttgatcatttttatattcttcccacaatgttttatgtgttttggtttgatttaattcttgtttgctgatttttaactttccattatactgattgtgttctatatatccacaatattatgtccacaatataatgtccaataaatccaaaaaaaaaatgtaaaattgatgagtgcttcatacttgtgtattgttgagtgtccaatatgatcaatcaattagttaaccggttatcttgcttaggtttgtagcggtatctaaaaaaaacgtatccagtcagggcataaagagacggttgagatcttcacacaaagaaaggagttacttgacgattacagacggttgttatgcagtcattatttcgatgtcgacaaaggtacaatgaaaaaatatccttaaaagtcgtaacacgtttacgatactcaattacgctattaggttattaacgtgaatgctcttgttttgttttggatagggaatgatggatgaagtt

SEQ ID NO: 23410 - DNA, 714 bp, Arabidopsis thaliana landsberg
atcagtggtttttggtttttttccccaaaagttgaagttaattaaccaaattgttaaacttgaccaaagttaaaattcagtcaagctaaacccaatggaagaaaaataagatatcagaagaccaaaatgcctaacaactcaaagtcagcaaacaaaatcatcgaaagacagagcacttctggtggccgacaagtctgccttctccttctccgcaagagcacccaggtctgaccacttttgcttcaatatcactagattttcctctatctcatggagcctggccaaaccagacatctcttcctccttcttttcctttagttggtccagcttcttctccaaccaatcaaccttaaaccctgcatctctcaagtatgtcaacgctacgtctgcttccacaagatcttcattcgagagctcctccagtgactggcacatcgtttcgattaagctgagcaggaaattcatacatgcgttcctcagttgttggttctttccacgaaactccactgatatgtctgggtgtctttcgagtatacgtctcacagattccgcctgcgattccaaatatatgagaaagagagagagagcattctttgtggggtttggaaacagagagaacatactctactataccatatattacaataacaattgaagatgaaacccgccttcttacctttggagaaacaaccacaaacccattgatatccactg

SEQ ID NO: 23411 - DNA, 594 bp, Arabidopsis thaliana landsberg
gtgtcgtggcatgcctccgctccttaacgaggtcttcttaattctctctctctctgtttcttctatttttatgcgtccaatactttcaacatatgaagcattgattaacaggtgaagcctgcacttgaaatacatcttaattcaagtgataaagaaatcttgagatatgtttgcttcgcaatttcgcatctgtgttatggttcagtagatggaatccaacgtgtgattcaagctggttttgtcccaaaactagttagagttctccggttagtatttctcaaaatcctttgtgacatctgacatgtttggatactgaaggctgacagttttttcttttttcagacgcccttccccagttttatctgctcctgaacttcgtaccattgggactctagttactggaaataatcaccagagccaagtatgtaattcatgttccacttatgttgtccatcttgtggagtaatcgtttatcaaaaacgataaatctgtcgaaagcttatgtttatcacaatgtctatagaatgtttagtagaagggatgcagtgcttactttgttatatgtcccttggttacaatgttatgattagattt

SEQ ID NO: 23412 - DNA, 1700 bp, Arabidopsis thaliana landsberg
ctattggtttgtctactgggtttaatgtcttgattcctgctttatatgtgagattttcaagcgcttgcgagaagactcgcggctttgtatccgatgatttcgtgttgagtgtcaagcagttttttcagtatgggataccatcagcagcgatgacaacgtaaaaacattcatcttcttcatcgttggtgcattcttttctttcttggcttgatttgtttttggtttctatatgcagcatagaatggtcgttgtttgagctccttatcttatcctcaggactcctcccaaacccgaaactcgagacctctgttctatcgatttggtaatctatctttctctctggatctctgtctccctttttacatatgtttcttgtatcaggagggcttgtcttaaatacatataggtctagtgagtaaatgttgattaataaaattagatatagcttgtctttactgatgcaatctttttggttgttgttgttgttgttgttgttgttttgttgatgatagtcttacaacatcatctctccactgcgtcattccaatgggtatcggggctgctggaaggtatgattccgagaaaaccgactaaatatttgtttgggaattttcagactagtcacaatgtttactttggcagcacacggatttcaaacgaattgggagcgggaaatccggaggttgctaggctggcagtgtttgccggtatattcctttggttcctagaggctaccatttgtatcacacttctgttcacttgcaaaaatattttttggctacgcgttcagcaatagcaaagaagttgtggactatgtcacggagctatcttcgctgctttgtctttcatttatggtcgatggattttcttcagtgcttgatggtattaagatcaaacccttcaattagtgaatgataaaagatcctatctcgcgactcaaatatgacttttatgaaaaaggggttgctaggggaagtgggtggcaaaatattggagcttgggcaaatgtggtggcttactatctcctaggagctcctgttggatttttcttaggattttggggtcatatgaacggcaaagggctatggattggtgtgatcgttgggtccactgctcaagggatcatactagctatagtcactgcttgcctgagttgggaggagcaggtcaatagcaatcttaaatatatttttggacatttgatgaatcttttttttaccccatactgaagttgtttacaattggaaattgcaggctgccaaggcaagagaaagaatagttggaagaacattggagcgaaaatcacacacttttaaacgtaactagtatagttgtactccttccgtttagtatacacgaaatataggagaatacatggtcacacatgccaagtatacacaaataaatttaagtttaaggttttcacacacgtattaaaaaacaaataaatttattagcttaaactttgttaatatattttctataaagttattgatcaatacattaaatccgtgggataaagctctaatgtatcaaacaattgcattgaaaatataaaacaatatatattttaaaataattttttttttttaaatgacacttaatcttgtataagtttaacatcaagtaaaaatttgagtgactaatttatgtttgattggattttccacagtttatcttataaactgaactctcatatg

SEQ ID NO: 23413 - DNA, 735 bp, Arabidopsis thaliana landsberg
cattaaaaccggggctttcctgaatgggtggggctgcagggagatcctcaatagcaccctctgaagcctgctcctggtcctcttcttggacaggtccttgctcggagatgagcacgtactctccgtcggcaagattgcaatctaatgaatgcaatgcgtaagatatatgcatgatatgatatgtgcttttagaaattacaacttcaaaggtgtatgatcttctgagtttaaacaagttaactttacttatgtaaaacccttgggtgtatacctggtaattgggtcaaacttagctaaggtaggtggtagattaaatttttgggttccactgaattcctattaagtcctagggagaattgataagttttcaagttagacttattggggtgaggtttatttcttcttcccttttttttattctctttaatgttttggggtaggtttgaactacaagttgcttttataaaattctaaaaattctgcaaaaattacagtggctgggtactggtgcatgtttctctgtctcaaaatttgggaatcagaaagtgaatagttttctctggacaaaattattaaatcctagggcagaaggggtgctttgatctacaactattatttaacagtgggtaattctctgaaactcatttttgctggcttttaggtgttataacatgacttgatacaaatttctagttattaataccttttaattatttttctatggttttctcaaag

SEQ ID NO: 23414 - DNA, 508 bp, Arabidopsis thaliana landsberg
cattaaatttatttcataaacttgtatctatagatagtcatatcttcacattaccataatatagaggttctctttttaccactatccaaagtccccacaatctttatcatctttttatatattttggatctcaactctagcccttttctattggttctcaaaatttattatagacatatagtagaaacaaatgttaaatactttggacgtaaacattaaaactaaaaaggaagtaatcataagccaacaagtttattaagatggaaattattcaaatgttagattactgttattatgtgaatatgtcacacttaatttacttacatgcagagagagaacaacattggtagtaataacgccgacatatggcagcagcagcatgatacgcaagaagtcgtgtcgtttgaacattttccggcggaaagttcaccggagatctcccatgacgtcgagagcacagcatctactccagcaactactgttggagacagaaaacacgctatggctg

SEQ ID NO: 23415 - DNA, 1481 bp, Arabidopsis thaliana landsberg
  unsure (1)..(1481): unsure at all n locations
agactaacttttttaggaatctcatgatcaaatggaagaagaaaatctccaggccagctgacaatctgcataaacaacagcaagtcaacaaatcctttttctgcttccctattccattattccccaagggccatgttttcgatagggaggaattagtgctgctatggatggcaatagacctcttataccaaccaaggagcagcaccagattggaaatgattaccttggtgctgtagtttgctcaaatcttttttttcggagattggatagctttgtgatgcatgatcttatgaatgatttggcataagctctttcagaagaattttgtttcagactggaagatgacaacactacggagataccaagcacaactcgatatttttcatttcctagaagccaatgtgatattgtaatcatatactagtactaaagatatgacaacattactaaattaaatcatatagaaaaaatccaaagcacacactttgatatatcaattgaaagaatagatttacagctcataaatttgaaaagcacaactaggacctaaaggcacactttcaatcagatcacacatagagatttcttgaactggaagaaataaagaacaaatgttgatcactacaagcctacaaggtaagtttcatatggtgaggttttcttgtagtgcaaggaacgatcctatgatcttgccaccgagatctgggaatgtctcccatccaggaagagaactcactttgcctgttctatcgacttgaactggatacttaagaagatgacctgacatctctgtgacttcctctgctgcatactgtccccaattcagctcactcaattgcctaactcgtctcacacattccatgttctctggttcctcgaattcttgctctagaaaccctagatgttctgcccataacgacattctatatccaaagatctgcaagaaattgagacaaaccagggttcagacaagtttaagagaacatacattggtgggtttctagtttttcgtcttagaatgctatcctagattgagaagtagaagtctctgaaagtcttatttacctgaccacgaggacgagaacctttcttagcccatgaatggtgtggctgataccctcccatagcgatttcagtgtctctagttccttccaaggatctctggttgatattcgcggaaccaattaagacaaactcatcatccactaccatacctttggaatgaacatatatcatgaatctccgactcttcaaagcttgtacctagattggtttgtcgtttcagtgaatagacgaacccattaagccgaaactaaagatttcaaaagaagacatttaatatatgtatacctgtgcagcatttagctgaggtggcttccgaggactattatatacgttnnnnnnnnnnnnnnnnnnnnctctggttccaacctctctgtttccaagacagaagaagttcaaaaagtcttgtggctcaagct

SEQ ID NO: 23416 - DNA, 2122 bp, Arabidopsis thaliana landsberg
ataaagctgcagttatttatcacgcgagctagtacagatgtccattgactattccaaaattgacaatttggtattgaatcccacagctctagaacgttttttatccactttctacaaggtcagaacaagagaaaacgaagttcaaattcacttgttaaaatgcgagaaaatcagagatatcactgatctccaaaaaaaaaaaagttcttactcggagaagaaatcctgattttcggggttcgtaggaaggaacaatctcacaaagccacagccctcaaacgaggaattatgccaaggattctccaaaagagacctggacgtggatagaagaagatcgaaaagatgagcagagctatagcatttaatagactctaattacagccatcaatctagctacacatacactcttaaagacaaagaaagtccaactcaattatctttttttctttaaggtttctaatgaaaagctttaatataatcccattacccctactagtgaaggcacaactctcgacttgctcgggactgcgacctttattaatcacagacatctatacatgtatcctaatattacgagtctgatatggtctttattcatcaattcacccagagcgatgtgccatcatagggacatcaggacatcgtatacaggagagaatcggtgaaaaatatggtggccataatgaaaaactttccaatctcataaaagactcatgtatgatgaacaaaatgcttccttccacattttccaattctttgtccatagcagaaataaacaatgtgctttcacatataagaatgtaagctagaatagacaggatcatgatagtgtcttcctaattctcttgacaatactagatacactaaagcatgtatataagtaataacactaccatgatgagtgttaagatctcgtgtcaacaacttacatgaattcagaccatatctcagatgcggccccttgtggaaaaaatcttctacaggaacgaatgagggaggtaacagccataaagtgtcgttgtcttaacctccaaccttcaggacccgggctcctattgaagaaaggagttcgaaaacattatacatgaaacaaaaccaagacatccaacggagctagaaaatttctacccctcatgagtacctgaaaaaaaaatccataacttatgcctgccagatatcgaaagaagactcacctgctgaaatgagcatgaatcaaggtatcatacaagggcctccactgaactttcaaagacagcttcttacgaaacttgttgatcagtctgactaaaacattaccccatctaacctatggtaccataaccaaccaatcacccaaaaggtaagcataaaaaatggaaaagcaagggtatatgaggaaacagagcaagtagctggagttcgttctggtattatttttcgaacctgtgcatacaacttattctcagatgaatgaaaaatttgtaagccaatttccacgagttcactaacatcttccacggacaattcacttttcgctctaacaaagctgcaaaaagaaaaacaaaggtcatcagacacggaatagccaaatgcagcagaataagaacccaacttacaaagtacaagacggaaattactacacaatcaatcacacgtacatagttggctactggataaccagtggaatcagtcagtaaaatgatatcagactactcgattgcatgatttgaagtataaagcttaacctatctacaattttcacgccaattccaactgtttattgaaccatatcctagtcatgtctcgggaacacccaaaacctctgcagtttaattcgatatatactgactcgattgtaaactgagctaatcgtctcttaaattgacgaatttacgaaatctggagataaaaggaacatgaacaatcgtattcatcatccaaactacaaacagaatctcggctcttcgctctcagaattcgaaattggcaagtaactctgctttctctccaatggttctctccaatatttctctcatccgtgacaagacaagaagttccatcgtttcatctcctccacctaatgggctttgtttcctttgtgggcttcttaatgttttttaaacgcttttgttactttattaaa

SEQ ID NO: 23417 - DNA, 731 bp, Arabidopsis thaliana landsberg
taaaagccgatgcggttttagttgcagagaaatgtgttggtttgaccaaacttggtggattctgtttgtttttcttctcagaacttagtgaataattgacacaacttgatgtcttgcatcggttcttttcattgtaacatttgtaggagtttggccgctttggacaataagaaataaaaatatcattgtaatataattcacatgtaaaacaactagatttggcctctcttctgtctcatatcttaagcatgtcatttagaaccttttattgtaaaaacaaactttgtcatgagttactttttgtagtcaaatttgatattgaccccttccttattatgctaacactgttttcatcttataaccctataaatctaagtttcgtgaatatagccaaaatcatctacatcattgcaaagaaccttaaaggagaaagaagaaaaccggcttgagagagatggaaaacaactcaggagctattctctttgtgatcttagctatgaccattgttcttcaagtgaggccagggttctctcaagcactccctacgatccccggacttttcccaccgggtcttcctattgatatcataaaatgttggtcatctctctttaacgtccaaggatgtgtacaagaaatctacaaatcgatattttctggtcagtttgctagcattgaagccccatgttgtaaaacgttttcagctatagatacaaactgttggccacatatgt

SEQ ID NO: 23418 - DNA, 661 bp, Arabidopsis thaliana landsberg
  unsure (1)..(661): unsure at all n locations
ccccctaaagtaaatcgtgatattaggaaaaacacaactcacaattttatgcaaacacaattacaattttactgttttggcgggaaacacacaattctgcaattttatcgccaaatttgtgatttgttgtattggtggacaaacacaatttaggtttggcggaaaaacgtaattccgtaatttccggccaaaatcgtaaatttattgtactggcagaagacacaatttcggttttgacggaaaaatgcaataatccaattttatggttttggccgaaaagtgcaattctgtaattttccatcaaattcgtgattctgttgtattggggaaaaacaaaatttcggttttttatgggaaaacacaattatttaatttacggttttagtagaaaacgtaattatccaattttacggttttggagggaacagaattccgcaattttccgccaaatccaaatttaattgtatcggtggaaaaccaaatattttgtttttggcgaaaaattacaatttttcgatttcatagtttgggtagcaaaatgaatttttatatgtttatcaccaaaatttgatagaattaattactcggatatcataaaaaagtatgttaattcaaagactaatatacaattttttttaatacttatatatnttgagcattt

SEQ ID NO: 23419 - DNA, 552 bp, Arabidopsis thaliana landsberg
  unsure (1)..(552): unsure at all n locations
aatccaagtcctttgaatctctcataaaccctttttttttttggtaacttttgtgatgtgtattgggtgcaaaggtttgcgtagttagcgaaaaggtctaaattccatccaagcaaaactcaaacggcgtcgtttctagctagataccgagagacccttctcaccgcattgctgattgctttaccttactgtgacactgtcgcaacgattgacgaaaccataattgtcagtttcaacttccttcccacaaaaaacctctgactttggttgttcggaagttatcaatactcaatcatcgagtgatttcgagggtcccaagtaagattccccatttcttgtcctgagtattattctgttgcagtttctgctttgatttttctccagcaattttgcttttgtgtatagtatcaagcaaacttcagatgcttgaaaaagttgcttcacccaaatgcaagatccaagttatttccgataacaccagcttctcatcttctatgcattctnnnnnnnnnnnnnnnnnncttcatttcttgaaaaacacttgtccgattt

SEQ ID NO: 23420 - DNA, 2438 bp, Arabidopsis thaliana landsberg
agataggtggtagatactaaaacttcaacttcaaatctttgacctttggaactagtgagtactatggttcccttagcacagtatatatactgccattgcctttctaaaccatgacataccaaggatcacgtctatagtgctcacttctaacactataggaatagccaatctgggttagaacataggataagaaaggaagaattgtagacaaggcgagtaattacaaggaatgtaactatgggggaattattaactaagtagattagtgttttacctaccatagctaatacaatacattatggtggtacatgctaagatgtccatctatactatttcaatcaatcaaagaagcaaatcaaacattgatcatcaggacaatcaaccaacattttaaaatagagaaaatagttttgattttgtcttaggcctcctatctcttaagaaggtcataattgtaggattccaaggtgtgaaatccatcttgtcttagaatagaaaagataagaatgatcagagtagaacagtagaaggtgagacaggatcaagaaaagtatagaaagaatcagagtgagataagtatagaatgaatcagagtaagataagtaggtaagggtttgtccatttctatctaggtttcgtcctatagtcaacttttgctctgataccacttctgtcacatccggttttaaggaacaaagtcgggtgcatctcatacatgcgccaaagaagacaacatatataataacagagtgtatagagataaatgtcacaataaaatcagagtacttattacatagcggaacgcttacaaaataaaagatgaatatagcaggatctaaaatctatccttggcgccagaaagctgactgggagacgccacctagattgaatcgaactcctcgatacttggctccacttaaaccacctgttcttctcctgtgggggggtgtgagacagcaagagtgagctcacatacgttcatagctcaacaagtcgtggggaataatgtggcatgaacacaccaaaggtgggagttcatgaagtgtaaggctgatcaatgaaataaaggctgaagctgagcattgcttttataagttggtcaaaattttattagcagttactaagtgtaagtaaataccacaccataataataatcaataaaagtaataataaaattctcccgaatgcaatgatattacaaattaagtttcagttccataaattaatcatgtgagtgtccgagccgctcatgaccgtgagcacggctgacataccagttttacactctacagagattgcgcatctttacccacaagtcgtgttacccatctactaaggggtcatgaatcccatacacctctacatggaagcgaggcagggtaacactacgaggcctttacaaagttccactagcttcagaaaacctgccacagtttctaggaagagcaatgcaggaatcccccgtttgaccgccatcgcagcaaaatcaacccagaaacctccctacatgcctactcccctactaccccttaccctatcgggtaaggtagtcctacactagctttcctagttagtcagccaagggcgtcccattccacccttgtggtggcacgtgtttctgaagttaagctccatgttccaatttaaaataatgatcttgacatgaataataaataaaataatagtataattagaacatgaacataatgtaatattaaatccaaaaccatatagagcaatagcaaaaactacccaaatagttcagggttaaacaaggtaacaagataataagactagtgtgacctattgggtcccatcaaaattaagcctaagcatggataagtgctaataaataacattattggataataaaagtggtcaagggcacaacttgtcttcaacgagctcctgctcagctacttcaacctgttgctcaccagtatcctctgttgcttgctcgtctactcgcatcaacacaatacatacatagtatagcataaattaacatcacatcaaacatgcaaatagaatatacagtaatcaactagacattaaaataagatcacaggaactggaatcattaaatttggagttatagattttaatatatgaatttatgaagattttatgtatttaatacatgattaagtgaaagaataattttaatgtgtttgtcatgccagaacagaggcactaatggttagataataatgttatgaaaatttagaaactggaatggaccaatttggagttcatattcattttctacaaattaaacaagttctaacatttatttatgcattaaaaactaatttctgatattaatcctgatttttaatactctctggattgggcatcaatgaagagtacaggggctacggtgtaattgtatctaagactcagaacactactgtgtggactgcgggttgattgcttag

SEQ ID NO: 23421 - DNA, 628 bp, Arabidopsis thaliana landsberg
  unsure (1)..(628): unsure at all n locations
tagtcatttataccctcttttaacttttaatgaacatgttatccctattttgaaaatgttttaggtttacaaagtgaaatattgatttttcccacctaaaatattccgaatataatttttccgccaaaataaattcgaaaaaaaattctcattcttttttttgcgggaaaatttcagtttcaaattacatgttctcattagatgataggtaatttggtcattttgttcaaataaaaggatatttttaaaaatggtcaaaaagaaagggtattgttgcaaaaggtagtagaaaaattgaacttttgcaaatctctctacaattttagtaggaccttcatatattactatatatcatttgttattttgtaaaaaaaatattatatggcataatttgtttttatttgcgtaaggcatttaaacatgtcggaccagccctgaatacaccgcatgataatttatgtttataaaatattgtgactatatatttatcgatatataatcctacatttaaattatatgattntaatnnttagtgttctntctaatcaattaaatagtcaaagagttagattttgttatttatttattggatttgcaaatgttagcttctttataatcaaataaatat

SEQ ID NO: 23422 - DNA, 1261 bp, Arabidopsis thaliana landsberg
gcatacctgtagattcaccattcgagctccaccaaaatcttgcgaccgcacttgtttgtttggaagtaattgttttcgggagcctagggcaatacatcacataagttggggatgctgcggctactgatttaatcatcacttctttccctccttttgataggaatttagctgaccacccatttattcgactgtaatcgatctttaacaaaggaaaagatctttgtcttagatccccctaaactctcaggtagtccgagataggaacccatgcctccgatattatgtatacccaagatcgattttatttctgcctttatagcttcatctactttatgcccgaactgaatcgatgattttgcaaaatttatcatatgtcctgataccgcttcatattgttttagaatacccaatagttaatagacttattatacccacattagtcttaattttctttgaatgtcactatatttattttttaaatttatattttgtaattatgtttatcgcacataaatttttcatattagaattaaggttttcttgattttactacttctaaaaaaataaaatgagattttcaaattatattataccaaataaattaaattgtgaaaattgaaccacagatttaaaacataatgtacaactatttcatataaaacaatattcttttctttaggataattacagtaatataccagaaatgaaatttaaaataaattaaaattttaataatgttctgtaataaagagaaaaatatataataaaacacgtactaatgcatcataaaatacacattttatgtactaataagtataataaacatgttatcttaactaaacataaccaagtaaaaaaaacatactactatatcaataaaagtaaatacatataccaagtaagttgaaaaaataaaactattgctcggttatttatatatagattatattaaattgaaacaacaattaactttctaacgcaaataatcaactcgctgtgtaccgcggatcaatatctaatgatgtcataattctcgtagacaaatagacaatttttccatatgagtacatttgatgcaaaagtagacatttgaactgaaacctatttttgtttacaaacattcatatcaacaactaaacaaaaatcgaaactaacttgaatcaattaaatcaagtattaaaataatatgaaaagtggactcaaatttaactgaatcgatttaaacctattcaaaccagattaaattttgattctaaaaccg

SEQ ID NO: 23423 - DNA, 703 bp, Arabidopsis thaliana landsberg
gcacggtttggaattcttcatcgatcacaaaaaccctaaaattcgatcggaaggaaagattcgtcgggatctttggatgaagtttttttacgcttcaggtagagaaaagagccgtgataatagagaagctgcggtgaagatcccgacgcacgcaacgatgaagaagactggagattcaaagcgagacaaagtgcgtgagattctacaaacatctttggctaaagtcgcttctgaggttgttgacacggagatgaagacacgagtgactgcttgtgatccttgggttgtggctgtatctgtggaaactgcaatgtttgagaacttaggttgtttcatgggacctcaaaaagcaaattaccggtctattctgttcaacatgggagatagtaacaatccagatttgaggaggaaagtgttacttggtgagattagtggggagagattagtgaagatggagaaggaagagatggggagtgagaagattcagaaggaggttcaaaggattaaagagagagcaagatttaaggaagagagtcgcgtgaagatgctttcatcagcagatatgatcatcatttagttagctgcagagatttagtcatgagtttcattattgtatagaatcagtattcgtgtcaattttctatcacaaactcgagatattagtagattgtaatttcaatacgatgatcggtttcaagttgct

SEQ ID NO: 23424 - DNA, 567 bp, Arabidopsis thaliana landsberg
  unsure (1)..(567): unsure at all n locations
gataccatggtaattagaatggttggatttttaagggccatttacgctaaatccccaagccgatgttggttgtctttccaatacttcaaaacatctaaatttgaaaaagttttccactctagtcttggctcagccaaatagatatccaagtgagtctttgtgtcattgacaccagattcaatacttctttcaagctcgaagagatcctgcattacaaagattaacattagtctttgtgttgttcaagcaatcccaccaaattcacataaaatatttctaactttgtatatgaaaatacttacattatcgaaatcgtcttcaaattgagattcactaagtaagccatgtggatttgttgttcttgaaatacctagagaactcgtgtgataagctttaaaaatcatgcattacaaagattaacattagtctttgtgttgttcaaacaatcccaccaaattcacataacagatttctaactntgtatatgaagatacttacatttccaaagctgntccaagttttccaatcttcaaaacagatgtagtgggatctaacttcttataagct

SEQ ID NO: 23425 - DNA, 589 bp, Arabidopsis thaliana landsberg
ggcaacgcaatgagaaacgacgtaattaccaatctctaacgaccattcactttgaggctttcgatacaaccaaagtcctttaacatggcggttaagcacggcgtcgacggcgacggcagcgaaatcgaatcgagaactctggcggtagatcgaaaaagcggtttctgcgaatcaacatcgatattctacagcaaacgtgagccaatggctctcccgccaaaccaatttctcgacgtcacgtctttcattgcatcacagcctcatcgcggcaaaaccgtattcgtcgacgccgtaaccggtcgtcgactaagcttccctgagctctggctcggtgtcgaaagagtcgcgggttgtctttacgcattaggtgtacgcaaaggaaatgtcgtcattatactctttgcaaactcaatcctcttgccgatcgtctccctctccgtaatgtcactcggcgcaatcataaccaccgctaatccgatcaacacgttcgacgaaatctccaaacagataggcgattcgcgtcctgttctcgccttcaccacatgcaaactcgtgtccaaacttcgcgccgcgtcgaattttaatctcc

SEQ ID NO: 23426 - DNA, 1520 bp, Arabidopsis thaliana landsberg
tacctgaaaaaaaagaagagaaattgcagattatccagattagtatgaccttgagcatacaagaagatccactcattttcacttaataatcacgtttaataagcggaatatgaatgtcagtagattaatgtattcaaattcatttagcaaatccgtctccaaacatcaggatctaggcagagtggagaattcatagcttcatgaacacaagtcaacaaacacgaaatgaacacaacatacgattttataacacctgtggcactaacaatccattaccctgtcgatacaaacacaaactaagttgatagatttagataaattgttttgaaatttaaaagttggatattttatagaaaccaatccacaattgaagtatattgagctcaaaaggagcttaatttgcagtggtaggtaggtaagaactcatccatatatatttgaaaatcgacgggggcatcagaagtagaaagcatagatctcagtatgagaaaccagaaccagaaatgaaaaatacgatacgaaaaacaaaaaaaaagttttaagatttgcgataaaaattaagactttgagatccaaatcagtataacagagatcaagaaacaagtcaactataagacaaagcgaaaaacatagagattgatataattacttctcttgctcaacgaggaaagaaggctgtgatcggagaccaccagagaagttaggtgactgaggagccgacggaggcacagatagaggcggcggatacgtcacaaatctcccaccaccactaccaccacctcctccgccgtctccagcaccaccaccaagtgacgtcatcatcatcatcacggctactacttcttcttcttcctcagctggttgttaccggagaaacaactgaatagatagatagaaaagaagggagctgggcggagatcgaggaggtgcggcggcggattagtagggagctaatctggcgcacacaaaggcttttagttgtagacctctaaatctacaatactcgtcggtggattggtgtttttgggcctttatagctgtgtgagactctctctactcttttctttcttgaaatgaatgatttttgccattttgatattaccggacataactcgtgttttttttaccgtttcctgtccctcttagaagcttcttactgactcagagggtctctggatacagctggttccctcttaatcattgagagggctacctacttgacctggcccgcttcgatttatttcacgtttgttgaattgatccggttcggtcttgtaaaaaaaaaattggttactcgattagtcaaaaacgctgcgtttctattcaagcaaacaaacaaaaagatgactcatctgtacattgtgtttcagccacagcttacttctgatcaaatggcttgcatttggtaatgactcatgtacattgaggattttctttcatggatattgtatgctttatgtttaacagaactgcttaatgcttgtcaggctaaatatttcgtaaaatatgagaaaatggca

SEQ ID NO: 23427 - DNA, 441 bp, Arabidopsis thaliana landsberg
caaggtgttttgaagtactttttaaacttgaaatagtaaggtaaacgtacaagttcaccttctttcttttccccctgtagcttcggcatttcccattctttcaaactgggaaaaactttgaaagctaaaaactcctgaactaggtcccttgtgctgatatgctctgcaataattctgaattcactcattgcttgttgtgttggaccttcgggtgtcatgttgcagcgtggtcgggtttctccgaagattagttcgagcgggctttgcacaagcttttccttgtcgtcatccaccttgacatagaaccactcagatttccagcctgctgcccatttgcttcggtagctaattacaggaaactttgtagttttccgataggcgaagttatagcaaccaagattgtcgtgcaatccatcctttctagccttcgtttgataatgc

SEQ ID NO: 23428 - DNA, 907 bp, Arabidopsis thaliana landsberg
  unsure (1)..(907): unsure at all n locations
aaacctcaaaaaccaaatggtcccagaaattaagcaacaatggagaaacaattccccttttttttttctaatgcgtatagaatttcttatgtttcttataaatcagactctaaagaagattgctgatgttctggtcgcgaaggataggaccggaaattacaacatagtgaatgtggccattgcagtgacacttcaacaaagccaaaagagattcgtcatttatattaagacaagcatctatgttgaaatcgtcgtcattgggaatatgaaatccaatttaactcttatcgctgatggtcaagattcaaccatcatcacatgcaatttaagctctagcaatagtaaaagaacgttcaacactgcaactcttggtaagaatttgtgttctcttcttttaatagtttataattttctcttcttaaatagtttatagttttctcttctttataccaaactataacatttttatagacatcatactaaaaatatgttcaaagcttctaatggtgatggattcatcagagtagacatgtgcttccgaaacacgacagggccggcgaaaggactagttgttaccctccgtgtgagtggtgatatgtccatcatttacagatgctgtgtcgaaggatatcaggatgccttgtatcctcacaaaaaccgccaatgttatagggagtgctttcttatggacaatgtagattttatttgtggaaacgcggcggcggttttccagttctgccaaattgttcacatggatggataattcatgatacttaaaaaaaatcaaaaatgaaaaagtgagaaacacgatacaccgaacgcctgtctagttatttacaaaatacttgctacctgttttcattagcttacatttaaaaataaatcgataatctaattntaatttaat

SEQ ID NO: 23429 - DNA, 476 bp, Arabidopsis thaliana landsberg
cactccaaatcgtctagcagattgggccattcttaaaacttaaccaactttaaaatctcagaaggtacaatgcttactttaacaccttagattatacaaaatcgaaaagttaaaaatttggaagcgcataaattattattttttcactgaaaagttaccttttattcattatcccactgtgaagttacaaaaagttgaaacagtggactttccacttacatatcttaggcaaactgaagaacaaaaaattgctgaaattaaaagaggaacatacgatagagcaaacattactgaaacatttgaaacattaaaaacagaacataagaaagagtatgtcctaaccaaaaaccatactcatctaagcaggcttattcaaaccttgaagttgtgctgcttctaatcatgcattccttaaaaaatgacagaagttgatcgagtggttagcgtttttttggaggtttcagaatccttccaaa

SEQ ID NO: 23430 - DNA, 1569 bp, Arabidopsis thaliana landsberg
tagggttctaggatctctgctcttaaaactcttatcgccgctaaaactctctacccatcgcagagcctctctaaaggttatcttcatgatctcactcaatacatatgtttcgttactatatgtttttgcttctgattgtcgttattctgtaatcgtttagagtcgtttatggtttcccccattttgtctgtaatgtccatgctctgtttctttacagtttcctctccggcttgttagatatcagtttagttcctgatttactgagaaaccaagcttttgagcttaagtatgttagggttctgacgttgattgagaaatattataaactggttttcaagtttatttctttctggaatttcttttgtagtctgattataaggtacactgctagatatactggataggttacagtctcttactacttatccttgtctctgttctttggaatctatctgtaggattctctctttcttgttagatttatgagcctagtttctcactcagttaaatgaaacctgatatatacaatcgtcttctagcttcttaactcatcaggtgttgcaaatttgtaagtgctgtttggttctgcattttgcaattgatcattaattgagaagttgttaaaaatcattagatgatgtgatctttaagtttttttgcttttactgattagtgtttttgtagtgttttctctgctttgtttgcatctgttgttctccagagctgtgattggtttataaaggttatacagtcttgattcaaatgtgaacaattctctttttctaaggattttcacttcttttgtaaaatttggtctctgaatgtttttgttttgttgaatcagaatggattctcagatcaagcacgctgttgtagtgaaagtgatgggaaggactggatcaaggggtcaagtgactcaggttagagtgaagttcactgactcggaccgttacatcatgaggaacgttaaaggacctgtcagagagggagatattctcaccttgctggagtccgagagagaagctagaagacttcgttgattctctttgcaaattgtttttggttgctttgaagaacaaatgttatatcgtttggataattaaattcttattatgatgttaaaaaatttaattatcaaagattgatgctttagactctaaatctatattatattaaaaatcatttctttatcttcactttgttatatcaaagaaataagtcatgtttcacactctgcctaaacctttaccaccgaaaaaatgatgttcatgtgcctctctaatcatgccttggagataacaaaaagcttaagcaacaaattcatcattttgaatatcatggcatgcgcacacagcacgccttatacgggcccctgcttcagcccaagacatagatttggttatgcctataccaaaattacattataaaccgggattgacactacgatccgaaaccttggactccagttatatttccatttttatgcacaattgtattaatttgtaactatgaattacatagaccaatagtaaattcataagagatgtgttaatcaagccacaaaagggg

SEQ ID NO: 23431 - DNA, 1033 bp, Arabidopsis thaliana landsberg
tccacgaacagtttcttctttctctaacttcaagagcaagtccacgaaatcttcgactccttgtttgttttcttgtttatgcagatcaaacatttgttcatagaacacatcaagatccctcacgcttttttctctccgtctttgtagacccgtgagccagtcgatgatccagccaccatttgggaagaagtttgaggcggagaagctccccaaaaacaaaaacgcatcgcgtattaacttgtcaaatccatcattattgagaactgaagtatggaagtctagactgaatgctgccttgcatatcacgcttacagttaaatcaagaaacttctcgctcaagttaactggtgatttctgagaggctgattccgtggctgaaacgatcagtttcctcacttcttcttccttgatgggttgaatagagtgaactcgcttagcactaaagagttcttggacacaaatcctccttaattctttccaataatcatcaaaaggagagaaagcaatgtccaagtaattgtaagagagctcttttgcccctaacgaatgatcaaaatcatggtttttgttgagttctatgaacaaaggaacaaatagaaagaaagaaaattgtatgtgttaagttagagttatagtacctgctaagctaggacggctacaacaatgtagatcattgattttcagaacttgttttgccgtctcagaagaagaaactacgaccgttgggacacttccaagcttcaaaagcatcaccggaccatacgttttggaaagactccatagagattgatgtggtaattctccaagctgatgcaagtttccgatgatcggaaagccaggaggggacggtggttgctgctgatttgtccgacgcttcttgtgtttaaaggcggcgaggagaatacaacagagaaagagaagtgaaagaaaccaaatcgtagccatttttccgtattaacgtacgtctcaagttttctttgtgatattgatgaatcaagctcctgctttaaatatatacacatttcttacatta

SEQ ID NO: 23432 - DNA, 3507 bp, Arabidopsis thaliana landsberg
  unsure (1)..(3507): unsure at all n locations
aatattcgggcgctgaaacggggatgggcacgtggtttagataagccgaggtggatttcgacttcagtttggaatgatatggtggacatgtttactgaatttggcccagatgatgttggtttcatgtcttgaatgcttttgtgtctcttacttatcgaccctttatctcattcctatgaactcacgatgttactctcttttttgtttttggtgatggctttatatctcatattatctatgatcgccttctcagtaaagtcagttgttatcgcttgaggttacttgttaaattttatcataactcagtcatagcgtatgattaactcagtcataacgtataattaactcatccacaacattataataactcagccgtaacctatatttccgaagacacaacagatattaactcagccacagcgtatgattaactcagccacaacattaccagtataactcagtcaacgatattggattagcttggccaaagacaaagttccatttcattgcaagctactacttgaaccaaaaaaacgaattaaccctatacgctgagataaacatcaaacacataatggattccagtagctagcaattcatacaaacataaaaacaaactagtaaccaagaaaaagcctctgttcgttgatttttgggaacattaagataccagaaacaatgacaatgatagtaaaggcaagtcaaaagcagcaaagtttgatcatcaatttccatatctggttttccctttcgctcctcatcacttcttccttcacttctttcaccatcgcctgtaacgcttctagctcgacagcaacctcggacttggccgcgcttaactcattgtccatgacggacaatttcggccagctgtctacaaccacttcgtatgtaccatcttcgacccatttttcaaatggtcctgcattttcaatcacaggcgaattaacaacgaaaccaataaaatccaaaatcaattatacttacatctttacgcgtaggacaacagaagtatggtcatctagggttctttgatgacttcaatgtatagatgaccacgtctagtccgcaatgacactttgatgataacccacgttcccaacggctcaaggattgcgtactcgcaatcgagttctcggaattgctactcaatttttagttatagctggggaattcggagaagaaaagtaagaaggaatgcagctccagatctgaaatcagaaattggaattttctaacttagggtttgattttggggatttataagtgggcacgtgttcatttggtttatgtcacaacgatgtcgtatccggtcaataacaaagactctttcacaaccgacgttgtatctggtcaataacagagacactttttctctgtattttgacataactcagtcgtgacgtaggcatagctaagccatatgagtgttataactcggccaaaccctaaaagtgctttccttaaatcatcagttggtacaatcaagtaattaaaatatcataatcactttccaactagtagaatcatgaaactagctcatattctatatactttatccaacatcatacccatacattgttaagctctacctaacttatgttcctaaatgttttggtcaacatagtttgtcaatcgacttttagtgcaaacccaatttattttctgttttgatataatagaccttgaccctaatataaccaacaatttggtggctggtttgatatatcataataacatatggtatctcataactcggccaaaacacgaaatcttattgcataactcagccgtaacgttattttattccacgtcgaaacagaaaatttgattattggagggtttagttaaggaataatttcgaactcggttgaattatttggaatattgacgtgttcgtgcatctatgaaaccaatcattattcgcggttccctattaactcatttttttttaatctcgagaataacataataattgtttctcgataaactccgcaaaagcaaaacacagcaatattctgactgatttgatgacatcgatcgaaccnnnnnnnnnnnnnnnnnnnnnnnnnnnnnnnnnnnnnnngttttctcttatgtagttcgaacaatcgaaatcttctaacataactcagccacaataaaggcataactcagtcatcactttgttataactcgaccaaaccctgaaagtgtttttcttgagccaacagttgtgaaaatcaagtaattaacatatcataaccacatttcaaatagtggaaccgtgaaagtagatcatatcctataaactttatccaacagcctactttgtccaacatcatactatatccaacaacatacttcctagaggttttgatagaccatgttttgtcaattgacacttgctgaaaatagaagttattttctgttttcaaattgcacatcttgacgctactaatataaccaacaatttggtggctggtttgatatatcataataacatatggtatctcataactcggccaaaacacgaaatcttattgcataactcagtcgtaacgttataatattccacgtcgaaacataaaatttgattattggagggtttagttaaggaataatttcgaactcgtttgaattatttttaatattaactgcgggcgtgagtacctgtgcatgtggaccaaatcattactggcggttccccataaagttgatgtttgttatctcgataatgatataataaataatctcgataaacaaaacccaaagcaacacgttaagtagtgacatactactgtatgacgatataactcagccgcaatgatatgacaagtcagccacaacgaaatttattcagccaatacaaatacgccgtcgtttgattagtacattttgtggcagacaggactatatagaaccagtgctttagtaacatactaattgcagtgaagatgatggctcagaggtctcttttccaaggcgaatctagtgttgatgaggtatttatctccacatctgaatagtacaaatcgttgcccatctaacgtcgagtacatcatgtttgtgttaatgtaggagctcgaccgtatggaaataaggatgcgaacgaggtacggcgaaaacaggaggcgcgataagggcgttccgatcgagtgtgattgcaatgctaaagttgtcgttgccacttctcttgatcctgttacaaccggaaaactttttttagttgtccgttcaaaatatcggatgtaagcatcttttcttgagttaatgttttttattttatttcttttattttgtatccctatgaatcaagctcctggtttttttataagggtcccggtcaaggatgcggtttcaagagatggtggactgttgcattgtgtgacgagtttgacatgataaaagaggagacgactgatatgaagaaggatttggaagcagccaataagcgcgtcgagtctcatgcggaaaagatctttcttatggagaagaagtttgatacgctagagatgaagtatgaag

SEQ ID NO: 23433 - DNA, 3454 bp, Arabidopsis thaliana landsberg
  unsure (1)..(3454): unsure at all n locations
cttccagcatctcactcctcgttggagaagtgtgcgaggccgatcgcgatgcttacaaatgttattaaattgcttcaggtcaacgagtccttcatagttagctaacttaattttgctgatgtggcgaataggaacgtcggagatgcgtgaagnnnnnnnnnnnnnnnnnnnnnnnnnnnnnnacttatctaattctagtgccaagctgacggcgcgatgcatcttggatgacatatcctacaacttcgttcgtcgttgtcggagctcccgatcgcgtgcactgatatcattgtcttctgttcagcgtgttcaagtattgacgtttggcatgttgtcacggttcagcatgtttttgcgggtgtgctcgtcgatggacccaacgacgatggaagtcggcatgttgcgtcgattcactagtctttccatgattggagttcgctggaatagaattgcttcgttatcactgagctatcaaatggctcgaactgcgaagtactggagttgctcgatctaattctgcgagtccttctaggcagcgacgattgcgttgatacgtttggcagttcttgcatcatgtaggtcgagtcggtcgtggaaggatcgaatgacttcgtcgagatcggttccttgtggtgttgtttttttgagttcagcgggaatacgagaggagctgcgactagaggtggtgtcgttggccgagctggcggtgcggcatgaggtgcgctggactagactccttgttcgttcgaggttttcgtcagctcgtcgtagctttccgagattactcgcaacattgtatctgatcgtcaatagaaaaagaaagttttgcctaggcccacggtggacgctaattgtttgtactgaggttgtaacaataaataactaaggggttttggggaaaacagagcagcttctttattaatgatgaacgagaatagtaattaacagaacagaaaaccaaaagtacagaacggagaaccaggaaatatagaacggaaaaccagaaaatacaaagccgacaaccaaaagtacagaacagataaccaaaagtacagaacggagaaccaaacgtacagaatggaaaaccagaaaataagatataaagagttaggcagcaattctctcttaaattctctgagtggtgacttaggttctccaatcccttcttagtagtggatctcctcttatttataggcaaggagctgatctagggttctcttagtctctcttgcgatatctccgttttgcccttctgaatttatcgggttgggccgagccgtgatgggccgagccgtgatgggccgagctgtgatgggccgagcagtcattctgatgggccgttgttctgatgggccgttcttccttgttaggagctttattgacttgttctatttgtgtttgggccgaattgggcatggagggcaaagcccgtatcccacacctctataaactcaaacattttacccaaaataccttaaaaagaccttaaaattagcaaaaattgggtctatgatggtttcacctgtttgattgtcgatccatgattctagtgtattttgcatgacttctgcttagactctgttgaaaggtttctcttagattttgtcatgatggtgtgacttgattgttttactttctcaggagaatggggtcagagggaaacatgaagaacttggttgtttcacaagtaaccattagtgggtttggggaatcaactactacaaaagcacttacagattaccttgaaaactaccttgaaaacgaagtaggacaactcatttgctcggtatgagaataaattgacaatagtcttagattatctaaagacacaaaggatgaatacagagcacgtgaggccgcagacttacgttcaaagtaggggtgcaattgaccccgattaaatttaaaaacctttatttacccattgtacgaaatgagtcacgcttcttctgaaaggttcaaaatcacttgggaagtcaaattgaatggccggataaaaaaatattgtttataagcatttataagaaaatttaagtaatattttaaaaataaaaaagcttttttaacaagatatttataagctttcataagcttttataggattcttttataaaaaaaaaattataagcttcaataatttaagtttttaaattttcttataaaaacttatctaagaagtcaacatctgataaaagcttataaacatcttataaaccttataaatattttcttaattataaacatcttataaaagcttataaaaattttattagcttataggagaagtcaacatctgatgaaacgttttataatggaagcttataaagcttatagagcttataatttagtttattaaatttttttcataaaagcttgtctgagaagtcaacatctgatataagcttataaatattttataaaatactgatacttttagtactgataaatatataaagataaatctgatgaatacggcgtaacaataacataatttaaccgtagtccaatgataaatcagctatagaatgttttgtaaactgcaaaaaagtcatttgacatcgattcaatgttatggacactttgttcaacatccctgttgtatgcttgattacaaacctaattttttgcaaataagcaaaccatgaagcatgtcgaaaaaactattttgagaccccgtgtgtttaacgcgtcatgattggtaaagagaacaacagtagatgaaataaataatgtctccaatctttgatgacttgcaccacgagatagagttctacgtcatatgtgttatgatgcctcatgatcctaaaaatcttttctctaaaaaaactatagactgaccagtttgacttaagacagctccaattccgcatttagaggcatcgcagtgaagttcaaaaggtaaagcaaaatttggcaaaataagcacaagcgctgaagttagcttttcctttaagacccgaaaagcttcacatgttgcaccagtccacatgaaagtagaggctttaatataatatgttaaaagagatataatgctactgaagagaggcacaaatcatcaataaaatgaggcgagaccatgaaaactcctcaagttcgtgacagatttaggtgtcgtccaagagttagttgctgatatcttagtttgatccacttcaagacaacaagtcaggataatatacataagaaaatgaatatgtaaaataccaaaaacacattttttagttgctgcaatttttcaacgaaagactgataacacgtcctgcaaggagacacttaaaatcaagatgtcatcgaactaaaccacgacacaatgatcgatgcagtggcagagagtttggttcatgacaagcttaaaagtacatggtgcattcgataaacaaaaggcatcaccatccatttaaaaacaccctcttcttgttttgaagtttgaacaccaatgctcgggctaatatga

SEQ ID NO: 23434 - DNA, 1065 bp, Arabidopsis thaliana landsberg
tgtgcctgtttaaattacagtttaaattctccgtttcccgcaaaatcaaaagagtaaaaagtgtttaccttgtagatgatatcccatggcatgcaagcaagtaagtcaattataaaagttgattttaagtacctacaaaattgacaaacaccatgaagaggttaatctcattgagtagatagcaagaaaacagaaacagagtagagtttgaataccgtaaagcaattgagctgcgtttatagatcattctataagttcggctatcacgataagcaacgaagaatgtcaagacaatatctactaagaaagcgatttggccagcgatatcgaggatgaacagattctctggtaatcccctgaagaatccgaattccaatggagtgaagaaggaagaataaagtgcccatatcaatataaacatcgtccacgccttgtaccacctgcaaattcaagaatctttagatccggacagagtatttagtagctaaactaaactcactacttagtctacttctattattgctccaaacttcagcgaaacagagttttcttctttaatctggtctgacgtgtacagactcatggttgttacatttttaaccaacgatcatttgtaaccattgagaaactgatacgtgtcataaagtggcgggaaatgaatgaataaccgaagaaaatgttattacactaaaaaggaaggttaaatccacaatcaagcccctaatgtttttgtttgcactacaattgaccccgaaagttgttaagctaacaaatttccttcaaaatttctctaataaaagtagtacgtagcttcaaaatatataggaagattgatttctataagatttagtctcagtataaagaaaataagaaattaatcaatacctaccctaaaatccatataacaaagtaagtggactagaataatacaaaataaaacataaggcctacttatgaaactattaaaagttaaaggactcagaaaacaaaattcaaaagcgtgacgagaatttatggtgtaccggttatcgggatgaacaatggagcctcggagatataactatt

SEQ ID NO: 23435 - DNA, 570 bp, Arabidopsis thaliana landsberg
ggtgcgccacgtcattcgattttgtatccttttccacttcctctttctctctcttgctacagggactgggaaaggggatactccgaaagggatccttctccgcgaagaaagcgggccccgagcccccctactgatcagaggttcaaaggctggcccctcggaagggttcaacagccgcctcagagcactcgggctccgcgaccactactggtcagaggttcgaaggctggcccctcggaagggttcaacggccacctcaggccactcgggctccgcgcccactactgatcaggggttcgtaggctggcccccgaagggttcgacagccgcctcagagcacgcagagcgagggatgacctgggtacgtttgatacataaccaaggctcgggctacactcccaaggtaccctaggacatttccgagaccgacgggaacgattttgtaacggaatcccaccagagggaggcatcgagccctcggaccccgtcaaaaggggaccgggtccggcgaatcaccgcaggtacttttggagcgcgctccgggcactagccgaccctaacgaatggggc

SEQ ID NO: 23436 - DNA, 1859 bp, Arabidopsis thaliana landsberg
aaaatattctaataatttatatgaaaatttatgaagactgataaccgagaagtgcgactccatatatcaaatataccaaatattgcaaccgtttgttaaataaataaaaatacaatagttcataaaataaatagagtattgcaatgattcttcacataaaataaatattttgttattcgactaatcggttataaaaaaataatttaaacatgtttaagtaattaaaatgttaaaaactaataatttgtgaagaatttatacatcaacgtagatatcaaatataccaaacattgcaacggttcatcaaatgaaagttataacagctccagtagacggttataataatctaactaaataatatttaagttattaaaaaataaaaagtaacaatttatgaagagttatgtttgcatattgggaagtactatcgtccttcacaaatcttgaaaggaaaactgagaaaaaatgccgctgatatggagaccattcttgataattgtttccatcgtgttcaatgggatcgtttccggaaggagcattaggagaaaccaagcaacaagaaagcgtggaaggttacgacggatccagagagacaaaagtttgaggagtcagcccttgttccagaaaaccagtttcgtgctccacaccaggtaatgtttttttttggactcccattgcctttctttctcttttttgtaagttgtatatctaagcagttatatattttcaaggttgggctagattaagggtttctattccccaagcctttggtgcatagatgagcacatagtgcaatcgttatcggaaaccgtggcatgtttgaaagagagaatagctgtggtgatcagaattcaagcaagcaaacagaagttatgtggaaatgttgattattttgaacagaagagaaactaattgagtggaattattaagggccctcttctattgctttcgtttatagaaactatatactctaaagtcttagaacctaagtatctctaagcttcggatcatgcatcaattttaaatgggctaatctttcacacacttttcacgctttagaaaccaaaatcctatcgttgtgttctaaaacgaagtctccagcccctaaattacatgaactattaatgattatctctgtaacgatttaacaaattcaatccaagttgaacaaaaaatctttatatacaagtcatgcaagggtgtttgcattaatatattggattcactggataatatcaagttagtaaatcaaaggcgttagagaaaatatcataagatctcgaattgtattctgttttttcttgtaactagtaatccctaacacacaaaaccaatcatactattttatgaagccaaaaagtataacatactgtggtttcgggcctgggatcgccggttcgagtgacgcttgggacgaaactaatattacatgctgtggtttcgggcctggggggattacgggtttcggcccagaacctcctggatttcaaaaaaaaaaaaaaaaaaaaaaaagtttaatgcgatatagtcacgtaaacattcattggtattagattagagtaattcaaataattttctataaaataaattggggaaaacgattttgttaacgtctaatgtaatgaaatctttgaaccttcacatcatatgtacgcactaatttgattgaacgttgaaattattggagatgaatggtttttaagtattgcgtgaccgaacattacactaacgtattaattactttggtacgacagatgaaaataccatccccacaatcgcaaaataaagaaggtaggcgaatctccatggaatctcccatgttttgtggctcctattagaatattaaggtttttgttgtc

SEQ ID NO: 23437 - DNA, 439 bp, Arabidopsis thaliana landsberg
tttattttataactatttcaatggtttgagctaattatttggaattgtatgtatgaatgtttcatttcaagcgaatttgcggcatggacgcttatccacggctacacaatgaatcatcttgcttttgcggttcatcgattcaaacatcgtttcagtgacatcaaattcgtcaaacagcgtcttgaggaaaagggattcaaactcaacagtgacggagaaatcctcaaaggttttttatacttatattcccatcatgagttactttcttgaaacgtgactatttaaatatgttgtttaatcgatatgatcaatgaatgtggacatacatattgcagcgagtcaagatggcctactatttcaagtttcatcgatctcggaaaggcttccggtaacatatgctgatggagtaactgtaacaatcccagctttatacattgag

SEQ ID NO: 23438 - DNA, 654 bp, Arabidopsis thaliana landsberg
ttcatttgaattgtctaatgaaaataatgaacttgatgaatgttttgtatggtagaagatagcggaatcatgttttcaaaacgttaaactgtgttttggaactgtacaagactctgttaaaatttcaatacaaatagattactaaagtatttatggagttcgagacgatagctctggcctcctcgggttctcacttccagtttcttcttgattaaaccgatctacactgtttatgaatatccctggcaaaagcacaaattcgcaacaaaaagcttgatttggaccagaaagctttcatcatttgaataaaaagaattgagatttattttacctataaaccatattgcagcagctaagaacagaatcgatgtaagaatcagtgtggtttttctccaactgttgatatgatcctgcgtgtaaacaatgtagcattttggtttcgaaggttctattttctctttccaggattggagatgttaggaagggatattttacctgaacgataccgacaagaggcgaagaaggaacatcgccgaatatgtgaattgcgacggtggatatagccattgataatggtcgtaaacttggtttcacacaatgcaaacacacatagtttacaggagcctgaaggaagaaacacaagctgttcttgaa

SEQ ID NO: 23439 - DNA, 1584 bp, Arabidopsis thaliana landsberg
ttgtttgtattgctgcgactagcacgaggacacgtgtcatctgaaaggcaagctggtacctggaatctcaagtgccaggcaagttgtgcccttgattcacttttgttacccaataatgttctttataatcatttaccatacataggtttaattttgatgggacccgataggtcactctagattgtttatctcattaccttgtttacccctgaatcacttgggtagtttgctattgctttatatggttttgggataatcatttattatatccatgttccagttattatgttatttatttatgttcatgacaagatcattatattattgttaattggaacatggagcttaacttgagaaacacatgccaccacaagggaggaatgggaccccttggcaaactaattaggaaagctagtggacgactaccttaccccgaaaggggcaagggcagtaggggagttgcatgcaaggaggttctcggttcgattttggcatttttatgcgatgacggtcagacaggggattcttgcaagtgctcttcccataaactgtagtgggtttttgaaagctagtggaactttgtaaaggcctcgtagtggatccttagccattcaccttggttgtgtctaagggcctggcaaaccctggcgacataggacacacgacttgtgggtacagtgtacaacctctgcagagtgtaaaactggtatactagccgagctcacggtcatgagcagctcaggactctcgcatgattaatttatggaacttaaattctatttgtcatttgcattgcatgtgattatgtattaattttggtctattatcttatttaaggtttggtatttacttacatctagtaactaactgctaataaaactttgaccaacttattaaaagcaatgctcaactttaacctatattgttgatcaaccttacacatcacatgaactcccacctttggtgagttcatatacactattccccaaaacttgttgagcgatgaacatgtgtgagctcacctcttgtgtcgcacacccccacaagagaaggacaggtggttcaagtggagccacgtatcgaggagttcgattcgatctaggtggcgtctcccagttgacttgcgccaaggatgatccttagttcgttttgtatttataatttattttgtaagtcttccgctatgtaataagtactctgattatattgtgacatttatctctatacactctgttattatatatgttgtcttctttggcgcatgtatgagatgcacccgactttgtcccttaaagcccgggtgtgacattgtaggtgaggaaacagcagacttttgctatttttgcactaaggtggtgcccaaagaagaatctcagcagtgaagccacgggaggaggatggcctcccacttgaaaaacttttatgcgggaggggtttttgcctcccaagtttgtaatattaatatttatgcactcatacccctggtttgtaaaaactataataccctttctatattttgaatgtaaactaagttattgtaattcgcttccgtttattcgttcctccgatgtgttgtaatatatg

SEQ ID NO: 23440 - DNA, 651 bp, Arabidopsis thaliana landsberg
  unsure (1)..(651): unsure at all n locations
ggcggtgtacgcctacaataagcttggtgttgattatccacctgtccaacaatagaaatgtcaatttctcgctaaatatccatcaatacaactataccaccactatatgattcacctaatataaccaacaatcaacacaactaaaccctaaaccttaaatttgattaaaccctaaacctaaccaaacgagcaacaacgaaacactattcttacatttaccttttgaatgaacatttgacatgcgtcatgcatctcattggatagattcgtttgaccaaaaaactttccgggccaaataacttcacctgggacgaaatctcttggggctggaacaaaatccggccccatatctcctggtaaaggagacctcatccacggtaccgtcggctccactgctccaggggggattacacggtgaagcggaacccccaaatgtcggcagataatctcgatgtcaactaactactcaggtggtggtggagaagaacaatccggtgatgttggagtcggagaagcaggagaggaaggcgccgacgttcttactctctgaatgctccgccgatgatccatgtagttcaccggtgaacagtttcaatttcttgaattctctggtttcgtgtaacattanaagcagacgagtacattgaatag

SEQ ID NO: 23441 - DNA, 2772 bp, Arabidopsis thaliana landsberg
gggtcccaagtcctatgaaaaccatttcattctatgagtttatttatccttaaccttttaaataagcaacgtggggagttttgaaattacgggctggcaaacataaaaaattaattattatctttcaaaactagatagtaactttcttctcgtgatacgacaatttctttttattgtttcttggtaaaaacaaaatattatgactgaactgttgttatcttgtcagcccaaaaatatatttgtcatgaaatattaatttaattaatttcaaacattaattctaaaaaaataaacttgttaaaaaattcaaacattttgaaaaaaatatggccattatggatgcgtagttagccaactgacttttaatcaccaaattcacccaaaaataaacttgtttaatgttggccgttacgtatcaaaagctgagactgaaaatacgaagaagcttcatctctctttttctcaaaagtcaaaagtcaatatagtgaatacgcgttttccagtttgttttcgtatatggctagcattcagaatcattgtgtatatgtgatcttgaacttttcttgacacgttatctcatggcttcttcttcttcttcttcgtctcgcacctggagataccgcgtctttacaagcttccacggagcagacgtccgtaaaacatttctgagccatttacgtaaacagtttaactacaatgggatcacgatgttcgatgatcaggagatcgagagaagtcaaaccatcgcacctgctctcattaaagccattagggaatcaagaatctcaatcatcttgctatcgaagaactatgcttcttcgagctggtgtttggatgagttgttggagattatcaagtgcaaggaagctatgggacaaatagtgatgacggtcttctacggagtagatccatctgatgtgcggaaacaaacaggagaattcgggagggctttcaatgaaacgtgttctcgaagtacgaaagagaagaggcgaaaatggagtcaagctttgaaccatgtgggaaacatagctggagaacacttccaaaactggtttgtttgttttcttttaattaattttgtgaatattcttttttcttaaattgatatgcattatcaattttacattgtgatttttaattatcacttgttagggacaatgaatcaaagatgattgaaaagatttcaagagatatttcaaacaaactaaatactacaatctctagagattttgacgatatggttggacttgaagcacacttggaggaaatgaagtatttgttagatttagattataaggatggagctatgatagttggaatatgtggccctgcaggcattggtaagactactattgctagagctttatatagtttacttttaagtagtttccagcttagttgttttgtggagaatcttagtggaagcgataatagaggtcttgacgagtatggttttaagctgcgtttacaagagcaacttctttcaaagattttaaaccaaaatggtatgaggaaataccatttaggtgcaatacaagaaaggctatgcgaccaaaaagtgcttatcgttcttgatgatgtgaatgatctaaagcaattagaggctttggctaatgagactagttggtttggtcctggaagtaggatcattgtgaccacagaagataaagggcttttggagcaacatggtatcaacaaaacttaccatgtaggttttccatctatagaagaagctcttgagatcttttgtatatatgcttttagaaaaagctctccacctgatggtttcaaaaagcttacaaagagagtaacaaatgtttttgataaccttccattgggtcttcgtgtcatggggtcatctttacgcgggaagggggaagatgagtgggaagctctattggacaggctagaaactagtctagatcgaaatatcgagggagcgctaagagttgggtatgatagcttgcaggaagaagaacaagctctatttctccacattgcggtctttttcaactacaacaaagatgagcatgtgattgctatgctcgcagacagtaacttggatgtcaagcaagggttaaaaatcctaaccaataaatcactcgtatatagatctaccagtgggaaaatagtaatgcacaaattactacaacaagtgggtacaaaagcaattcaaagacaagagccttggaaacgtcacatcttaatagatgcgcatgagatttgttatgttcttgagaatgatacagtaagttattttacttcgagttaaataattctttagtaaagtaggtttttctttttttcctgttgtactaacatattcttcatttggggtatattataggatactagagctgctttaggcatatcgcttgatacatctggaatcaacaaagttatcataagtgagggagctttcaaaagaatgcgtaatcttcgattcctaagtgtctacaatacaagatatgttaaaaatgatcaagtggacatacctgaggacttggagtttccacctcatctacggttgcttcggtgggaagcatacccgagtaatgctcttcctactacatttcatccagaatatcttgtagaacttgatttgaaggagagccagcttgagaagctttggcaaggaacacaggttagaatatttacttggaaattttgaatacgtacgtttactttctcatcatgttctcagttttttttctttgcctgtgattaatactcagccacttacaaatctcaagaaaatggatttgacacgat

SEQ ID NO: 23442 - DNA, 2464 bp, Arabidopsis thaliana landsberg
tgctctcaggtaggggaacatgtgggccactcgacctcactccttggtcgccgaatcattcaagctcgagtaaaggattgagcatcctcttgaagtgcgaaatacttgatcaaacggtggagaatgcttctcccttggtcactcgatcaaacggtgagggtgatttcccacgtttagtcattcaatcgcacggctcaaaacactcctcctcattctactcgatcaacggttgagatttttcttgacttggtttgaatttactcgaccgttgactccatcatggtcaaagaaataaacctgaaacacttaaacaaaaatatcaaaaataacaaggaaaatagatacttatatacatggatagacatgggacttcctcccaagtgagcttgttttaagtcactaagcttgattcttacagagcttacttagaaaaaaggttgaagagaggaacagagaagtcctcatcttcagtagttgaattttcagtgcccgaatcatactctgcatcctctctggacatatggtatgatgagtacttatttgattttccttcaaaataaacttttttctgaacattagagtagtcttcttcttctgaaccaggctcctttgaccaatcctcaatttcaaaacttgtgtagcctttaaccatttcttgaagttctagaatggtgttgtttaactcttccatcttatgagttaactttccaattgtatcctcctgagctttatatccaatccacaactctaggagttcttcagcaacataatcaagaatctagtgttcttcttcaacagaggggttggtgggcggtttaggcactcctagagaatatatcggaataggaatttccttctcactcaacaacttgctctcaaagcttctttcctctaagtgaactcctttctgatcttctggtgcaaaccattctgttgtgaaatcttcgtcctctttgatagctagtgcagtttccatattctctggatcaatactcattgaatacttattaactcttttttcaaacatccatagttgatctttcagcttcatcacccttgaagataatccctctatgactctgctttgccatttaaatatttttctcatctcataccagtcatcttctgtaggatcttcagtctaagctaacctttcaattgctctcttcttgtggtcaaaagttctcttcaacttgctgagttgagaagtatagctaactcttggtggggttccagcttctgtttcttcatcaacatccatgttctgaatcccaaaattctgacctccttttgttgattccctaaagctttgctaatgtcaaatctcatcttgatactcttttcaaggcttagatcaatctttccattcctaacatctatgactgctccagctgaagctaagagtggtctgcctaggatcaggggatcctttccctcttcatctatgtccaataccacaaaatatgttggtatctcaacattttcgatcttgaaaggcagattttctattagatcatgaggatgtgcaacagaaccatcagctaagagtaaagcaaagttgaagaacttgtattccatgatccctagccttttagctatagagagaggcataaggctaacagatgctcccaaatcacaaaggcaccttttgaatgtcaatggtcctagggagcatggcagagtgaatgaaccggggtcatcaagtttttcttggatgaatttcttcttgtaagtttcttgagtgatgactccactaatcatctcttgattctgatccttcttgagtttttatcttttgaaatgtttttcagagcagtgagtattcagcaaaggtatgtgctatatagtccatacgaattggtgggtggcaggtgtaacaatttgagttgatccccccccttcttgaaccatactgtcctcagtattgagattctgatgacttggtggagactcatcttcttggtggatggggatagcattagcagtagcatagtccttaggattctggactgctttccctggtagttgctgaggatgcttcggagcagaggttgatgcaaattttctctccacatatttgatttttgaattcagagcttcgaacttgacattttgatcgttgtaagaacaatcgatcatgttatgtgattcaactatcttcttttcaaaagccatggctccagtagcttgtccttggatgatctgttgaatgagttacttaatttcaggatctggagctgatggggcttgttgtggttgttgagtgaaccctggtggtggattctgctgttggaaacctccattgaactgttgtttaaggacctaatcttggttgtactgaacaaaaggcttggactgattctgttgaggtggatacactagatgttgaaggttagctacattagtgcatctgtagtagaggtaccggtctgcattgtagttgctgtagctggatcacacttga

SEQ ID NO: 23443 - DNA, 554 bp, Arabidopsis thaliana landsberg
  unsure (1)..(554): unsure at all n locations
ttcactggcatgtcttactacggctcaacagatttattctacattcatcctcacgaactgcaacaaactcgaaaggagtgctaaagaagaaatatcttcctttgctcaaaggaaatgtcagctacttttagatgcacaaaagcgctgcaatgtcagttccttgatctccttcagtatatgttgctatatatcaaaaatattcgtgtctatatgcattttcttgtctatatctttgcagaattctgattcggagcctttgttcagtatatgctttcctggaagtgaactaccttcatggttctgtcatgaagctgttggacctgtattagagctcagaatgccnnnnnnnnnnnnnnnnnnnnnnnnnnnnnnnnnnnnnnnnnnnnnnnnnnnnnnnnnnnnnnnnnnnnnnnnnnnnntcaactgtttttcagtgaaatgcacattcaaactagaagtaaaagaagggtcgtggatcgaattttcattcccagttggaagatggagtaatcagggcaatatagttgcgaatattgcatcagagcatgtcttta

SEQ ID NO: 23444 - DNA, 618 bp, Arabidopsis thaliana landsberg
  unsure (1)..(618): unsure at all n locations
cttgtgctttaaaagatgtttaacttaacaagagatgaattacatttaactctagttaacatttcttgtttacttgaacataaggttctcatctttacaaattggatcgtaaagaaaagttatttacaaatgcaaccataatttcaagcaagaaccttgaaccatatcgttggaggagagctgcaagtttcggtatagtaaaaataacccgattacgtacggactgtcttggtgtcaatggtacagactagatgactagaatcattttggtgtctcggtctcctattgttgttttgaatataatgctaatctagtgagtataaaggtaataatgtcgaatttgctgaagccccaagtaaatcgccactaacctccaaccagaccgtgtatacatacataagagcatgtaaagaacatataatcacgatcgagtttcgtcaggttcaccatataataaacaaggttgaaattgaatacaaccccaaccacgtattctagcaaactntcctattggattataaaatatctgatgttcctctttttagtctctattttagattctatttatgttgcttggcaaagtcgtaaagtcgagatctcgtattacaatgtcaatat

SEQ ID NO: 23445 - DNA, 524 bp, Arabidopsis thaliana landsberg
  unsure (1)..(524): unsure at all n locations
ggagtacacgggataacactttcaatttagacgtttgataaattatgcttttttctcattcgtattcagaattatcgtaatatggttatagtataaatctgaacatttgtccaattatataagtaatgtaggaaattgtacacatatttttctcatcgactgagtaatatatgtttgtttttaaaaatttgaatcgcatcaaatgcagaaaaatctaatatttttttaactatatgtattttacatatattcaaaataaattaaatatgagatcaaataaaagtgaaagaagaatcatatatttatgtttaaattaggtagagatcgtttaagatattagcaatgaatcgagtgttgtaatgtcccgtccatccttaccagtgagcacccacgtcctctctcagttcnnnnnnnnnnnnnnnnnnnnnnnnnnnnnnnnttacttctaagtgactttaaagacaagtttaccgaccgtgcaaataaccacatgatttttttctgtgttttgccctcactcatat

SEQ ID NO: 23446 - DNA, 1400 bp, Arabidopsis thaliana landsberg
gaatgttgtttaatgtgtttgagttagaaaagggagagaagttacgggagaacgaaaagtccgaaggcaagaaggggaataatcgagaattttagccttgtgttttgaggactaatcaatcgggaggacgaaaccaaaataatgatcgtggaaagcctaaggttggtaaccaaggaggacgtgtaatgaccacttacgaaccaagagcctgatatatgtgcggaaagccgggacattttgcaccagattggtcaacggtcgtacaaactaaagtgccaaatctggcatttgttacttgttacacttgtggggagttaggacatgtgtcaaatgtatgcccgaataagcaagggggactaaagagtaaccgagtgggagcttgtttcatttgtggagacccagggcattatgctaacgcatgcaggcaaatatagtagtataaccaaatggtaaccacccaccgccagttcagaaagctaagggaccaccggtaaagaagcaagccactccagcaaatgtttatgccttagatgtagaacctaccaaaccttcagggccgccaaaaggtcatataacaggttagtatgggttcttacttttcttgtttatgtgtatatgagtgattgattgttgtgtgcatagtttactagttaaatattgcatatatcattttaatatgcattagggacattacttgtcagtggtaaccccacgcatgtattgttcgattcgggagggacaaatagttttgttagttctgacgtggccgataagttaggtgacgggtatgagaaaagagaagtgaatgttttggaacataccgcgggaaaccagccacccttgcagacccgaattgtgttagtaggaattcctgtagttatccaggatacaattctacatgcaaaccttttggtaatgccaatggaaatgttcaaagttatcattgggatagattggttgtcaggatatcatgcccatttagattgcgggcggagtagagtaatgttcaaactaaggaatcgacgacaactcacttattgtggaatcaatctaagtaaaattgcttcgttcatgtcagcactgaaggttgagagtttactaagggaaggagaagtctaccttgtcactttaaccgccattggtggagaagttgaaaatgacccaaggattgaagagatctcggtggtgaacgaatttgaagatgtgttcaagcccttggaaggataaccttcgccgaggaatcatccgtttaccattaatcttgaacatggggcgactccaattgcaagggcaccatataggatggcgccagccgagcttgcagaacttaagaaataactgaaggatctacttaaaaagggatttattcgtccaacaagaaataactgagggatctactt

SEQ ID NO: 23447 - DNA, 642 bp, Arabidopsis thaliana landsberg
ctcgtcgatatcactctgtcccttcccaagccaactttggcaccggcgaactggtcgcacatcttgttcggatagccccgcacaacacttagggacttgtgcaaatctgagagcacctagagggggtgaataggcgatcctgcaaaattcaacactaaagagcacaaactcggtttataaaatgtgggttagattaaaccaagttgctatagcgagagctcttgagaagaaagcaatcacagagaaaagcgacacaagggacacgatgttttatcccgtggttcggccaagtataacacttgcctacttccacgttgtggcatcccaatggacgagggttgcactcaaccccttttaagtgatctaatgatcaacttgcataccacggtttttcctttcttagtctttctctcgtttgcaaggaatctccacaacttggagcctctcgcccttacaatgatgatcacaaaagaagcacacaagtaagggaggggagagcaacacacacaagactcaaatcacagcacaatcacgcacacaagtcacaacttgagctcaaaacacaacccacagagttcacaactcaaatggatctcaagtcactatctcaaagaatcccatgccccaagttggagtcttaga

SEQ ID NO: 23448 - DNA, 628 bp, Arabidopsis thaliana landsberg
  unsure (1)..(628): unsure at all n locations
gtgaatggcaatttggtcgtcgaccgaagctagttgtgacttgagagtcaggaacttgcggtagtactccctcagggtttcnnnnnnnnnnnnnnnnnnnnnnnnnngttcagccaaggcgtcggtgtctgggcagtacccctagaagttgagcagaaatttgtctcggcgacttctccaggagtcgatggacaacgggggcaacctggtgtaccaagtttgggccggaccctcgagggcgatgatgaaggacttggccatcgtggcgtcgtcccctccggatgatgcgacaacgacttgatagctcatgatgtactatgatgggttggtgccgccgttgtacttggggtaggtccctgccctgaagttggcgggccatggtggcacttgcagttgcggcgccaggtgagaccacctagaggggggtgaataggtgatcctgtaaagacttaaaacttaaagccacaaaacttgattaagagttagcacaatgaaatcaagtggctaaaggagagctcttgtgaaacaaaataaacacagtgagaacaagcacaagagacacgaggatttatccgtggttcggcaagtatacacttgctattcccgttgtgcgtccaatggcaagagt

SEQ ID NO: 23449 - DNA, 813 bp, Arabidopsis thaliana landsberg
cgagcttcaataaacaacgttgttttgtttttacggtttagatttacgagacattaacgtcttaaaatttggatgtgaacctacttaacgacatgactcaaatgacaagtcaacaaaaactttgtcatttatttcaaaagtcaacaaaacgtttacgatttatttgtcttccgtgaagttcaagattaaatcgttccaaatttgaaagttcgtgatttgtttgacatttttcccgatgattattagggtaatgtttgatttacccacaactccctctaaattttcttataaaatatatttctaagttatagtcgcacttctacgatcgcgaccgtcccacagattactaatcatagtcaggggtattacactattcaacaaattggtcatagaattactcgatggaaacgtttctaataaattcgtgacaaatacagatttccaacaatcatattccaacaaatatatgttctattgaaaatttattagaaccatataattcctacaaattaacaacatagatggctgttggaattaagctttttcttgtacttaattttatttaatgtttacagtattatatgaatatatgaaagaataaacgaatacaatttggttactcaaataaacaaattaaaaacaggacccttcaatacaaaccctcccattaaaaaaaaacagtacttatttcctttattttgtagacctaaactccataatggcttgcgccaaatttggagtgaaaaacaaaaccatattaaaacaatgataatatgaaaagcaatcaacgagatactcttagataaatccatc

SEQ ID NO: 23450 - DNA, 635 bp, Arabidopsis thaliana landsberg
  unsure (1)..(635): unsure at all n locations
tagtagattgatgcagcttgcaggaggagaaaaacgacaatgcggctcccggagctcgttggagctcgccggaggaagaagcccgaagaagaaaacgagctcgagctttttttctttcgttttccgtttttttttttcaaaatgttttatagaaatattaattattcattcaaaataaaatacaggggtaaattcgtcttaacacaaatcattaactcaaaagagatatgaagactgtaaagtggttttgcacattatttgtcccacaaaagggacacaagagatgatcattcatttactgcaccagtttggtccggtttactaaaaaacttcggtgatcgattcttattcgatggacatatcaaagtcctttggtggtgatctgtgctcgcgtaccggagaagtctgccgcaggacatctgtgaagctttgattcgtcaagtattcgattttactggtaattgatttcctcttagtccacaattcgcaagaaattatgttattctctgttttttagattgttggttcttgctctcgtctcgcattcgaaatatcaaatcttttccacaagattgtggttagaaagctttagggatctttaatttcntaactttagcgaatcaattttaggagat

SEQ ID NO: 23451 - DNA, 652 bp, Arabidopsis thaliana landsberg
  unsure (1)..(652): unsure at all n locations
cagatttcgctgtacaaatagctttatagtttgtgctgtacagaaagcggcgtacagataatgctgtacagattgggttgtacagatagcggtgtacagatagcgatgtacagatagcggtgcacagatagcgatgtacatcaaggttatgcatattgtctaattttctttcaaagtggcatgtactactgatgacttgataccttcctagccttattggtcatgtattttagtttaaattttgttgcactctaccgactacagcgtattgacggtggtgtaccgaaatcggtgtccagatttcgctgtacagtttaatttttactattagtgggtaattttaaagagtaagcatcatgtcattaatattttttggtttgaggatgtaattattctcaactgtaactttcccaaccactactttattgtggcttatatattcaatcaacctacaataacatcgtagaagaagaaaatttgtctttgttcctctcaaagattatcccaaaaaaatgagaacagaannnnnnnnnnnnnnnnnnnnnnnnnnnnnnnnnnnnnnnnnnnnnnnnnnnnnnnnnnnttggtggttgttaggtctatcttgaaggctggctgaaggggaagagatatggtgtcagagatacgtttt

SEQ ID NO: 23452 - DNA, 1572 bp, Arabidopsis thaliana landsberg
  unsure (1)..(1572): unsure at all n locations
ccatacaaaaaggcatgaattggaaaggggtttacccacagaatcgctctcactcgctcaacgcgctctttttgcgagtgggtacgaaatagagccttctgattggtttagaaacgcaaaaaaaaaatgaaatagtagacatgttgctagctatgttattatttacttttcctctccttaggcaaaaactagattcacgctttcagatttcaactggtgagtgctaaaatatgtataaaccttaatcattgttaatcgtctttgttatcatcgaatctatagttctggtatgaattttttggttgtcctgctctgtttttactttgttgcccagaacttttactaaaactagaaagctaagctcgtttgttatgtttcatttggagcagtaaattgttcttcttcctccattggatgtgtatttttgtttgttctttatgttcattgtgttgacttgtcggttttagtggaatgaacaagttgagagtgaaactgagactagtcgtcctctgtttctttcagataaacagcaaccacatataccacagtgcanagactctgtgcatgaaaaaaggttntgttttctattcattntcatgtcttttaactctatggtgtatattaactaaaggaaggagatggatagttggataatactntatttgtttatttgtcctgtgacacattatgtatcagtttttntttttttcgtttatttagacgttcaaacatagtccacctttttttttcaaactaagtctagttgatgttacttcatcccatccctctgagctgatctcaaactcgagtcctcttaagtgatgcattcacagaaagaaaaagcatatcaagcatagtgatctgaaattcaacacttttagttaactttactaaaccatttgattgccaaagtatatgcttcatagtattatctaatgatgatatgaatatctatttgtggcagtaaatttcagaaacttaacgagctggtccaagatctaaggaggcagttgccgcaatgcagaaatgaaaatcaggttgagttgacgaagctagaaactgagcttgatcagctgctgttaagaggtgttcagtccatttttacaagtacattggtttctcctagtacatgtggttgatttcttctaacatattaaaactactgtaaagtgactcatgattgaaagcattcatcgacttaacagttacaattgataaattttgggattacctattaatttaggttttagatatggtggatggctagaatcaatttgatgcagtaggagatattggatatgaatttcattgttagatgatcagctgctacattcatcatgtttcacgagtgctttgcttgctgtctcgaccctcgaccctttactttagagatttcaatagatcagaagagagttaagaggtagttgacaacttttataagctggccagagatataatcaaggcaagtacctatttgcttgaagttaaaaggtttcactctacttgatcatgagtattctgaatcagatcttggtgtgtgtgcaggttgatgcgttcaacagaggatatcat

SEQ ID NO: 23453 - DNA, 629 bp, Arabidopsis thaliana landsberg
atgaaaccaccgcggatgaaatcttgaggagtcttaaaagagcaatgttatagccaatgttcattatcacaaacaacagaggcaaaaacggagccccatcacatccttttgttattgtcccattgttgagaaaacaaaccgcaccatcttttaggtaggtaccgagttggttaaacggtatgccccaaagttttgaaagaaatggaagaagcaacgcaatgcagatggcctaattggtaaggaaacaaaaccaccagagacaagattacttggcttggaatgcaagtcatagtttacagagaaatttttagggtgaaacacttacttggaaagctgaaccatatgaatttactataaatagatcgagtgaagcaccctgtggtagtaaaaagtagatgatttttgagtctttcaaacaaacatataaaaacttctgataatgtggtgttggggattgtaatgtacctttaatcgtctttggctatctatatagatgacttcctattagaaaagggatttgagattaaggagaataatgtcaccaaaattcaaaggtttgtaaataggtgagtacggaccttcaatactgtacatgatccttgaagcatagaagagagaccattagaaga

SEQ ID NO: 23454 - DNA, 578 bp, Arabidopsis thaliana landsberg
aacacagatctcactcatttggttatataccagatcaagagtaagctttgcataacctacgttgtttagtgaatgtgaacaaacagtaatatctaattataaaaaacagagagaagagagaatgattacttgtgggcaatacttggcgatggcgatgctgaggttcttgacaatgccagcattgatgttgaaaagatcatcacgggtcatgccaggcttccttgggacaccagctggaataatgacgaggtcagcgccttctagagctttccccaaatcatcatcacccatgtacccagaaacctgtttgaaacatgacaatcgcacataaaagacaaggattttacagattatcgccaatacaattagcaaatcgtggacgatcatcgaatctagaccgaagatgaaaacatggaagcgatcgggtacctgaatcgggtgttgatgtgaccgacgtcagcagcaacgccgggagtgttggcgatatcatagagggagagagaagagacgagagggttaagcttcatgagaagagaaagtggctggccgatcccaccggcggcaccgaggatgacgac

SEQ ID NO: 23455 - DNA, 649 bp, Arabidopsis thaliana landsberg
tctctaatgaatcctgctgccactaagcgcactaactcggcgcgaatacttctcttttgtcaggcgtgaaacgacgcagtttctatcgaatcggccttgcttgaggatagaccttcaatttgtgctcggccagctctcttaggactcctggcaatgtcacaggttgccatacgaacatgtctcagttatcttgcaggaaccgaatgagcgcgctttcctatttgtcgtcgaggctggagctgatgatggcggtcttgcgttcaacagcgaaccctaagttgatactctttgtctcctcagtcggccgcatggaggtcacgtcttgagtttcattcgcgggtatcgtgagatcttctttaggctttgtgttcgcctgtgcggaggaagtcgttggtggtttagtggtgagggccgcctgaatagctcctcgaaaacactctgcagcgccttggaagtctgcacacacggtaatgattgcttgaggccctggcatcttcaatatcatgtatgaattgtgtggaatggccatgaatttcgcaatcctggcctgctgatgatggcattgtaccgcagtcaaaactcgccaactcgaacctcaggaactcagttctgtagtgtctagagttcaaaggtacgggcatgtagatgt

SEQ ID NO: 23456 - DNA, 845 bp, Arabidopsis thaliana landsberg
gccctctgccctctcaaaatattcttcatacaaatttttgatctctttttttttttgtcagaaacaaatttttgatcttataacaaatttttaggtcaaaataaacataatttgatcccttttttttttgccggccaagtaatttaattgatatacgccaaatgggcaaagtacagaaaacccaaaacgagaattataaataaaataaactcaattccaaaactatcatacaaaataaaaaatattaaaatgagtgcgaaaaggatttagcatgttgacacgtgtaggagacgtgttcctcttattgccacgcgtcaagccgtctgggcaccgctagaattccgattaatcacctccgggcagccctgagatgaaggagatctttctaccttctgccgatctcaaatccagcctagagacataaaaaacctctggattgattgtaggataagcttttcaaaattcctccgaacaactccacctccgaggaagctccatcattgacgacattcatcttgatgttgtctgatctttgctccaaattttcgagtaaaagtaggtgatgaagatatcacttcgcgaatagattggatagatcgaattagatcttgaagaaaaacagagtcatcgacgagcctaattggaaatgagatcgatctcgctagagcgagaaaacaaaaccggacagagccggtagccggaatccgacataaagctggaacttatttagcttgtaaataaactaggttatatacagatccagacaaatccggcatgaaaacccaaccggcgacaatcatttcctctttgaaggatttaaaaagggaagagaggagaagtcctct

SEQ ID NO: 23457 - DNA, 535 bp, Arabidopsis thaliana landsberg
  unsure (1)..(535): unsure at all n locations
catctctttttttctaaatcccttcgagcttcgtcagattctctggaaaaagaaagaggagacaacaacaaagcaatatacatggcccagttagaaaattaataaagcccatttatatttgggcctataacactgatgacgtcatgtaaaagatgatcaaatttcattatctcccgtcgtcgcgaccttctcagacaacagaaccaaatcctcggcggcgattgaagaaacctttccgatggatctgctcagggaagagattctgaagaaacgtaagagtctagctgaggaatctggtggtaagaagttcttcaagcggtctgagatcgagcagaagaaaatccagaagcttcgagaggaagaacgacgcgagcacgagcttaaggctcagcggagagccgccgccgccgcnnnnnnnnnnnnnnnnnnnnnnnnnnnnnnnnnnnnnnnnnnnnnnaacgcagctacgtctgcgtcttccaaatactctgcatcggacgctgctgctatcgccgattcaaaagccctaaccgac

SEQ ID NO: 23458 - DNA, 2739 bp, Arabidopsis thaliana landsberg
cataactgaagactgagaaaacggcatcgtcctagcggatcccttgatagtaacaatagctacttttttttcaccttctttttctttaaactatcgtcagtcgtgcatttcaatgaaaatattcaagaacaaaagattttaacttccgattcacactcattcaccccaaaaaaaatattttgtttacttcgcatcaatttcttaattgttttagatgtgtactcttcttatcaaacttactacacctttgattatatcctaattatatttaagttatttttcgacccaagtatacatatgtaaataacttttttaatataaaaagttatccaacaattttgatataaaataacaaactagtattgaacattttagggtgtctataacctaaacacgtgtgttttgcttatgtataattaacttataaacagaaatgctaagaaaaacgaggagtgtatatgttatttgagatgatggcaaatttccactcttattttgcatatccaactcatcgttcatggataaacctatgaatcatcttatagatttcagttttgagccattaagtttgatttgtggtcatcaaaatcatacactcgtcctcgaccataaaagctaacaaaaattaaaagtgggaaaaaaagagacaatggaaaagaaaagaaaaagcttttattcttgttagtaaacgactaacgactatctggtaagaatgaagatagcaaagattaaaattcatcaaacatagtttagaatttcttttgagtggaatctatcaaaaatgtctcagcttctctcccgactctccaatctctctcccaggagcctattcactcgtaagcttcacagtttaccgaacaaaaatgatttttttcctctggaaattaaattacgttatgtacttgaaaaaaagaattgaaatttcagtttctgaactctttggtactaatttggttaggttcgtttgttttcatcatcatccaccaacccctttttgtcacttgcgtgcaacacggaagcgttacgaagtggcggaaacattggagatgttctcttgttcgacgctgctaaggaatatatgctcactgtacctgacaaaatagtacttcaagagatcgttgatgggagaggactgggaacttctcatggataggtagttttctgtgaccctcatgatcgttttgtgtgtatcagtgacgtttttaaccccttggcttctaagacaaacccgaaaatgattcctctgcctcccgcttactgctcttaagtcttgtcaaagccaagtcttttggaatgtggcaatgtcctcttctcctcctgatcaagattggattgttgccatcaagttcttggatagacagcttagtctatgtagtcctcatcgtgacttgcggtggactaatatcttaactcctttggacttttcggaaaactcaaatctgatgttttcaaagagagaccaaaggttctacttagcttgcatgctcctggaggcaaccgtttgttctcatatgatctcaactttaaactagtcaagaatcctcacttccatgagttgcagttccgagaccttccggaatttggttttcttaatcttgatgactttcccggccacgtcatagctggttttggaagctcatcataaacacggttacaaattcaataatatttcttacaacaagtgaacaagagcaataaccatatagctatttgatcaaatctctcgactaaacatgatgaatacaaaatgtggaacaaaatattaatcgaataagcaccaacactgttttgtatggacatcgcttcctacaacctgtgcaagatggtcgagacatatgattattgggcaacacaaatagctttcttccatccttgtagatacacaatgaaccgggcttcatgtataagtccttcccaatcagacatctgatgtgtaaggtgacacaacaatattcatcacacttataaaaccgatctttcgaacttactttttcctcacagacttcacaccaatatgtctcggtacttgtctccttcccataagaaagagtgagaatatgatcatcatgcttatacctcacattttgaggtaaagtagcacatccaaaacacaaagcaaagtcgcatttgatgcaattgaatgtttcatttgtacattcaagtcttgaatctttgcaaacagagcatcctctttgctctcctggtttagatgttaggaataaaggatccatatgactttcatggactaatggctcagaaattgtagcgcactgcacatgaatcttaaaataacatccttctttatcacactcataggagaaaccagctatgcacgaccaaggacaagctgaacacttatcctcgtacttcctaacatcatcatttcctcccattagagagagcaaatgtggatgtattgggttatatgctttgcgagaaagatttgcacattcttcatggagaatataatcacattgcatacatgagaagaagttaccgaaatagatgggcatgatgtatgcttgacatagcttgttctcgtcgtagattctgtctctgttctcatcaagcctcaaatgatgattctgatgactaaaatggtgtattactcctttgcttattgtcacaaacggctcaacttcttcttcttcaatctcttctggcactccctcaagatctatgccatcccacacatttttttgtgtggcacatcttgaatgtgctacatacgaacaaccg

SEQ ID NO: 23459 - DNA, 628 bp, Arabidopsis thaliana landsberg
attcacgcaacacgtgtcagattttttctagtatattataatgatgtctctgttttctgttctttgaagtcgtgcattctcatctcacacgttccaaggtaaagaaaggatcgttgacaagaactaaagatctccaagaagataatggaagatccacttttattgggagacaatcagataatcaccggaagtcttaagccgacgccgacatggaggatgaatttcacggcggagctcaagaacctcagccgcatggcgctgcctatggccaccgtgactgttgctcaatatctattacccgttatctcagtcatggtcgccggccaccgcagcgaactccagctctcaggcgttgctcttgccacttcttttacaaacgtatccggcttcagtgtcatggtaactactaactagttgttattaatcctcagtttcaagatccattcgaatctcaaagtcttgaatgtttttttgcagtttggtttagcgggtgcacttgaaactctatgtggccaagcttatggagcaaaacaatacgcgaaaatcggaacttacactttctctgcaatagtctcaaacgtacctatagttgttctcatatcgattctctggtttacatggacaaact

SEQ ID NO: 23460 - DNA, 608 bp, Arabidopsis thaliana landsberg
gctcgttggtgatggctatcttgcccaagcctttgaccttgccttggttcccatctccaaagatgatcgtatcctgggaatccttgttcttgacgtaggaggtgaacatcttcttcttccccgtcatgtggtttatgcatccactgtcgataatccagcttgagcccccggatgcataaacctgcaaggcaatttacgcttgggttttaagtacccaactcttgttgggtcctacaaggttagttacaatagcctttggaatccaaatacaagtcttgtctcccttgcatttggatcccaactttctagcaattactttttcattcttacaaaaaattgaaaaagaagtgttgcaagcatggtaaatagtagaaggttcattacatactctcctaggcacatgatgcacaacatgatttttcctaggcttacttctaccatgcacaaaagtagagctagaagcaaacatagcatgtgaattaaatgcatcataactcctattataatgagcatttctagcaaattttctatcataaatgtaagcatgacattttttagaactactagccataggagcctccctttctccttgttgagacggacctttt

SEQ ID NO: 23461 - DNA, 578 bp, Arabidopsis thaliana landsberg
gctgccaagtgagcctgctgctgagtgagagtctggagaatcgctgcaagagcagggtcaatggcaggaggggcagtagtggcagcaccactggaactcccaacctcatgatcatgtgagcgtggaggcataggaggcggaggcggaggtggaatccccaaaatcatcatcatcatcatcaactgctgcgtcctgagcttcgaactgatgaagagcagtatcctcggcctgagtgtcaaatacaggagcaggtgctggcacaggattctcaggcgctggacggtaggacccaaagaggagacgagaggcctcaagtgtgccctggaactgtggaggccgaatcagctgagcaaaaatgtgacacagatagtgagcatagggcagctgtcgacgagcacgcagaccatccagaacggtgtcctcgatctcacaaataaggaaatccacaacatcaaactccgagtgagagaccagggcaccaaggagccagagctggatatgagcggcacgctccctgtacccatccgcggcagaagtgcccgctcataagctgatataaaactttgctgctgtggtga

SEQ ID NO: 23462 - DNA, 923 bp, Arabidopsis thaliana landsberg
gtattgatcttttatttcatcaatgagattcactgtcacgccatattcgccattcgatccatcgccgtctctccctggtccgccacgtggcacgttgatttcctcgtcaaaaaccctagctacatgtatttacaccagtccaacaaagattaaatagatatatattttcctccaaattttatgaaatgaagcaatggcttcttcttctcttgcaggtatactatctactacggagtaggtgaaactgcgttgaagctcggtgccataaacgctgccgttttaagtacttctcacaaacgtatttcgcgacattacacggctttctcagttgattttgttgcggggggtaacccaattgttttggagcaactagatatcaaactaaaggcgaaggagaaagcatacgtaggttatgatgcccctggacatattgatataaggtgttataatctgaccccaagccacgagaatgtcaacattcaatgtaaatcttctttcacagaattgacagaagtttaagaccttttcgataaaacattttgatattgtttcaattaggcttttctacttcatcatctttttttttacttgtttatttcggtaatctagactatatcatttatttaaaagcgcctctaacgaagaagaacatagaactctactctcaaatgctcaagttatagagtttcaataaaaatagtgagaacttaactatcacttttaaccaaataaataaatactggcgacagggagctaactcaaccagtaaacctttgatcatgattggaggtcttgatttgctctggtttgcaaaccaaccgagattacgagctttagcccgaagtttctttagtaaatatatagggatatattaaagaaaagatcggaacacatatttatactgtcgcgatgattaggtgatt

SEQ ID NO: 23463 - DNA, 754 bp, Arabidopsis thaliana landsberg
aattcaccaaatttaaaccggttcattgcggtatatggtcctatctctgttcaatccggatcaattaaaccgaacctaacaaaacttaaaataaaaacatctaaccacctgtcaaattgatcacgttttgaaagcaaagaggtaacaactaaagattcagcagaaatcttagatatggaaatgtccctgaactactgttgtatttaccagaagattccactggctaaaagtctttttaagataggggaattgacgaggtcgttaatgggctattgggctttaaaatgttgttgggtctgttttattctcatactttttgcttgcaatgaatccaatccgaagaataattcttgttttattgatatcatttggacaaactgagtgaaattaaaatttggatctatgtcaaatctcgacaaaatggataatattagaacaaaaaactaggttttactttttatttaaagataaattaataagtatatttttctggcagcaaaaagtacaggtattattttgaaaattattaaataaatcagattttttttcaagaattttacataaataaaatttaaaaatttttgacgatttggttgacactgttgacagtcgttatagcaaatggagaacatctgaaaaagtagattttgttttttattttattttcaaccccaactaatttaaatctttttttagcaacagaaaaaaatttatttaataaggcttttttgagaatcttccctatttgataatt

SEQ ID NO: 23464 - DNA, 2353 bp, Arabidopsis thaliana landsberg
tgtaagctggcatgaagttggaattcatggtctgttcatggacatattacagatttccatttatggacattctctgggaagtgttctctcctatgacatcttatgtcatcagcacaacttgtcatccccatttccaatggattcagtatacaagaaatttttcccagatgaagaatctcctccaactccagctaaagctgacaaaccttgtagttcacatccatcatcaaattttgagccagagaaatctgaccagttgaataaccccgagaaaatcacaggtcaagataataacacgatggctaaagaaccaacagtattggagcatcacgatgtcatccaggaagatccttcattgatctctgattctgttgtggccaacgtgggtttggaaagacgaggtggccaggaagatgaccatcatgattctagtggtgctatatcctcacaggatgttccagatggagcggactgtagaacgcctgattctccatcatgttctcaagaacaatcatgggataaagaaagtgtcaactctaataatgaggagagaatcaagttgttacaagatgaggtaaatatcggcactttcaactgttcattctttgatgagatatgcagtttaggttcttgtaagctttcaacacttgtgttcatagcatctggtactttcttagttttgtgttctctgtggaagtgttgtccagtttctttactgtctgaccgaaacagagaagtagttatgtttccattgatggtagttattgttatcccaggttaactcattgaggtcaaaagtcgcacaactgctatcagagaatgccagaatattatcggatggtattgtttctgacacttgatttctatctttcccatattttgagttgtgtttgaaaacttcttttatgtacatcttagtgatgatatgaaatgatgttatcaacagaaaaagccaagacatctgtggcgcctaagtagagctccatcggtttagtgatttggacctcctctcccccgttaagtgcacaagtttttttaattactatcaataagtaaatcttcacacatctctgaaccaagatttcatactaaactaccggttaattaagtcactttgttttggttcatctccaatccaaagcaagtactattgatattgctcatatagtagaagcagattaggtttcgttaaaatcggattgtgattttttgttgaagaattatatatctcacaacagaaagatccagaagatagctaaaccaaagatgcatttcaacaagtctcgtaagaatattagtacaaaagagtggccaactctacacaaacacaaggccaattctgttaagagtattcacatttttgcacacaaggttaagaaagacgagttactctataaaggtgtcaggtataacagcttttgcacacactttttcttcttcatatttgctctgaaatcaataagctgctcaaaacagtagatgtaataaaagatccttgacctgcaagttaaagtaagcctcattaagactcgagtctaaagaaactgtctcaacagagcatcaaaaagtaacatacctgaaacaccatcccacagatcatcaaaatgtaacagagcgacaaagatcaatgtaaggcgagtacacggatctgagcacaggcaccattgaattgatcatccccaaaatcggacctgtttcaccttttatcaacgccatctctatgcaccaagtatctgtaaccgggttgttataagtagcaccaaaaaccatcaactttccaccaaaattcgccattttacactcaaagtaatcgagatcaggaaaagcacgtatacccgtacccatcataggagtccaaaccatgacatttggatcatacacatttatcggagaaccttgaagacagtatggatcaaaactatacaacaaatcctcaatcacacaacacggcttgtaccagtaagacttcaacgtagttccaagctcccctgactcccatgtaccatcaatgggatcataaaccaaaccacacgtagcatccaaaatgtaaatcttgttttgcatcaccacagatgtcacaaaccctcctcctggcaaactagacatgaaatgggatcgatcagggacagtactccaaattccagtcactacatcgaacacttcgatccaatcgtcgtaccgcttctagcaacctccgatgacataaatcttttccgttgattacttctgcgactgcacggtaacgagccctatgcatagttgggagatagttacacgtatggactctacagtcgatgacaaacacagtctttacaggggtattttggccctatcagtccaccgatcacataca

SEQ ID NO: 23465 - DNA, 967 bp, Arabidopsis thaliana landsberg
atgtctggctcactctatatatatcacttcttggttagttgattctttaaatagaaaaattattcccaccatcctttctatttatttttaatttcattttaaatcaatgaataaaaatagatttaaaaataatttattgccacttctctctactatctaatattcaaaagtttcgagtgatattcaacattataagctatgtttcatatagtcttatacatttatagggttaacactagcttacctttctaattctatgtttttgattttcggacaatcaaatttatgttttcttattcatattcgaatttctctactcttaactctaaatataaatctttgtgaccttagattggatttggatgtcaagtttgaagtttcattattttttgttgttgttttgtgcatgtaaattggtttaaaaattcggatattgaagatacattttggatttatgtatattttttacccattcaaacatgaatcaaagaaaattcaaaattttgggtatttactggttttcagaattattatccagatcgatctgaatcggaatgtacccaaaccaaactggaaccgaatatttacaattactttattggatagtaaatctattacctatttaacataaactcgaacgaattactcatatgtccaaccttatatggagaatgaaatatcgtctatcgtgaatctaataaggataagaaagaattgtctgttgtaaaattttctatgtaacagttctcataatttgcaataaataataaatctagacgttaaaaaacatataaacattttaacaaattgaccacatttattaaacaaatttgatgaatatataagaattataaatttgttatacacatttcaaaaaaaaagagagtaggttgactaaactttatgacctgaccatgaggcaaatatagaaacttggggttggagttttcaagcatatattattgat

SEQ ID NO: 23466 - DNA, 1215 bp, Arabidopsis thaliana landsberg
tttgatctttatagactaaaacggatgactactgggccgaacagacccattgggccaatttcgtttataaaagagggtataacggtaatatcatcagaagatatacgtcaccatgccagtttcgaagaagcctattggttatatttcgtcattaactagacggaatgacgaaactaccctcagatgccttcttctaaagttgtctcttcactgtcaagaagaagagaacaaaaaaaagaaaggaattttctctgaaacgtcacgaacgtgtgaattgggttaaaaaattcatctcattgatccaaacgtgaaaccctaatttcgaatctctttgctgatttggtgagatctcaatttcggaaagaagatgacgaaggatttcgcagttccacctgtagttttcccctccggtggatcttcaggcggtgctaatgtccagcaacgaagattcccagcgacaccgtttcaaccgccgcgtccctcttcttccgcaatccctttcatgtcattcgacattggatccgcagccgcgtcttccgctacacctgccggaccattcggcgggacaatcgcttcctcttcttcttttggtggaggttcagcttcgtttgaagatgaggagccattactcgacgagctcggtatccatccagatcaaatctggaagaagactagatcgattctcaatccttttcggattaaccaagctgttcacaaagattcagatctatctggtccgatctttctgtaccttgcgctttgcttatttcagttgttagctggtaagatccagttcggtgtcatacttggatggatcgtcgtctcctctatctttctatacgtcgtctttaacatgcttgctggtagaaatgggaaccttaatctccatacgtgtacgagcttggttggatactgtttgcttccggtggtggttttatcggcggtgtcattgttcgttccccagggagcagggccggttcggtttgtgcttgcggctttgtttgtgttgtggtccactagagcctgctctacattggtggtatctcttgctgatggtggagaagagcaccgtggcttgatcgcgtacgcttgtttcttgatctatactctcttctctcttcttgttatattttgattccatattgatagatcgtgaatcacttccgatgctgtgttagcaagtagcaaaaaaaggctgcaatataagttctttga

SEQ ID NO: 23467 - DNA, 559 bp, Arabidopsis thaliana landsberg
  unsure (1)..(559): unsure at all n locations
tcaaaaccaataaaaagaacaagacaaggttcaaaagaaaggagcaaagagaaaccgaagtcctccctggtatggcgcaccggactgtccggtgtgccaccggacagtgtccgtgcaccaccggaccgtgtccgtgcaccagggaggattgccttcaaactcttcaccttcgggtttctcaggcgcactcactataattcaccggactgtccggtgcaccaccggacagnnnnnnnnnnnnnnnnnnnnnnnnnnnnnnnnnnnnnnnnnttcgggaaagtgggaggtccctccgctaaaattcaccggaccgtccggtgtacaccggaccgtccggtgtgccagcggagcaacggtcatctgcgcgcaacggtcgactctgcaaagtgtacagttgaattcagagtgtcagagcagaagtcagaggcgcaccggactgtccggtgctgcaccggactgtccggtgcaccatgaggacaaagcctccaacggtcgcacagctccaatctcaacggataggatgacgtggctggcccactgcacatgtcggtgtgcaccg

SEQ ID NO: 23468 - DNA, 596 bp, Arabidopsis thaliana landsberg
cagtgttagcatggaactgtaccaaaccgatgggaaaagcaaacacatctccggggtaaagaatcttggaaaagagtgtatagttgtagtcgttcgacgacacaaatccgaccgagagctgtcccttgaggactaagatgatctgggaggcacgtggatgtatgtgcggtggaagttgaccgccgggggcgaaatccaagcgggcaatggcaatcccaagagtgttgagaccagggattcttctgacatcaacatcggtgaccgatgcaccaaggcggttgctggtgtttccgggaatgtttaggccagaataaaaaaaatcattggcagttactagttttggatctttacaaaactttccattcacaaaaactgcgaaaaaataatacaaattaagggttttgagttttgaatgatataatttgttacattactatctgtgagataaaactttaatatttaacttgtaacagaaattactcaatcagactcgattatatgattaaaatatttttatatggttattaatgaatctaccactggttgagattcttgagaacctatattgggtttcagctgtagatatatccttaggc

SEQ ID NO: 23469 - DNA, 611 bp, Arabidopsis thaliana landsberg
aaattatcatgtcaaacaaaaaaaaaatatcataaaaagttactacataatacaagtaaaaataaataaatcgcctaatgaagtgaagctcacgtttctcattccatcaaaataaaaatttaagttattaacttctccaaataaacaaaaacattgggccacaattaataggtgcattattagcaagcccatatacatcttaaggaaaaattaaaataaatggtgggtcaagtgaaccaccttttgacctaataggtctgccaccgctataagtgccgcatgtcaacttttggaaatgtgttttttgagaggaacccttctttattatataagatggcttgacaagaaaataatttaggggcttctatacatacactacacacatcaagtttttgtatttgttttgttggatccataataagcttaattacaaacttttactaattatattttcactttaacatacttttatattcaactagataaaggcgaatttaaataaccgggtgtgaaaaataaatagattttatcaatatattatttgaattgtaatggtaatccttattcactttatctacataatttaaaactaaatctcaatcttatatatt

SEQ ID NO: 23470 - DNA, 618 bp, Arabidopsis thaliana landsberg
ggtattccgtttgagagtacggatccaaacaaaatagtcggacatcgatcgaagttcgaggaattggattcggacacagctcgactagcaactgtcgagcgcttgattaaatgagctttagacgagatttataaatcgagatggattatcgagttcgcattcgtgccgagaaataaaagttttaacaggctccataattggttgtttctcgcgatcgaattactctgactttggtgagcttccatgaacaatcctgataaacggagatagacacgatcgagaattaggaaattttcactgagcattcaagttagggacaaatctcccgacctaacatgaaactgacacctagggtgtcacaaaagatgcttcgaaaatccttggtttgcgtgaaaaatttgaaaaacagcttttcgaaggtaggtgcctactcctctgaggagaacttcattcgaggcgaccccgaaggcgtcattgagtggataagcggggaagccgatgcttttcaggaaattttgaatgatcacagagatattgtgcattctccggcgcccggggagtcgcagctgttctggagaaggctggatgcaaacacgtgaaagatgcagctcaagccga

SEQ ID NO: 23471 - DNA, 3373 bp, Arabidopsis thaliana landsberg
  unsure (1)..(3373): unsure at all n locations
tatcttttgctataagttagttaaatttgtgaggggcaggagctattacaagtgcacatttacaggatgttttgtaaggaaacacgttgaaagagcatttcaagatcccaagtcagtgatcacaacttacgaaggaaaacacatacacctaatcccgaccccaagaagaggtccagttttaaggttacttggaaaaacagagacataaagagcaaatgagttttggcatttcagcattcctattgtaatctttcattcatatatagtatgtttccttaatcatgcgcctatacacacataacnnnnnnnnnnnnnnnnnnnnnnnnnnnnnnnagcttctccatcattttgccccctatgttcactaccgacgataaatctttattcaactgtttcaagatattaaatcaaacatacatcacaccaagtgtttgacatgatgatgatggaatggaatggatggtggcaaatgatgtgataaacacacaaaggcatacacataaatgtatattactacaaagagaggaatatttttatgtttctttaaaaagaaagaaagacgcaaaagcacatgtgatagtagccgacagtttgaagtaaagccagcaaatcgtgaaagccatttacttttagatctctctctgcactctctgactttgtccgcaaagtagatctgctgcaatggcttctcctcttctcccaacttcgactactcctgatcaacttcccggcggcgatccacagttgctgagctctctacgcgtcctcttgtcccgcgttctagccaccgtccgtcacgcttctgcagatgccagaccctgggcagagctcgttgaccggtcagcgttttcccggccaccatcgctctcggaggcaacgtcacgagtaaggaagaacttttcctatttccgagccaattacataaccttagtggcaatcttactcgccgcgtctctgctcacgcaccctttcgctctcttcctcctcgcatcgctggccgcttcttggcttttcctctactttttccgtccggcggatcagccgttggtcattggaggacgcacgttctccgatcttgagacgctagggatactctgcctgtccactgtggtggtgatgttcatgaccagcgttggatcgctcttgatgtccactctagcagttgggatcatgggcgtggccatccacggagcgtttcgtgctcccgaagacctgtttcttgaagaacaagaagccattggatctggccttttcgcattcttcaacaacaatgcctctaatgcagctgccgctgccatagccacctcagcaatgtcacgcgttcgagtctgagattgttgaagagactacattcctacaccgcatttccaaagtgtgatatttattcatattgaattgttgtaacttgtaaccattcttttgtcatttctgttttgtttactttgttgctggaattttgaaacacaattcatcttactatacaccattaaaacgagagtcagtaaagaagaattttactaactctctcttgttttttgacaccgaagtaaaaaagatacgacaaattggtttaagctcaaaaccatgaatcgaagaataagaataaattacactgtgctctcatgttaagagctctctctatcgtattgccttgtttcctcagcaacctttgtccacacattggcgatcttctctgcatatccaacctgcacattcaaataccaacaactctgttttcacacctttttacatattttcatctctttatttcaaacatctcactcagatttctcagcattcactagcattgcaagagagcagatttcaccaattttcaagcatccattcaaatatctcaaatcatattccttttggtgaatccatttcatgaaagaaagtccccaaatcatagcatcccctataacactcactgacttttctcttccatttcagagctaaaagatcttgctttacactctctcgctaattctatgaagagacagaggtttaataatagtcaaagtccttatatgtacctgattagcaacaaaccctttcatcatattcaagaagtctgcacgcctttccctatccagcctttcaacctcactccagttattttcctgtcacaatatacatagttacatatgacctcaaatcagcataagagttgttttgtatatggacatgactgaatcgaataccttgatctgctcgtactccctgatggcaacatttttagagtcttcagtgaccttgatggtttcttttaactcttctatcttcttaatccttgatttgtcaccgccaaagacctttgatgatgcaacttctagcttttctgctcttgcttccagtgaagaaagttcagatagaagcgtctgcactgtcaataaagcactagatctatctgcaaaggcgccctggactgccatcattaggccaaggtaatcgtggagtgtgtcctgacatgaataattcagagctcttagtgaaactaaatcccagctcaatgaaagtggaatagattcttcatatctctacaagtatctagtttaccaaatgcttgaccgtctgggaattcaactctctgtaaaatctgcttgctttcacagctgaagtggctaaattcttcatatcattggcacgagctctttgagaattgaagacagcttcttcgttctcgaatttcgtcagtttaatgaatgctaatcccaattcccccatagtctcccccatgtcttgctgtgccttcacgagggattcagcctacaaaaaacaaaaaccatgaaaaatactgatcttttgtgaagtaacaagtatgaaatctctctacctgctgtgaagcatcaatgatctgttgctcaagatcatacattttctccttcttctccaaaaactctttatcttcttccacaacaggtggttttgatccaccccagtcattagaaactgactgtataagttctttaaacattctcagaaaatctctacctcctcttgcaggctgaaccacctcaaccgaagaagctccaccgccttcaccaaacaactgtttcggcagcttcacagcaccatccaacatcctagaagccacatctgtgctcgtagcaagcggtaacttcccttgcgcttgaagaaaaaccttcaattcatcactgttcctgatcacaggatgtgcagcaagcctacgcaaatacttctccaatgcaactcttctctgctccacaaactcttgcttttgcatcacttgactctcaactacactcttatctggcctcggtggaatccagaaccctctataagactcagctaatctaacagccaatgtaacaatgtctctgaatcttctcctcacgctaaactccggtcc

SEQ ID NO: 23472 - DNA, 569 bp, Arabidopsis thaliana landsberg
agagatttcgaaagctaggagggtttttgatctaatggaggatagggataatgcgacttggcgaggaatgattaaagcttatgaaagaaaaggttttgaattggaggctcttgatttgtttgctcaaatgcagaaacaaggagttagaccgagttttccgtctttgatcagtattctttcggtttgtgccactttagcaagtctacaatatggtagacaggtccatgctcatttggtgagatgtcagtttgatgatgatgtctatgttgcctctgttttgatgaccatgtatgtcaaatgtggtgagcttgtaaaagcaaagctagtattcgacaggttttcctcaaaggacattatcatgtggaattcaatcatttctggctatgcgtcgcatggtctaggagaggaagctcttaagatttttcacgagatgccatcatctggtaccatgccaaacaaagtgaccttaattgcaattctgacagcatgtagctatgctggaatactcgaggaagggcttgagatatctgaatcaatggaatcaaagctttgcgtgactccaacggttg

SEQ ID NO: 23473 - DNA, 609 bp, Arabidopsis thaliana landsberg
taatgggtcagtggaaacttgccttcaccaaactgatacttagggtcttcaactttgtagaactcgaggagcttgatcacatggtcaccgaagcttgaccatcgattcctcgaagctcggaaacaaatcgcgatctaatcgcaacacgaagcgaagacgaacatgcacaagcaaataaacatatacatatgcataagaaaattacaccattcaaagaaaaacttaataaaacatacaaaaaatagagctcgctcttatggtcacacgacgaaaagaaacacgacagtcagagctacgatcatgaagttatcacgtttacgctaaacaagtactagttaaaacattcgattcgacataattatattaattgaaatttatgaaatataaattaaaactacttagttttgcctaacttactgttttaattatggatgattaaatatataactaattaactcacatcagtgattataagcgaacggtttaatctcgcgcgcggataacacgcgatacggcgaacggcacgagcggcatgagcgaacgacacgcgatcactacaaaaataccccctattgcaaacttttatgcgttgtagaagttgaaatagtg

SEQ ID NO: 23474 - DNA, 589 bp, Arabidopsis thaliana landsberg
  unsure (1)..(589): unsure at all n locations
taatacgaacaatgaaacatgtttggaattcggcaattttcacttttttgtaatcgaataactaattagggaggagctgaacataaccaacttgaattattttttgattaatctnnnnnnnnnnnnnnnnnnnnnnatgttagctgtcatgactttgacgttttttgtgttatttaattaagaaacggcgaaaaaacttgtctgctttttggagttggaagaaatagagagccgtagaaaagttattttctatagtttttgtttctgattttttaacactcaaattttttagcggataatttggtactaaaattagtgtcaaaccacatttttgcacatatgtaaataacatttttcgtatttatacttggtttcagttaatatagttgttgacaaaaataaaaaagaagaaagataaaaagtaaaggaaaaatgggtaaaaaaatcctcacccttttctaaaaacatattaaaacccctccactattttttgggtttttaaactntaacctttttacaaatggtaaaataacacctagtattactaaccaagtaaatacccaaataactattacaataaaacaacttt

SEQ ID NO: 23475 - DNA, 1930 bp, Arabidopsis thaliana landsberg
ccaaagaaggttgagtctagcacgacaagccattgcggacctgtttaaaaaaaggtaaacctggttatttattatttttactagatcctaacctgcacagtggtgcgggtagtactgtatgtcttttaatcttaaaatatgaaatcccgctagtagtcactactagtagaaattccccaaaacagaccacataatgattgttgaactatcatcacttgaaactgctcttacttaaaactaagacaaatgtatcaatcagaacaaatcaaattctctgtcgcaacaacattagctactcaagaagagccacggattgaacgcaaaatacttttggagttaaatttcctccgaaatatataaaagtgtttaactttattggacataaaagtgtttaacttatcaatacaaaaagcaaaccattaagctattttggtcaaacctgtccaaatgccacgaagtaaacaaaacctggaacaaaatttaaatccagaacactggaagactactttgaatggacaacgcttgttacaggtcttgcaaataggtcgagacatacgattgttgggcaaaacatctatgtctgtagcaccggagtggaacaacgataaacctggcttcaagtataagtccttcccaagcaaacatgtaatgtgtaggtggacacaacaatactcatcacacctataaaacccttcttctggatttatttttccctcacaagcttcacaccaatacgtcatgctacttgtcttcttcccataagaaagagggagtatgtgtttatcatgcttatacctcacttgttgtggtaaagtagcacatttgaaacacaaagcatagtcacactcctcctcaatgcaattgaaggtttccttggtgtactcgcctggcgctttggcgcaaaccgaacagtttctttcctcatttggtttggatgttaggaataaatgatgcatatgacttggatgaagtaaaggctctgaaattgtggcgcactgcacatgtagcctaaaatcgcaatctattttactgcacttatagaagaaaccagctatacacaacgaaggacaagctgaacaataatcacgatcagaattattccaagacccaacatctctgagagggttatctgatattaaagtgagtagatgtggatgtattggatgatgtaatctgcgagagagatttgcacattcttcatgtagaatgaaatcacattgcaaacaagagtaggagttaccaaaataaattggcatgatgcatgcttgacacagcttattctcgtcgtaatctctgtcagtgttctcatcaagtgtcaaatgatgatgttcatgactgaaatgctgtatgattccatcgcttatcctgacaaacggcttaagttcttgttcattttcttgtggctctcccgcgagttctttaccatcccacacacttgttcgtgtggcacatcttgaatgtgccccatataaacatctgtccttgatgcaagaatagcctccataatcattgtcgatccttttacggcagacgccgcaaaaccaatctccttcatcaaaagaatgagtgaaagagatacgatggtgatgtcgtgatatccttatgacacgtggtaatttgaaacagctttgatggatcacaaagtcacaagggggacatatatacaaaggacatcttgtatgtgtcgatgcacaaacgctgcaagtcaagggagtctttcttgtaaacaaagaaagagtatgctcatgccacatgggatggtctacagataagcgtcgtggtttctccacacaagctatattgatagcataatcacaagccggacagtaataaaacatctgttaaagatgttcatcgcagcaatagcattccctcgttctataagaagcttcaatcaagacaagctggagaaaatgtgttggatggttta

SEQ ID NO: 23476 - DNA, 268 bp, Arabidopsis thaliana landsberg
tttgcatgttaaggtctctctactctactaaattttgatttctgtttgtctagaatctgactgagagaggggttatcgagatacaatcaatcaatgtatgcgttggtaataatagctttttgtgtcattaaacacttttaagtttgtattcgttttacaagccaaaataccgaacattcaaaagctctcatgaaatccaccacttttactttacattttttcaaaattcagttgacaaatgtgaactatagcatattatgtataaata

SEQ ID NO: 23477 - DNA, 2284 bp, Arabidopsis thaliana landsberg
cgaatagaaatccaatgtaacaaatatgatagtctgtttattaggccacccatattacaaagatgattttatgttttttgtaacaatggtgtatgacatacttggtgaattatctaactttggagaagttttatgttttttaatatttaattgatgatttaattaaatatcaaaaaacatttcattttatgtttagcatctaaaagactctactctacatgagaggatgtggaagacaagtagtgtgggctattcatattatgtaacaaaagttatttatatatcactacattcaaatagtgataagtttatgtgagaaaaatggcaacatttagtttagtgttttttgttttttcttgatggtgagaagttttttgtttttattgtgatgtaaaacctttaatcgatttttggtattgttatacttgttgtgaactttatatacaaaatactgttccaagaaggaatcaggccaatgtagagggtactgttcgtcaaacaaatcagtccagtattgagaatcctgtatcagatcctcgtctgaccctgatcctagaatctcatccgtaaacgaatcttcagatttatcttcactaatatttgcaaactttttcctttcctcaatttcttctacttcccgcaagacggcctcatcttcataacaatcatcaatatacacacgatcaggttaaacatgtttatttgtatataaggcattgccttgttatcttcttcaataagaaacatcttttacaacctcaaagtgttcttgacatgttcatccatccaattcctctttgatacggtgaaaacactttttagatatatagtaagatacgtgtatgtttgtttttcttacccctcccaaaacaacgttaataaaggacgatgtaaggcgtatttataattttatagtctatattttagcaaggtttatctcatcatgaaattatctaagtaaaatgtcgatattttagcttaaggcatgtctaatctcggacttctgaatataaagctcagatgcatcacatatagaagacgagcctaaaggagaaagcttttgattgcgaatgttttgattgacacatgtgatgcaccgggaaataagagaagatatgagaaagcttttgcagtagctacaaaacataaaaacagagtacttcaagcaaaacaagagtacgacccattgtggttcataatgcacttgggaaagagagaaagagagattgaacaggtcacgtgaccggttaactaagtaacatgatagcttggattccccattaaataaaaaacaaacttatcgttttctgacatttttcctcccatgtttcccgactcacatgtgtccaacattaatcgatgatatgattagctgttagctgatttttttttacaaatcaagatcagcatctatagggtttatttatttaaacagagtaatttgattgaaatggacatcaaacattaaaaacagagttccactaataataacaacatggaagcaataagaataggttttggtctccctaacgttcacagcgtccctctttgtctcactaccactcgctgtctctttcctcgccaacgtttgcttcacagccacactccttcttggaaacccgcaaaacaacaagacttttttgttgcaagttcttctaagaagagtagtgatgatcttgagagtagtcttccaacgccgcacttttctccttctctttggggagatcacttcctctctgtttccctcgatgaatccgtaagtgcatacctgatccgatgtgtttcgtgaatatgtcttgttagttgtttcttgttacaggacttgatatttctttttaactaagctgcattgtatatatgtagaaatttgaggcacttgagaaagaaattgaatcggtgttcaagcctaaagtgagagacatgctcatgtctcctcacagcagcgacaaggagaggattcgtctcatccatttgcttatcagcctcggtatcgcttattactatgagaatgaaatcgaggagattttacacaaggcttacgggaagttggcctgcttaatttcggacgaggatgatttggaaacaatagcaatcatgtttgaggttttcagactatatggacacaagatgccttgcggtatattgacaattatttaaaccagttaattagatcagtttttttgtttcacaaatatatataacaaagcatataatggtttggggtagatgtgttcgagagataaaaaaaagaagatgggaagtttaaggaaagtttagttgggat

SEQ ID NO: 23478 - DNA, 363 bp, Arabidopsis thaliana landsberg
gaactaacacaatattaattaaacatatttgaatatatattttaaactagcattatgctcgtgctaagcatggacgtggtactttgttttactaattgaaaattatattaactactaaatttttcgaagaacatttaaaatgaaaaagaaaaaaaacgacaactaattggtataagaataaatacaggtgtaaaacaatctcagtcttatctcttctcttcaattgttagtttatcatcgccgattgtgtctttgtgatcggaaacatggtggttggtctagagatttcacccttataaacggattaaatggcctgataaatatgtttgagaaacctcaacgatggagccaaagtgcatactc

SEQ ID NO: 23479 - DNA, 955 bp, Arabidopsis thaliana landsberg
aattaacctcaagcagtctctcaaataagatataaattgcagtactttagggtcgaatttcacaaagttcttttgttcacacgttatagttttgaaattaagctaaatcaataagtaataaatgtaaaagaaatcaagaaagcaggcaacaaattagattgaagtaaattcagatgatttaagcgtcatgtttagtgatattctcaggaaatagatgactaatagatctagctatggtaaggattgttatcgaactgttctagaactcaaatcactaatatatgatcgaacaactctctttgtatcaactaaataagcctattaactaggaatcccaacttttgtgcaaatccctaattgctaaacatgcactaagatcatgtttgataagttcacctaagtataaaaaccagaccaatccgtatttaaatactcaagcccatctatgatagttcagataatagatgccctcttgaatgctacttattactaagatcaatttctagttagatactctagaattaacattaagaataatcaagatgaagaactctaaagataattctacgaggtagtcgatctactatatcatctaaatccctaatgatgagccctactgagagagttactcaagcatggaaattgaagcaaaaaaaaatgattgaataagaaatcttaaaagaaaatagcaatgagaatagagtttagagagaacttccctaaagggaattttcacatggttttgctctcgagaacaaaagtaaaaaggagattagcctctccaagcttatgtctaaaaatgaccttcaaaatctatatataaattctataaatgtgcaaggacttctttgcaaatagggagaagttttggggcaagtcaacaaatcttcaaaacttcaaagagactggaaatggaattgccgtcatatagttgtgtcccgtcccatagctcaaa

SEQ ID NO: 23480 - DNA, 2728 bp, Arabidopsis thaliana landsberg
  unsure (1)..(2728): unsure at all n locations
cgaaattagatattaagagaaagaatgaatgtgatgattattttgctttgttgttaatttcggccttccatctttgggtctggttccatttgagatgtgtaattttatttttatattttaactgtaatttttttttgtagactacttggaagaaagtaatgattaacgtgcaatggatattcatatatgtaggctcttgatctctacttatttcaatttcttagacattatttagaaatttggtgatcagaattgtaacgcattggaacaaacaattgactctaaaagcaaaggaggtgctacaaaaagcctaagattccatcagcggccaacaatacgaccaaataatccacaaaccatcacacatactaagcatttgctatttgtgtattatgttagagagtgccgtgtgattgttcgttgcatatttgtattatgttagagtgccttgtgattgtccgttacattaagattttgtaataaagaaaatttttgcacctaaatgttactttattacaccaaaagatttttgcatgaacatgcagcagataacattcttacattttgtaataagaaaatacagtaaaggatatttgtgcatataacggggcagtgtcaagaactgatttgaagactaaattctatttgaaatattgttatttgagagcattttaagtaatggaggtgctatcagatgagcgacagaaaaaaggaaataagaacttgtatttgcttagttgacctatatttcttttgtttagatgtaaatttatatttcacatgactttacacttttacagagaaggaatacaacaaaaactgactttagacttcagatagcatgcatggcttgcgcaagaactaaaaaactaagcaagactgctcttataggtaaggtacttaacaaaagcatgtattctgtttggagactacttggaagagaatattctcatatagctctagttttcctcaatatcgtctcaaatttttagagctcctttagaaaattggtgatcaaatggaaaaaccataagaggatatattcaactttttattcttttgtctgtagtgtttatctaaataatttatatcaatattaagcattggataatcttaaacatttatttagatatagtttgaacttgtaaacttacacgatttttaaagttcgtaattgaaaaaggagtatacgtccaattgaaaaaacgaaccgaccttctgaaaaaaaaaaaaaaaatatatatatatatatatatatatatatatatatcgngtgatgcaactaccacataaaattactcagattacaaaagaaaaaaagcagacagaaaacctaaagaagatcgaatacgtaagatggaacaaatttgcagagatgatgattggattgtggacgagtcttcgttgacgaagctctcttctcttggccgagggaacttcggttacgtctctctcgagaaggactccaactcccgactttacgcaaagaagtcatcgccgatgcagcacaaaaagattctcgagaaggagctccggatcatgcatcgtttccgtgaccatcatcgcatcgtccaagcctcaaacaagcttcacatacaaatcaaaccctctgaatgctacatctatatggagtacgcgtccgaaggtaatctccataagtttatatctggtttggaaggaaaatccgtaccagagtctttggtccaacgcacggctcgtatgatcctagaaggacttgaggctcttcattcccatggttacgttcactgcaatctcaggccatccaacgttctcctcttcccgtccaagactcctggagagccgtgggatctcaagcttgctgatttcggctcatccaaggaacctgattccgggtatggttggatgtactttggtacggcgcctaagtacatgccaatagagtcttttgggcctaagggagtgatcatcgatccgagccttgatatatatgctctagggtgcgtggtttatgagatgcttggagctatacctatccaggactactttgacgaatattaccaatggaatctgcgtgacgttatctctccgcaggctcaagatttcttaaggcgatgcgatgacatgcgttcacgcaggcccaccgcgactgagctcttgaaacatccttttattacacaaggacttccatcgccaacaacagaagacaacaaggagatatctaggtcgttgattccaagtttctcgaagcttcttttgacctaatcctctctctatctctcttgtgtacatatgtataaaaaaaagaaaaaaaaaactggatagtgaatttgctatggcaaagcctagccgagatgtaccaaggatcggtttgaccttgggaactcgttaaattgtgtgtgtctttgttctttctattcatacaaacgagagtcgtacgtgagagatatgcaatcgagaccaaagtcttctcgagaccaaagtcttcttccgtgataagattatcagatcgatatatctctataccaagacttccatctggtgatttcaatttacatacgggggagaagaaatttctttattttatagaagagtatactttagtaaggtcgattggttgagtttgtttcttacttgcatcacaagaaaataatcttctagtcagtttatctatttggtactttttaaagtagaggtgtcacagtgtgcatgtgctttattcagtatttaccatgtgagatcaacgatg

SEQ ID NO: 23481 - DNA, 513 bp, Arabidopsis thaliana landsberg
aagaatagaagcgattgggggcaaagtaggcacgaagtgggattattgtgtcgaccatgcgggttttacaaagagacacgtgcgaagtggtccgaaaggcattcagtacatcaagtttctgtatgttgacaagtatggacatctgaaagatgggccaatccatggttctatctcaggaaaaggttccatacacttggtatgtattcatgtcatggaataatactagttagaaatatgttttttttcaaaactgaaccgcagaaactaaaccgaatctaactgctgtgtggtttggttgcaccgaataaaggtattttggtccgaaaacgattgaaaagacaaacagtgaaaaccatatctcactttgacaaactatgagagcaaatctttttcatccacttatgtgaaagtttcttataataatattttactttaattgtattttttttagtttgagattcaacatgtttacaaggaatatttggtgtcaagtgaaggttactacaatgatca

SEQ ID NO: 23482 - DNA, 1395 bp, Arabidopsis thaliana landsberg
tttgattgttaccatgaaattaattgtcccattctggggcgcggtgtatcctcctaacacagtgtcctcagtgacactgtgggggagcacaaaatgtcccggaggatgtctccggagaccctccatcaccactgcctttagatacggcatctttcgcgcgtcttcttcctctacttcctttgcttcttccccaactacgcttttgatctcctcgtataacctcctctgaatcgccgggtttttcacaaggttcgccatgatccattgcaacgcggtggcagttgtatcagtcccggcattaagaaactccgaacacaaactcacaatctcatcctcgtttagcttcctcttctcatctggaagctcaacatcgagcagagtatcaacatatgattgtacatactctttgttgtcttcttcctctgatgatctcttcttcctctcatcaacgatcttcctccgagcacgaatcagcggaagcaaaacatcctgctgttcgctctgcatctggaagaactcctcccatctctttcgataaatcaatttagtgaacttaggccaaagggtaaggatgttaaatctggaaaagccaagaagctgtgttctttggacatattccacttgttttatttgcttctcgtcaagcttatctccaaaacacatgagaacaagaagcgcaaacatcgcatagtgaagatgatcaacaacaacaatcggttcttctcctctgtttttaccaaatcgatcaaaaagaatctcaagaacccaacgccgcgcatgagagtaagatctcacgcgggaagggtgcagaatctcagaagtgagattccgacgaagaagacgccacgtggctccatataaacaagagctgatgttatgttggttacttgaaataatcttactgatcgattccgccggtggacgatcggcgaaaacggcaccgttcaaaacgagagcctggtgagcaagagaacggtcggcgacgaatatagcggggcgggaagtgatgcgaagggtgatgatgggaccgagacggtggtggacggagcggagatagttgttgagtccacctaagccttgccggagccattggatggttccaatgaaagggaaatagttagggtcaggtggtaacggaagagagaaggagtcacggaggcgaaagaagaggagattgagaaggaaagagaggaagagagagcccaagataagtaaccatatctccatttttccttcactggtttgctctttgcatcttcttccttcttttcgtgtttatataatacacgtgtatggcttaattattttaaagtttaaaccacaaaaataattatttaaaattttagaaaaatagataaattaagataagaattagaacactaaatttacagaaat

SEQ ID NO: 23483 - DNA, 544 bp, Arabidopsis thaliana landsberg
  unsure (1)..(544): unsure at all n locations
ttttaaactatttgttatgcgtaggtctatttttaaattttttaataaatttgtttgtgactaaaatattttaaaagttttgagatatatatttttatatgtctacttattgttaatagtttaattttttgaattttaaattactatggaaaataattcaatttaaatatgtaaccaaaaataactctaatacaatttttagtttttacaacatttatctaaagaacttttgttttgggttcataactctctctctagctatagatattttggatgaccgcattttcttacgtaaggcgttttgaagaataagttcgacgactttctcattttggtattcgcaaattcactattgttttttgtttatcttcactacaataagtcttctaaaaataagattctatatagaagtatattcataaatgtatctatactttctttttaacaaatcatatttttcacattcttttcaatatgtatatgaatttccttcttgacatntttatcactctgtctatcttttgcaagcattcgttttatttgt

SEQ ID NO: 23484 - DNA, 581 bp, Arabidopsis thaliana landsberg
ttgttattgaaccattctagaactcaaaaaaaataaactatggccaaccagctctagccgtattgactatactatgcctagcaataaaaattccaatcctagttagaaatctctattactaaacatgcattataatcaggtttgataagttcacctaatagctaaaccatacctatgtgtatctagttattaggcccatctatagtagttcaggtatcagtgccctctcgaatgctacctatacctaagatcaagttctagttagctactctagaattagcagtaaaaccaattaatatgaagaactatgtagataattctaacagttttaaagatctactaattcatctaaatccccagtgagaaaccctaaacctaaacctaacaagtagattactcatgtttgaataagaaagcataaagaaatcaaaaagagaatatagtttagaaaagatcttctctctatatgtttttgaaatctctggaactctccacaaacctcagagaattgcagagtaaaagtagaagtatcaaaatttatgtctaaacaatgaccataaaactatttataagttttcaaa

SEQ ID NO: 23485 - DNA, 1080 bp, Arabidopsis thaliana landsberg
tacctgctgttaatgcacgttcaaattataaataagcagattaccatcacgatggatgtatcttctcacatacacacctatcaaaaacttaaaacctttcaaaacctcttggtatatttaaattaggattcttcattcatggaatcattattccaagggttttgggatgtcttatgaaatgattttggcagaagaggatgtaaatttttttgaataaaaagtagtcagcaaaacatatgttttattgaaattttttagataattaaatcagagaatagggctgggcatatgagtaactcattcgagttcgggtagaacccgttcgggttgaacccgttcgggtttgggattaatgggtatatgatttactacctaatagaataattctaaatattcggttcgggtcgggtccagttgggtttgggtcagtttggataaaaagtttcagacccttaaaaatagaaacgggtattttgtatgtagatagtgcgtctccaaacaaaaaaaacttttaaatttattaagttttaataaatttaattatatttgaatatattttactaaattttgacaaatataacaaataattttgacaaacatagcaaacataacaaagtatacaatttaatttatacaaaatattaatgtccgtgttgtataacacgggttatgatctagttgaagtttaaaggatatccgtgtatcctttgttagtgatgtttttgtttgccactgcaatcttgactttacgagaaaattgaaacttaataattggttttctcgttatgccaaagatacagtcaggaaaaaaatatatatatagtgagaggtactaaaccatttggctaaagagatcttgaccacaaaacaacatagctatttatttttctcgtttggtcactgttggtactgggcctcacctggtcattaaaaccatttattcaggccaggccttatatcatgaaatagtaagagagcggctgagcttgttttcgtaagcccatctgtcagcctctcggctattcacgacctcgaggagcgtgacttcgggaacaagaataactgatcacgagatcatag

SEQ ID NO: 23486 - DNA, 375 bp, Arabidopsis thaliana landsberg
agcgttgctcaagtttggtgaagctcccttcctctattggggaagccactaatctcaagaaaataattctttagagagtgcttatctctggtggaattaccctcctcatttgggaatcttactaatctccaagaattggatcttagagaatgctcaagtctagtggagctcccaacctcgtttgggaatcttgctaatgttgaaagcctggaattttatgaatgctcaagtttggtgaagctcccatcaacttttgggaatcttactaatctcagagtgttgggtcttagagaatgctcaagtatagtggagctcccatcctcgtttgggaatcttactaatctccaagtattgaatcttataaaacgctcaact

SEQ ID NO: 23487 - DNA, 574 bp, Arabidopsis thaliana landsberg
  unsure (1)..(574): unsure at all n locations
atttgctataaatcggatttatgcatattttttgaagtaaaattcacgattttgttttttaaaaagatatatgaaaagattgtgtagagatttttagaaacaaattaggcaagatatagtttggttaatatctttttaatttttttttaactaaataataaatgtcagtggcaagcattgtaaataaatcccaactccaagatttatttcacaaaatggctgcaaaaatgtatatgatgatctttagagaatatcacataattcttgccaaaacatttaatgagatttggagacaataattaataatatccgcacgaattattgattttagttattatgagtcttttctttgagacccaatgttcaattataagcccttacactataggcccataaggcccattagtgtttactacactattcagggtttagcgaagaattcttcgtttcaagtctcgaactttgttggaatcgnnnnnnnnnnnnnnnnnnnnnnnnnnnnnnnnnnnnnngagcttttggatcggaatctgttcgctgatgctttggtgaaaatgggtttcggtgcaattag

SEQ ID NO: 23488 - DNA, 3039 bp, Arabidopsis thaliana landsberg
taatttagtttctttacttgaaaacacaggctattaatgaaagtcacatagttataagattttgatttttgggatttattttcttaagaatatatattttgcaaataaaattgtaatttcattatatcggcctcaaattaatgtaaattactcatgagatgaaatcatcaattttgtaataggttcaacttgcgtccaaaaaaataaacatgaggtgcatgtcaaaattgactacagagattgaatatgagcaatatgcatgtattttatggaaacggacagacgatgttctggatcaggataaagccctaattattttggatgggaggacaaaatactactttttattttacacttatttaatcactattattataattaggatgacacacatactttgaagtttgagagcaacggaactgaaaaatccaagcaaaatttaaatcagaatatttgaagtttccttttattttctaaagtgttacggccagaatccatacttccaaaccgggcttagcccaagatgacaatgttcaaagtaatgaagttgaaaatgtgtttgtttttggatattggattttaaccttgtggctgataggagaagccattgacagtgagacctccatcaacacaaatggtctgaccagtaatatatgaagcagcaggtagacatagaaaagccacaagtgaggcaacctctcttggttctccagcgcgaccaagtggagttctactcgacaaaatctcgttaaaaccagcgtcttcgagaaactgaatgtttacaagattgtaaaaaacaagaataagagtgggtgatgatgttaattttaaaaggaaaaaaaatgaaaaaaaagagagggtgtattggttacaggtttagccagagcagtggtgataaaattaggcgcaaccgcgttggctcgaatgccgtcttttgcccattcacacgccaaattccttgctagctgattcaaagctcctgtacatatacacaaacaagaaaaaattacactctgatcactatgagatacatctattaggaatcccaaagaaagatagaccaatttagaaatagaaacgaatgataatagggcaatcaattagccgttagaatcagctttcggagacgtaatacgatatttatgaaccatctaaataaacataaaaagatttattatccataaataacatgcatagttataaattagtcttgtttttgtatgttattgaatatgaatgccctatatttgaccttctgaattatatatttctgaaaccaaaaatgttagcatagcacactaaaataagatttcacgcaaaaaaaagaaaacaattcttctcaaatatcatttgaaattattaaatgggattgaaaattatcctaatcaaatatataatatacataatgaaacatatataaatccacaatactatttggtcattcttgcaatgaacttcctctagtattaaacttttcactatggttacctttcgttagaccataaatggatgcagcatcaaatgatacgatccctgcagcagaggaaataaaagtaataattccgttgcctgaagcctttaggagtggatgtgaaagttggcttagatgataagcagattccaagtttgttgaaataaggaacgaaaaatcttctgcctcatattctattgttggctttgtgcgaattgtgccaacattgttcacctatattgaacagaaaagagtatatattcatgtcatttctaaatagcttaaagatatgcttagtttctttaaattaagattaacttacaagaatgttaagcttgccatcgaatattatggtgacagtttgcataagtgtttctctttcgagacgattggatgcatcgcagactgaaacactcacttgaaaccctttcttctcccattcggataaactttgattgagcagagttttcgatatatcgcatacatagattctagctccaagaccggctagctcctctactatagcatgcctaaaccattccacataaaaacacatatataacgacgtcttaaataatccagaacaatatgggtcaaaaattatagctagagagtagaaagaccaacccgattccgctggctccaccagttacaagagcggtcataccctgaagactccatcttttagccattttctctttgcctgtgagttgcaatgactagagataccacataacatatatatatatatatataaaggcaaattagataaaatattactaactaatgacctttccaagcaatggtgggtctagaaaatttattcaatgggggcaaaaactataatcaattttttcagttttaaaatatattaaaatgtccataaaactgtcatttgtcaaaaaaaaaacagatatttttacaattaaaatatataaattttctgttaaactttctaaataaaaaaagcaaagattaaaataagcagttacaaaggaacaaacaaaaaaataataatttaccaatgagttctcgtctatcaaaaaccaaggaggagaataaaagaacaacggataatttggaatcaaaatttttagggttttaaattagtaaaattaagtagttttagtttacaaattatgcctttatttataaaatattagtaatgttgggtcttttaaaaaaaattaaacaaaagatagtggggtcatggaaggagttaacttttttggaggcatttttttagttttttcgtggtggcaaatagttataattatctttaataaatttattttaacaaggtagagcatcaacattggacattttattgggtgtctttctttataataaaaatatttaaaaaactaaaataaaattattaaaatacgacagtgtctttaaaaagtttcgagagtggatgcaataataaaagaaaatgtgacttacgtaaatgaaaaacaattatattaaaaattacgtaaatgacaattgaagaaagataaattaagtaaatttcacaaacctaaaatgaatattcaaatattccgattttaatctttatttaaatt

SEQ ID NO: 23489 - DNA, 604 bp, Arabidopsis thaliana landsberg
taaaaatatgggaccaattttactagactcctaaattcccctagtatttaataaaaatagttccaagatttttagtcccaaccatgaattatttagcaattacgaatgcctaaacctagttttagaagtaagttggtagctccaaaaatcatacaactttttggggtaagcttaatatgataattaaagccgttgggtaaagtttggcatgttttggacattgtttgatcccaaacccaaaaccctagcttcctaaggtagaatttgcctaaccctaatagggtactaactcaggaaaccctagtgactcagtgctaccgtgaagaaaagttatattcaagacacaaattaatgtgtttctattacatattcataacatcacatgagcattatgtattgttatatatagaaaacgaagaagaagtgactatcgaagaagaaactgccccacaagctgaaattccacctgtcgagaacagtttctactttcatatttgtggaacggatcccaagtctcctacaacacaaggcaagcctctgtgcatttacccttccttgttatttaaaactttacacttgaatgatgcataggtgatggagtgtg

SEQ ID NO: 23490 - DNA, 590 bp, Arabidopsis thaliana landsberg
  unsure (1)..(590): unsure at all n locations
ttctctaatgaaatggtaccttcgatgtatatgcttgatcctcccgtgaaatactggattcttagtgagtgcaatggcagacttattgtcaactaatatcaccactctctcacattcagttcctgtgacttcggcaaagagatcttgtaacaaaatagcctgtttagcagcttcggtggcagccatgaactctgcttcgcaagaagaaagtgannnnnnnnnnnnnnnnnnnnnnnnnnnnnnnnnaggacattcgttgagataaaacacatgaccgcttgtgcttttaccatcatccacatcaacattatggctgctgtcactgtatcctactaaacccgattgaccaccatgcttaaagtagagtccaagagagggtgttccttgaagatacctcaggacttgcttcaaggcggctctgtgagattctcttggatcttgcatatacctgcttaaaacaccaactgaatacgagagatctggccttgtgtgtagtacgtaccttaggcaaccaatacttcttcgatattgttgccatcaatgctcttctcatcaagtgccttggagagtctaagctagctacattggta

SEQ ID NO: 23491 - DNA, 1144 bp, Arabidopsis thaliana landsberg
ttcgatcccgctttggtggacgctttcataaagggggggggaaaccctccggggtatcatatgccatcaacctgggaccgactgacagccgtctcgacctatgggcctctaggttccaaggaagatgacgagcctgactctggttgggatttctctgggctcgataaccctagtgccatgcgggacttcatgaccgcatgtgactactgcctctctgattgctccgatagtagccacagcctcggcgacgaggactgtggccaaagtcgcgaatgtttccacgtcgatctagggggtcacgacgaaggcaaccacctcagtatgccggaggatgacgatccccctaggcctgcgcctcgcgttgacatcatgcgggactagatgtggtcccagtccctgcggggggtcaggacacacagctcgagcaaatctgcgagatgcaggccaagctcgacgaggaagcagggcaacttgtgtagctccggcaaaacatcgagcaggagtgggcaggccgagcactcgccggagaagcgtgtcatcaggcccgggacgtcccgcgccgtatcgttgatgatgccagggcaaggctgcccccggcctccagcggggtcagccagaatctggctgcagcggcaatactacaacgagcgatgccgaagccatctaccaccgaggggcggcgtatccagggagaactcaagattcttcctggaggatgccgcggtccgacgggccaaaagctctgcctcccgaaggcaaaggtgccccccggagcatcgcgcaatgacttcccgactcatgcgggaggcctcggtccacaccgggcgcacgcaggacgtgacgcctgcagccccggatcgcctcggccacgagcaccaccgccgcgaccgtcgagcccaccttgacgagaaggtgcgccgaggctaccaccccaggcgtgggggacgctgtgacagtgaggaggatcggagcccctcgcccgaaccaccaggtctgcaagccttcagccggacgccgttcccagctcggttctgggccccgactaccatcaccaagtacttggggaaaataaggccggagttgtggcttgcagactaccggttggcctgccagctgggaggaacggacgacgacaacctcatca

SEQ ID NO: 23492 - DNA, 607 bp, Arabidopsis thaliana landsberg
  unsure (1)..(607): unsure at all n locations
cctccagttgcgaaagctgcctgcgaaagcaagtacatatccatctgcacaacagagttaatacatttagagttgaagaatgaattcaaaccaaatcaaattacctctcgaattgaaacaacattcgtaggagtgagtactaaaaggttcagtcttttgagattttaaactttgatatcataaaattgagtaataaaagcactaaacattcataagtagattacagagtttgagtagctactacggttagataaagcggaatctctaagtagcaaaagcttcagtcttttgagattttacgctcgaaattcattgaattcaccaattgtgtaataactacttattgataccaatttacagagaagagaagttactgttttattgtggaactaggaagaaggaacatacctgattaactgttttgntaagtgcccagttaaaaccaggctgatcatttgctttcttagctctggaccaaggtttgcgtttcaagctcctcgatccatttcttcatgagaaagtttgcgccactagtaggacgcaagaaaatcatacagctacaaatataagtccttccttttttacccggaggtggtaaatcatgaga

SEQ ID NO: 23493 - DNA, 5933 bp, Arabidopsis thaliana landsberg
  unsure (1)..(5933): unsure at all n locations
tcatgttctctttttaatgtctctttctttaactcccttttactgaagatcctgttttaacaaaaaagcaggattcaattcagatcccaaactatactcagatatataaatacacagttcactgtaggaattaagaaagtaagttaccatttggtattgtctctctataagcaacagctacattttgaaagaactctnnnnnnnnnnnnnnnnnnnnnntcaactagcatattggcacactacgaaagcctgagcaatggagaacaaaatcagaatactattttcacaatcaagactcaccatgctccattgtcatagatggatcttgctcatcaacaaacccgatgagttctgctggatttccagccaccatgcttcagaaacgcccgagagaaaatgtcaatttgagcaatgttcaaacaaaaaagctcaacgagattgatatttagatgcatgtcagtggttttatacctatgcgaaggaacgtcttttaacacaagtgaacctgcagctaccattgctccagcacctatgcttatgttaccaagtatagtcacacaagctccaagcaatgcaccttcacctatctttgggtgacgatcgccagtttcctttccggttcctcctaaagtcacaccctgtgacagtgaaaactcaagtagccttgaaaaactgaaaagaaaatcatgatctcggtattgaatttacaggcaatggtttggagaagagacgcttacatgtaagatcgagacaccgttgcctatcacagcggtctcaccaatgaccactccagttccatgatccaacaatattccctccccaattcttgccgctatgcagaaagagaattcaagtaatatgtataaccagcaatcaattcaccggtaaacctgatcaactattacaacagagaagggaaactgagaatgttcaaacagatgagagcagagatatgaagctcaaaactctacctggatgtatgtcaatgccaaaaacctgagagaaaccacagcatagatcagacattgagctcaaaaatgcagctccagcaagactcaaccaaaagacaatgatcaccaactacctcgcttattcggctttgcaatgcaagagctaatagtttcctcccttcattccacagtttatgcgcaaccctatatgcttgtaacgcatgataaccctgaaatgcaagtgggaaaactcttcataagtcactcattccatgtgagaaatgttctgtctctcaacttcgagtaaagattaccttcagatgtaaaatagcagaactatacgacagacaagcatgtatcacgatctttaaatgcctgcaaatcattgagatacataagaaaacaacaaagatcatgtctttttacagtattagatggaatgttttacctggagatcatggcgaatcgaactctgaatacctttgtcatgcatcataacaccataaaatatatccaagagttgtgttgccaacaaggttgggttttggagacggttggctagaacaaaccctaaagcttgctctaaacaatcatgtgctaagataccagcatacaagaagctactcaaaataggctctttctctgcctgaaacgcacaacaagattcaccattaaaggaacataaacacacgcaaactctgttccttaacttgtccttcgtgtagttaatgaaaaattgacgctgaaaaagtagacgggtgagagaaatacgtaacagcaagaaaaatttaaaagctttaatcaagtagttaaagagacagagaaagcatttagtgagaattcgaccccacggttttgtcggattgatataaaaggtacacaagaatgtcattatcataacctttcaatgtagaaaatcgaagttgattaacaatatcaaagtttctgtctttgttgaattgaagtcacatatatgaaaaacgtataaatcaataataagaatatgattatggagcataaggagaaaacctcaagcttagcttcttctcttatagaatcccaaattgggtcataactagaattggtaaaatccagcaaaaccgggtcggccacgggattaagggttcctctagcgtaaaccgggaaaatcctctcgaaaggaaactcgtcaccggtctctccatcgtctctggcagaaaagttccgggagacaatcattggaagagaagacaaagatgacgaggaagaaaaatcacgattctcgccgtttatacaagccatgaccaaaaagagtgaagctattggtgaagagtgtagagaagatgataaaaaaaaggttaatgataaggaaactgagaaacccttttaaacacagtgattgattgtgttggaatcgaagtagcgacagtcaaaaagataaaagaaaaaaaaaattaaaactgaagtcttgtgtttctgtcctcactgttttggaatgtttcatgcgaaatcagatgtggtctctctctctctgctcttgtttgtaatgcgtgtgaccgtgattcagtccaagttcttaataccaccaccattgcaagagaatccaaaactatttggaagtatcctttatctatattactttaaacgtaccacacacgaagtggacgtgaactttaggctacaataaaacatttctttatattatcataaaacaattttcatttttttacaaaatattattttagaaattacaaaaaaatgattgaacaaaataattttttttggaataaagctgattggccaaagaaataaaataaaactgacaaaggaataaacgctgcatgtaaatcgccgaaaacgaaatcgaccttcgttgctctgaaaccctaaaagaagctaaatctagcaatggcgagaagatccgtttcgatatttaatcgccttctggcgaatcctccttctccattcacatcactgtcccgatccatcacctacatgcctagacccggagatggagctccacgaaccgtaaccctaattcccggcgacggaatcggacctttggtgaccggtgcggtggaacaggtcatggaagcgatgcacgcgccagtgcatttcgagagatacgaggttctaggaaacatgagaaaagtccctgaagaagtgatcgagtctgtgaagagaaacaaggtttgtctcaaaggtggattagcgactcctgttggtggtggtgtcagttctttgaatatgcaattgaggaaagaactcgatatcttcgcttctcttgtcaattgcatcaatgtccctggattagtgacgcgacacgaaaatgttgatatcgttgtgataagagagaacactgaaggagagtactcaggtctcgagcatgaggttgttcctggtgttgtcgagagccttaaggtaaaccatatataattatagggattgtttttagtccaaattgtgatcccttttgtatacatgatgttgttgaattgtttgtgtaggtgataacaaagttttgttctgagagaatagcgagatatgcatttgagtatgcgtatctaaacaataggaagaaagtgactgctgttcataaagctaacattatgaagcttgcggatgggctcttccttgaatcttgtagagatgttgctaaacattattcggggattacttacaatgaaataatcgtagacaattgctgtatgcagcttgtcgccaagcctgagcaatttgatgtcatggtaatgctcttcttttcctagttacaaatcaaaatgagtcattttgaaatgtgacagacgatgaaaccatcattgatgttgttttgatgtctctcatggatattttttgttggtttgtttcaggtgacacctaatttgtatggtaaccttatagcaaacacggcggctggaatagccggtggcactggagtgatgccaggaggtttgtcaaataaatataatagttacagttataatctttcgtaaaatgacgtttcttgggtttgttggggacagggaatgttggtgcaaaacatgcgatattcgagcaaggcgcatcagcagggaatgtggggaatgataagatggtggaacagaagaaagcgaatccggtggctctacttctctcgtcggctatgatgctaagacatctccggtttcctacttttgctgatcggcttgaaacagcagtgaaacaagtgattaaagaaggaaaatatagaacaaaagatcttggaggagattgtaccacgcaggaagttgttgatgctgtcatagcagctcttgagtgaaaccatgtgagcttctctgcttctgcttgcttcttctttcgtctttttcatttcaactaagagaaaagtgttggttttctctgttttgcgttgctattttttgtttcttgattcatttttgttctctttttgattaatatccgatctcacgtttgagcatgagctctatgttatagaataaaatcaataaggacagacagaagcaatgttgtttatcaagcaagattttgaactctttttgcatcaaaattaggtaaaaacactaatcaaattacttgttaaaaaaggcataataaatgacttgaagaaaatgtgatacaaatttagatttgttgaactcattgaccaggaggatattatataaggtctctgattactaaacaagcatgtagagaaccaaagataacagtagcaccaaataagaaaacagagcagtcatggataagaagcattttgctataattagggttttacagggtatgacgcgcaaagaccaaagattttgaacgtcagaatgtttaagaagaaatgcgtaaagagaaatatcttgtctccgtgtttcatacgagtacattccgtaggaacatttcataacaaaacttctctgtttctgctttattgaaatcttccaactataaaatacaccctgagtccatcatcttttgatcaattagaacgatctcagaatagaagtcattgacaaagaagaacaacaataaaaggaagaaaacaatttgtttttgagaaattttgctctgatttgttgatcctgaagattgaaatggcatcgaatagtgacgcaaggcctttgccaaaattcggagaatgggatgtgaatgatccggcgacggcagagggattcaccgttatatttagtaaagccggcgaggataaaaaaacaggtcggagctctagcaaggcaccttcacagagaaaacaagacggcgttaaaccaaccaagaaatggctctgttttactttatcttgatttcctgtaaatttcttaaaacgtttgagaatagcattgagaaactcttaccttagaaccttttctcatttgcttagcatttctctttataagatgttgcagagacgagaaagtagatagtttcttgtatatcttgtttgatgtttaatgtttaatgttatgtttcgtttgaagcttaagactagattttgaaaacctactagttcagattttacaacaatgcacgttttgcaatgccacctccaaaaacaatcataatctttcttcttggtcttagttaatttaaaaacgaatagttacttgtttgacaagaaacccctcttctgctccaaagtggatgaatcaggattcagccaaatattatatgagatctgccggtttctgtgttcccagggcaaataaatgctgatgaaccggaatggattttacattccgcttaagaaaggaaaagagataaagcaatgagctgtctaacaatgcaaatttgataaggacattttgagttttacagtatcgaaaaaattgtcctgcttcaaaaaggcatgattctaataggtaatgtcatattaacagaaaagccataaagaacagtatacattgtcaatatattgaattaatggactaatacataattgctgagcaatgttaggctagctagcattagtgtctttacctttcttgtcatctacactcttcttacaagaaagaaattggagta

SEQ ID NO: 23494 - DNA, 683 bp, Arabidopsis thaliana landsberg
cacacactgagcaacagttaaaattccaatgaaactgaaggtttaactgaaggtagagttagagaacgatataccagagcaagaagcttcattactagagttggtctgtggagtttgaggcgctggagatgatgactgaggaaccagatgagagctgaagtaagcaatgaaatgttgtagctgttctttagacaaattcccaatcaaactttcaaaaccaggagactgtttctcactagaaccaacaggagcagaaacttgagctgtaacaatgggagttgaggattgagaaggtggagaagtagccaactgtttgcgaggtttccatccagggggatatccatgaagtttgtagcaacgatcaatcacatgaccagtaaaaccacagttagaacagatgggtttatcctttctctgggattggtaagcagcattgacagaaccagccgtattggaagcaacagtagcattcaccactccaggatgatgcccaacgttcccaacctgaaaagcagctagaaccacactgaccccaaattttctttgactatcatcttgatcaagatgttatagactcagaaatatcaggagaggcttcttcatgatgatttgactcgaataatagagtaagctcatcaagcctgcaagacttgatgagcgactctgttacatgttctgataat

SEQ ID NO: 23495 - DNA, 621 bp, Arabidopsis thaliana landsberg
catttttaggtttgaagggtatgaaactgtgggtactgatttgtttagtagttggcacatttgtagttttggttttctgtatattatctctatggattgcattccgccggaaatcccggagatcatctcacaagctgttacccttcagtcaaataccacgcgtggcgaaagatatcagggttgatgatagagttgggtttcaaaatcataatgaaaatttatctatcacaaatgctgataaatctagtgacagaaactctgggaagatgatgtcttacttgggaagaacgaagtctagtgataatgatagtataagtcaatgtagctctgtgcatcatcatgagagagcttgtagttctcactctggtgaagatggaagctttggagctgcttggagacaaaattccctatcacagggcgggctagtaacagcatctcctttggttggtttgccagaaatatctcatcttggttggggacactggtttactcttagggatcttcagctagccaccaaccgttttgctgctgaaaatgtaatcggtgagggtgcgtatagagtagtttataaggggtagactcatcaacggtaatgatgttgctgtaaagaagcttcttaac

SEQ ID NO: 23496 - DNA, 576 bp, Arabidopsis thaliana landsberg
aaacgcccatgactgcccaacaagagtgatgtgacccatctttctctgctttctcatttctaacaataagaagtttatcatacaggctttgtgagtaaccaaaatagttcacaaaaacttgcaacataccacaagaaagctataagagaacaaaaatctaacctggcttgtcataccaatgaacagatgcacctggaatacacagagcccttgcaataagccgatgagccaatttgaaacctgcttctccctgatttaaaaataaataaaaccagaagtccactacatgttcattaaacggataaaaagatgatgcaataggtattaaattcaaatgataaagtaaagacaaacatcaattacatcatcttctcccagaatattgtacataatggacgccggagttctcattgacggatcaccaagtggaagaccaaccacagctcgcaagtgttgttcaaactgtgaagtataacagcactcgatcgtttgatggccactgttgtgtggtctaggtgcaacttcgtttagcagaatctgggaggaactaactctgatagttaaaataaaaataaa

SEQ ID NO: 23497 - DNA, 783 bp, Arabidopsis thaliana landsberg
tggtagagagaaagatcctggatcttccaacttttcttgaacaatcttcttttgggtgatttcactgcactcttgaattgacgccaccgttccttgaacttctttgatcctctctgtgatcatgtccttcacatacttgtttgagtccggtattagcgcaagacagtctacaagaggcattgtgatttcaaggtccttcaattgtttttccaagagagcttcatacttctttatcagttgctttttgaatctccctggaaatggtagtggaggcttgtagggtggaggaacaaagactttatccttggttttagtagcggcatgctttttaagagaaggaggtactacctgagcttgggatcgattactgcaatcgagtatgggctcctctattgctatttcagctataacttcattctgaacgaaaacctccccttcttgaacttcactgtccctagtgatagaggtagaggcatgtcgagttggcagctctcgatcatggtagatagtgatggcgtgagcggtggcatactccttaggtttttgaattgctttccctggaagctggcctgggttgttggtaacagatggtgaagtggagatgtctttcagatatcgtatcctggtgctcaaggattcgtacttgctgttaagtttgacgaagtgtcggtcaactttgttgtgtaattcaccaaacttcttaacgatttccattgctcctgtggcttggccttgaattatctgctgcagcatggtcttcatgtctgaatcctgagtgcagct

SEQ ID NO: 23498 - DNA, 1116 bp, Arabidopsis thaliana landsberg
tgcaggtcgactctagaggatcccccacccagtgctctgcaaagagctgtgttggtcgagtgtttcactatttctgtttgattttctgttttctgcatgttcacttaggactgctagaacacaccaaaacctgttattgcttggcttgacttagtgacttctgatcacaacttgattgttagaatcacacccatttggattgacaaccctcagtactacaacgacatgatagtgctttaggtttaattgattaaaaaacctattatcaacgggtttgagttgacttaaccgtacagacagacaattttcttcttggtcgaggcttgatcttcttggtagatattgacttcatcttcacggctcttccctttgcttatttagctttccttagagccacaattcttaccttcttcagtctttgatgaggagatatttggccttgtctttatgacttcggccttgagtcctttctacttcccttctttattggaggtgtcacgccctcatcgacctctctctccttttcttcatacacactaataacatattgtctcggtacaacgttcttgccaccaaattaaactgcgtctacaccgttagagtgtgccttgaatcccacgtgtattttcgctacaaagatagaaaatagtaagaatttggtttatggtttattgactgtgctttaaatcaaagattgatgcttaacatgaggggaaaaaaccatcgtgccttgacctcaacgggagtcaagcggtacgtcggccacgcatggtgaaagttgcattgaagtatctctgcaatcgcgatcgagagttggtgattgaatctgaaccacgtaacagtggttttgtcaactcatgtatttaaaccagggtttagaactggaagattcacctgatcaggagcagtgagtatcgcttcaacatctctgagaaactgtcaatgaaaggaacaacggccatgtcgttaggaagagagcatgagacgtgtaatgatgtgatgaagaaacagatatatagagaaaaaagacagggaaaggaatacgaaaggttgcgtctctgactgtttagcgggaaaatggtcctaggttacgactgaacttggcgagaaactgta

SEQ ID NO: 23499 - DNA, 829 bp, Arabidopsis thaliana landsberg
agtgtatgttgatgagtttgttgaaagcatgaccaaggagtttgagatgagtatgtgcggagagctgacttacttcttggggttacaaatcaaacagatagagcatggtatcttcatatctcaaagcacatatgccaaaaatctggttgaaagatttggtttgaaagggagcaaaacagctagaactccaatgggtgtgaccgataagctatcaagagatgaagcaggggaagatgttgatgagcgcacttacagagggatgattgggagtctactctatctaactgcaagcagacctgacatttgtttagcagtaggaggtgtgtgcaaggtatcaagcaaaaccaaagacatcacatatgctggcagtaaagagaataataaattatatgaatgggactgtgaacctgggcttgtactacaccaaggatactaccagaagtttgacgggctactgtgatggtgactgagccggatcgctggaagatagatggagtaccagtggaggatgcttctttatgggaaacaacatggtctcatggcacagcaagaaacagaagagtgtttcattatctactgttgaagataagcatagcaaaaaatcatgttcaacactctcgcacgaaacatattgatattaggcatcattttattcgtgaacttgttgaggcaaaacaaatagtgattggtcatgtgggtagtgagcattaactagctgatttatttaccacaccattggatttcaaccgattattagtctgcgatcttgctttgggtatgtgaactatgaattggttgtgaagtgtgcttttctaaacaaggattttaa

SEQ ID NO: 23500 - DNA, 585 bp, Arabidopsis thaliana landsberg
aggattcattgccataacatttttcaacaaaagagacctgaataatgtgttgcagttatcaagaatcaggttctcaactaacactttcaattaaagtctaaacaaaaccaaacattctatgtatatacatataaatttacacacacaaagagatatatgtattcaattaaagatttaggagggtttggtggaatttagaaaaacaattgatttggagagatttgggtgaatttttaggatatatggtggagttgttggcgcagcctaaccgtaacaagtcctaagttcgttgattcacataatgaccgaacaaagaacaaaatttgtagctcgttgattcacagaatagctgagaaacaaaagaggtagatgttttaaaatgcttctgaataattcaataaaatagctggccgtctactcacgtaggagagaggtttaaatcgttgattgcaaaagatcaaaccctaaaacattatgggaaaaaaatcaaaaacttaaagcccacgtaatatcttaaaccgaccaaataaagaatgcccataaaacagagtctgaatgttggttaaaacagggtaattgaaagat

SEQ ID NO: 23501 - DNA, 680 bp, Arabidopsis thaliana landsberg
gtcttcatctccttataatgaatattggaaagaactaaggaagctctgcagtcaagaactctttagtgctaataaaattcaatcgattcaacctattaaggacgaggaggtcaagaaagttatcgattcaatcgcggaatcatcttctttgaggaatccggttaacttgagcaagaagtttcttgctttaactacaagtgtagtttgcaaggcagcatttggtgtgagttttgagggatctgtgctcaacagtgatagattcaataagttagtccgagatactttcaagatgttgggaagcttctctgcctcagattttattccatatgtcggatggatcatcgatcagttcaatggtttacaagggtggagaaagaaaagctttcgagatcttgatgcgttctatgaacaaatttttgatttgcataaggaagagaaggaagtaggaagtgaagatttagtggatgtgctcttgaggttggagaaagaagaaattgttgttggaaatggcaagctcacaagaaatcatatcaaagcaattttgatggaaaaactataaacttagggtaaacccatttttaattctatatttcataaaatatgagattgtacatcttctatatcttcttgaaacagaacatcttttagagaatcgatacttcgcataacatgacatggca

SEQ ID NO: 23502 - DNA, 817 bp, Arabidopsis thaliana landsberg
  unsure (1)..(817): unsure at all n locations
cacctctgtctgacggttgatgcgtcatgtccaagaggctttaaagacttgttattaaaactacaaatcaccacatgatctctctccatactttgggttcactcgcatggttccgacaattgttttccggaagttcacccatcttgaactactcaagcccaaacacatttaattctgaagttctatcaggatgtttaactgaaaagatatgtgcactttgatgacataggtggtcaaatcaattcttttaaacctttccgcatgcaccattatatttttgaaattgnnnnnnnnnnnnnnnnnnnnagaaatggtatttgtcaattcctaaataaacaatctcgaatttacaaaattaacaatcaattttgaaaacccaataaaaacctcaagctgccatctgtaaacccttaaacccttctcctccaaggtttcatctgttgacaaaattcttctacaaaaaatcgattctcatcgaaaactttaacaaattagaatccaccaagattcatgttatgacaaaagcatacaaatttacacacaaacatatgtttcctaatagccccatttgatcccgaatgatccagagattatctcatccttctttgctctcactcgaaaccctcttcaagctctgcaaatccgagagtcatcttaatgaaatccatgcccgaatcatccgcaaaggtcttgaacaagaccagaatctcatcttaatcgttatgtgttcgtctacttcggctgtctcttactcttgctctggatttgaacgtgttgcttctgctggaacttatctctggaatcatttgattaaagg

SEQ ID NO: 23503 - DNA, 329 bp, Arabidopsis thaliana landsberg
gaggccaaggtaagatgcttggactgcagtagaggaaggatgggaacctccgttcgatctttcagaagatgggttcaaaatcactaaagcaaaggcgaattggactgcagaagagaagcttcaatcaaagtttaatgcaagggctatgaatgctatcttcaatggtgttgatgaagatgagtttaaagcttattcaagggtgcaagtcagcgaaacaagcgtgggacacgttacaaaaatcccatgagggaacttcgagtgtaaagagaacaagactgcatcacattgctactcagtttgagtatctcaagatggaaccagatgaaaaa

SEQ ID NO: 23504 - DNA, 612 bp, Arabidopsis thaliana landsberg
gttccgatgactaaacaacaaaggcagctcgaataattacttgttatatcaaattccaatcatatcatagattaaacgagggataaagacattgttacaaaaaaataagacaatttgttttaacagtttatattaaaaaagaaaactgtctaaattaacaaaaacatttttttgttttaaattacaactagacagttcaaacgtgcagctgaggctgatagaaaggtaggaaattcgttttaacttttgaccactaagcctactaattaaatgacataacattagtgcactatgtggaatttgaatcatctataagtatttttcgtttatgtatatttaatgtttacgtcaagaataaacatatgtgaaaactcttatggatcattagtgtaaagttattatgtttggaccatatataagagagttattattttcttttatgaattttaaagttaatactaagcgttaaattggacaactttttttttcgaatttttctttttataattttgaatttttactctggcaaggtaaagaatttgatgagttcttactctggtaaagtaaagaaattgatattggtaaagatgtttttggaatctttcatacata

SEQ ID NO: 23505 - DNA, 214 bp, Arabidopsis thaliana landsberg
tgcggatactgggagtagacgtggtaagacggatcttccattttaagcaaaatgctttgattttcaccgaggtgaggttagtcccattgtcggtgacgattttatacaatatactgtgccggcatacgatattttccatcaaaaaaaccttgacatgtttctcggttacttgttggtaggctttggcctcaatccatttggtagagtagtcagt

SEQ ID NO: 23506 - DNA, 573 bp, Arabidopsis thaliana landsberg
caagatgcatcaggttatcggataaagcgagggagatttcacaacactgaaaatctgataaccggtgcagggccaattccccaggtcgcggatcgtccgagtaaagactccggactatccagggtttccaggaaagttctcctaattgattcagctgataatgaagccgatgcaagtgattggaggatgcccataattaattatttacgaaatcctaatatcaggacagataagaacattcggcgtacaactttcaagtatgttttgatgagtgatgaactctaccgccgaatagttaacgacgtcctgcttaagtgcttgggcccagatgatgctatactagccatggccgaagtacatgaaggaatttgtggtaccatcaatcggctccaaagatgaagtggttgttgcgaaggtctggtttgtattggactaacatgatagctgtttgtttcaagtactacaaaggataccaggtgtgtcaaaaattcggcgacctacagttggtccctgcagccgaattatattatatcatcaagccttgcgctttcagaggatggggtttagacttta

SEQ ID NO: 23507 - DNA, 1392 bp, Arabidopsis thaliana landsberg
gcatacgttgaagaaacacaatactatgaagcacagtattatttcaaagaagtatatttttatgaaattcaaagtttatgattttggaatataaaatatgacttattattgagatatttcatggtagatatttaatatttccaggctatataacttacgttggcccttagcaagtcggttgaataaacgacataatctttttagtgtccgtttataaccgacgtcctcttttattttgtagggcaagtaatgtttagaggcaaaagaatacttttgaagatgataagataagcgtttatttaaatgaacaaagatataaaaggagtggctttgattcagttaccggattggcgcttttgcctcttcgtttttgttttttgttttttgttttctttcataatagatctacgtttttgttgccattgtgccaaacagagagatccatccatctattttcacaatgaagggcaaaaatatcatgattttttctacatgttttctattttatttatttgctttctttttaaaataaagaaatcctaaattagaatcaaaattaatctctagaacccagaaaatcatagtttttttaaaaaaaattaaaaatatcgcaggttaaccaatgcaatacaaaaaactgatttttcttaaaatatttgagaagaatcggttattttgatcttgacctacataaatttgttacaatttaagcgagaatcactagtccacctcaacttggtttctcatatgtcacatttttgttattaattcacaaaaaaaaatcgattagtgaagagaccacctgagaggaagtggaatggaaacaaaatattgatggttggaagttggaacgatgctgacaaaaacaaaaatggcctatacagggatcgaacctgtgaccttcgcgttattagcacgacgctctaaccaactgagctaataggcctttgaagaaatcaatgatacaactaatatttatttggaaccaaagcttaatgggccttcaaatacaatttgggattttgatgtattcaaagcctacttactccaaaagaaagctcacggaccttggatatgaagttatgaacaataacataattggcgaaaaaagaaagaataatactaagttctaacatattttggtaaaagaacattgaaacatctgaaaaattaacttcttcttattttgtttcctaataagaccgtttgcttcatttcaagttatgtagatatgtttatgtatacagataaagagagatctgaaaatgatatatagagcttttgtggtgataagtgcaacaagcaggatatatatcgaacgtggtggttagaagatagcgtcaaaatagatgctagctgctgcgtatacatcatattcatatcatatgtact

SEQ ID NO: 23508 - DNA, 663 bp, Arabidopsis thaliana landsberg
  unsure (1)..(663): unsure at all n locations
ggtcgagtctataggcttcctgtagtacataaacattatgctttctctcccctactttacnnnnnnnnnnnnnnnnnnntggtcatcatcatcgtcctactcccacaatccggtgattattctctgcacaaatcacttttctcctttcctcagctcacggtgagtctctggaacggattgtactaatctcattattttcccggtttnnnnnnnnnnnnnnnnnnnnnnnnnnnacactctgagaagaaacatgagtcacccgagaaatgcagatgatatattttctgagttctttggggtctctagaccttctggtccttctggtcccagaaatgcggatgatatatattctgagttctttggggtctctagcccttctggtccaagaaataaggatgatatattttctgagttctttggggtctctaacccttctggtccgagagataaggatgatatatctgctgagtactttggggtccctagcccttctggcagtggcagcagtggaggcagagaaggaggaggtggtggtggtgcacaatgcatcacggtggagctaggaaggcagctcctgttgaaaaaaagtgccttgtagccttgaagatcttacaaaggaccaccannngagatgagatcctagagagatgctggtgctttggg

SEQ ID NO: 23509 - DNA, 339 bp, Arabidopsis thaliana landsberg
aataccgtaaaggatattgcatcacacagtctcgaacactacaagggagaattttgaggttacgatacatcacaaggagatttttgatttccttgagtaacttaccgcgcttgtcatcagcagctaaaggccattctttggaccatccattcttatatgaaaacgctttcacatctgcgagccgatttttgatcatttcaacggcagctcctgtatccactggttcccaacctccaacagatatcttacgagcccagacttttcctattctttttataaccattttcttagaaggattaaaacctgcagcatgttcttgttcaagatgttttttacatt

SEQ ID NO: 23510 - DNA, 552 bp, Arabidopsis thaliana landsberg
agaggatcccccaaagctctacaaactttatgtgttgacctatgggaaaaatccttataattttgaaggtacagggcttcaaagttgaccccattcattgaaattcagacttaatagggtttaagtggtgtttttttgcaaataagtccaaaccccacattttcacttgtaaatccttgaatatgagaagcacgtaatttgtgatgttttactatctttgtttttgcaaataagtccaaaaagtgtacaaaatttacatataaccccctagggtttcagtccagggttttccaggggtctatttagggtttttggcacttctagggtttggatgcaacttaagtccattaatggtgacattttatgattattactaataagttttaaagttttctcttgtttaggctttgtttactcttttaggcccagtttagggttaagtaccctactccagggttttacccatgacatgtcacatcagtcaacttgtttgaacttttgctagtgaatgactctaaatgtacaatccatgatagctaatgtcatgatgta

SEQ ID NO: 23511 - DNA, 611 bp, Arabidopsis thaliana landsberg
attcctcctcctcctcctccgccgcctacaccactagctccgccgcttccgccgttatcagccgtcgtagctcctccgtgattgttttgagatagtggttgcggctgaactccatctttcccaagtgggttatcgccggaaaacaaggattgacaacaacccatcaaactctttttccttacccaagtcggaaagtgtttctctttcgctccttgtaagagagagaaagagttgatagtggtcgaaacaaatataaaaatccaatttttatttcttcttttttcttttcaattcttctgttttgactcctgaggtaagtttctgtgacattgtctccttcttgtcaatatggtaccactaatattagattattaaaattcaaagattaacactttgattataattatgaagtcgaattatgttttattttaaagcaatggatttgaaaactgaagagccataacaaatcagaagaagccaacttcttttgtatactacgatactataatacaataaattgattccgatgttcaatgatttaaaacattgtggtacaaaagagattttgggaaacacattattcccactcaaattgtttgtgaatggagtgc

SEQ ID NO: 23512 - DNA, 449 bp, Arabidopsis thaliana landsberg
aagtataacacagtatttctctacagtgacattaaaatgtgacttgataaaaaaaaatacatgttaggaaaattcaagatttttttttcagttcttaagaatttcataatttgtatttgcagggaatcatatcgatcgagccatgtggaaacgcctactggctcatttcatcgtctcaaataccactaactctcttcttcactctctggatctgcttcagtgacaatgttcaaagccaacaacaatcagattaccatgtctcagtaaaggttcgatttcacacaaatctaacaaacacttgattagtttcaaaaaaagaactagaattgacgaatgtcctaaaaataatttgtgcttgcaggatgtagaagatttgagatcaaatgatggagcaagatcaaacaagtgtatgttccctgtaatggctctattagctggagttttgggtg

SEQ ID NO: 23513 - DNA, 798 bp, Arabidopsis thaliana landsberg
cacttagtcgctcaacggttgagatctttcttgagttggtttgaatttacttgaccgttgaccatctcatggtcaatggaataagcctaaaacacttaaacaaaaacatcaaaaataacaagggaaatagaaagttatatacatggattgacatgggacttcctcccaagttagcttgttttaagtcactaagcttgactcatacagagcttaatcaggaaaaaggttgaagagaggaacagagaagtcctcatcttcagtggttgaattttcagtgcctgaatcatactctgcatcctctcttgacatatggtaggatgagtattcatttgatttttcttcaacataaacttctttctgatcagcagagtagtcttcttcttctgaaccaggctactttgaccaatcctcaatttcaatactggggtagcctttaaccatttcttgaagttctagaatggtgctatttaactcttctatcttatgagttaactttccaattgtatcctcttgagctttatatccaacccagagctccaggagttcatcggtaacagaatcaagaatcaagtgtttttctttagcagaggggttggtggttggttcaggtacttctggagaataagtcggaatagggatttcctcctcactcaacaacttgctctctaggcttctttcctctaagttaactcctttctgatcttctggtgcaaaccactctgttctgaaatcttcgttctccttgatagatagtgcagtttccatcttctctacgtcaataccatttgaaaatttatt

SEQ ID NO: 23514 - DNA, 476 bp, Arabidopsis thaliana landsberg
gatgaccgagttgattgatgtcgatttgcagattgctgatcatattgttcctgcttaagcatagacgttgtaatgtggataggccattaataccacgtcttaattcgggtagatcttccactctagagctattgaaccgcaataactttggcatttctttaagtgctgtcccgtcaagcaataatatctgcaagcatttcatggtttcaatcggaactgaaaaagtcttgagctttgaacaaccagatagcaccagttcttgcagagctttcagcttccctaggaattctggaactgcacctaacattttgcagtctttcaagttcaatacaatcagtttctggagcttcaccatgtcggtaggaagtttgttaattgcagttccatctaagtgtagagtttctaggttatctgaaatcacctggaatttttgaatgcttgagcaattggtgaggatgagagttttcaaagagatc

SEQ ID NO: 23515 - DNA, 612 bp, Arabidopsis thaliana landsberg
  unsure (1)..(612): unsure at all n locations
cgtcgacactctagatgacctgagttactgcgcgcctggtgtaacagttccaccgcttcgccttcctacctgcagcactatataaacaaacaggtgggtgtgaagttaccacagcattcattgctatttgcactgtttcgctgccaaaatttttcaccatagccgaagcttaagtctcagaatcgaacgaaggtgcttctcaacgtccgcttcgtcagaaagaagagcttcagagaaaagaaaaaaggaaaaagtttttgacttcccaaacttagaatcaaatggcgagaatacgatctactgccaaagttgtacgtgagggagacgaagccgaaggttcagacactgtgcccatctccgaagcaatgcagcgttccggtctactgactacagaagaaatgcctgctgctgaagcaggcccaacaactgccgaagacaaagaatacattgaagggactgactccgaagatgactatcaccttgctatgccnnnnnnnnnnnnnnnnnnnnnnnnnnnnnnnnnnntgtttcaaaagctgacctttcgaagatggtgaaagcaggttatttcaatgaggacctagagaagctactccgcttcggggaagaaga

SEQ ID NO: 23516 - DNA, 470 bp, Arabidopsis thaliana landsberg
  unsure (1)..(470): unsure at all n locations
ttntgggggttctnagggattcagagtcaagcttactagtccttaacctttgtaacgcgtttacccactccggttttgacattttccggaaataagagcccatactttttattcccgaagggtgtataccagaaaggtatgtagcttcccatgcaagctcctcgaaaccatgttttggagaggttttaccaaaagcatacatgcagaagatttgaaaagcatcatcaggtggtggtaaatccaccttgtacacatctttgattccatgtgctttcaaaagtcttcgatcttgcgtggtgatgataatccaacttccaggaccaaaccacttattttccttggccatggcttctaattgtgctgactgatcaacgtcatcaagcacaacatgcactctcttgtctcttaacctgtcttggacaactcctaagtgaggatactctacatccttctggttgaaatattgagac

SEQ ID NO: 23517 - DNA, 581 bp, Arabidopsis thaliana landsberg
  unsure (1)..(581): unsure at all n locations
aatcttatgcattaaaaagctcattcactaaaatcacccnatttatttatatacaacattaaatatctcacaggtatctttctattgatactttataattactcaaaaaaaaaatatcagtataccacaacttatcaaattcacaaaatgtagttaagattctaattttttaaatattatgattatctatactattctctaattcactacaaatacagaaaccaatttggtagatactattactaataacatttgaggaagtatacaacagttcttttaaaataagaaaccctgcacgtatgtgcgggtcaagatctagtttatgataaaattctaacaattaaatcattagtaatttttcacaaatttacaaggaaaagtatcaataaattatcaacaattaaattatcattaaatttctatgaagtttcaacaaagaaagcgttggaaatgtctcacacaatttcagaaaacatttcaacaaagttcaacagatatgttatcagtagtctcccataataaactttgagatttgttggatatcccgtggcaaatatcaatgacattccaaaaaatacatg

SEQ ID NO: 23518 - DNA, 252 bp, Arabidopsis thaliana landsberg
tactctcaattttctccttctcttctcagcaaacaaaaatggttacaacccgaaacacgaaggccagagtcacctcagtctctcaccgccaatcacagcaagatcctgagtcgccggtgaagaagttcttcaagttggtcttaccttcaacgatgaaagataagatgatggtaattaccttatactttggaaaaacttgaaataaagtgtttgcatgtgtttgttattcctgtttcaatatctgcagattca

SEQ ID NO: 23519 - DNA, 1978 bp, Arabidopsis thaliana landsberg
gtgtccaagccttgattgatcagttaggacttaaaaacgcggcgaatacggtgatcggagatgaaggacaccgtggaatctctggaggagagcgacggcgagtttcaatcgggatcgatatcatccacgatccgattctgcttttcctcgatgaaccaacttcgggtctggactctacaagtgctctaagtgttattaaggttcttaaacgaatcgctcagagtggaagtatggtgatcatgactcttcatcaacctagttaccgtcttcttcgattgcttgatcgtcttctcttcttgtcccgtggccaaactgtcttcagcggatcgcctgcgatgctaccgcgcttcttcgcagagtttggccatccaattcctgaacatgagaaccgcaccgagttcgctttggatttgatacgtgagctggaaggatcagctggtggaacaagaagtttagttgaattcaacaaagggtttagacagaggaaagcagagccaagaagtcagactggcttgtccttaaaagaagccatcagcgcaagtatctctaaaggcaagctcgtctctggagcgaccacaacaactcatagctctggctcgagccctgtttccactattccaactttcgcaaacccgttttgggtcgaactcgcggttctagccaaacggtccatgactaattctcgcagacagcctgaactattcgggatacgcctaggagctgttttagtcactggattcatcttagccactatgttttggcagctagataactcccctaaaggagtccaagaacgtcttggatgcttcgcttttgcaatgtccacaacgttctacacttgcgcagatgctctccctgttttcctccaagaacgtttcattttcatgagagaaactgcttacaacgcttaccgaagatcctcctatgtactatctcactctcttgttgccctcccttccttgatcatcctctcgcttgcttttgcagcgatcacattttggggtgtgggtttagatggaggtcttatgggtttcctcttctacttcctagtaatcttagcctctttctgggcaggaagctcattcgtcaccttcttatcaggcgttgtcccacacgttatgctcggttacaccattgttgtagccattttagcctatttcttgcttttcagtggattcttcatcaaccgagatcgaatccctggctactggatctggttccattacatttccttagtcaagtatccttatgaggctgtgctcctaaacgaattcggtgacccaacaaagtgtttcgtcagaggagttcagatattcgacaacacacctctggtcgcggtgcctcaggggatgaaagttaggcttctagcaactatgagcaaatcacttggaatgaggatcacaagctctacttgcttgaccacaggatatgacattttgcagcaacaaggcgttacggatctcaccaaatggaattgcttgtgggtcacggtcgcttggggcttcttctttcgaatcttgttctacttttctctgcttttgggtagcaagaacaagaggaggtaaaaacaaaactcagtttgatcttatggaggactggtttgaaacttgatttacctttgtttgttttctgtattgatcttttatctctttgttggatattcttatatatgtggttgatgaattggtgaataggagcccaactacttgctatttatttgaatatataaataggaagactctgataagaaaagactatgactgtgtgtagaatatttggcttggttgggtctgataagatacccaaagattaccagtacatatggccaagctttgttagtccaataactccttacacattccgtctaacacatcatatgacttatcgtgatggatttgccaactcataaatcaaggggggaacttagccatatatttcttgtgccaatttcaaaaaacaacccataccttttttttaa

SEQ ID NO: 23520 - DNA, 1014 bp, Arabidopsis thaliana landsberg
actcatctaaattgtgatttgatctctgagatttgcaggtaagattttcttcaggcagggacttcgttggtctccaaaggggttttacttaaagtggaggtgtgttctttgaaacccaacattttgttcaaagctccaacataagctttaacgctcgacacaacaatgtccattcctgctccggttccactgtaagaacccaaactcagtgagtcagagtaattactgcgattcttttctttagcttcagttgctagattagtttcaagtttcaaacaaggatgatgaagttaaagtgaatttacctaaaagttctttcaacagattcacccgttaccgcgtttgttgatgagtagttgttgtctccgcggattagaacccgtgtggttgcaatagcatcaatgccttctgttactgcattcatcgagtactcaagcagagtcgcaggttcctgtatatgcatagctaatgatcagcattaaacaagtaatcattgatatatatatatatatatatatatatatatataatcggcaatcctagcaaaagaagtaccttaacgataagatcaactgccttgtaagctgcatctacaggtccggttccaacagaacaagctacatgctctttgccatcggagtcagcaagttttacagtagatgttgagagaccgagagttccacaagttatctacactcccaatttccataatcagcataagaataagaattgactaaagaagaagttagaacaagtaaagagagaaaacaaatctcatatccactattcacctgcatgtccaggagtttccagacagcctctggctgaaacacttcatcagatactaaagctattaagtcagcatcggtaactctctgtatcaccaaggaacaaagacaatcaagagacattatgcaaacccactaattttatattttttttctaaagcaaaaactccaattttttctgcatcatcatataattggacactaaatgcttgaaaatttgggaaca

SEQ ID NO: 23521 - DNA, 647 bp, Arabidopsis thaliana landsberg
  unsure (1)..(647): unsure at all n locations
tgactagtgaaactaatagatggctacacaccaggggaatatttataaaggctacgtagtgaaagcttgccgactcaccttggtagtgtttaagggtctggacaacccaaagcaaaagggatcacgactcatgggtaaagtgtgcgacctctgtagaggaatgaaactctttgggataataacttgggactgatggtaaaacttggcttatattaatgaataaaactctacaaagtaaaagtaacctgctttgagcctagggatgtcaatggatgtgatttatccgcgtacccgtggataaaaacctgttgggcacgattttgggtacgagcctgtacccgtggatacggatacgggtagcatttgatatccgtggatatttttttaacgggtacaaaaaatcagtatccatatccgaatacccaaatatctattaaaggaacctgacttgtggggtcactggagtttggaaccacttcacggaccacagccagcccaactgcccaagtcccgtactcccatcgccacaactacagctattgtttgtgagaactgggaatattttattacttaaccatgatgtnntctgggaccanatattatacactagtcgtttcttcctaaagtgtgtgaagtaacttatagtg

SEQ ID NO: 23522 - DNA, 594 bp, Arabidopsis thaliana landsberg
tttccttatttgcttccgtaatcactccactcgcatgattcacggaatctgccatatctgcctccaaactaccaaaactgttcgaagacacaatattctctaaatcctttccttttgtgatatcccgaagattacgtcccttcaccgtctccctcctccctgccatcgccgcaccagctttcgctggtttcttcccatttctcaccaccgtaaaaccatcatccacctgcgcctcccgaccaacttgcgacccctctgctggatgatttgttggcaccacacgctcctcctctctaggtttccgtggacatgaatgaactaagtggccgtacagtccacacatagaacaaatgttcgccaacccttcatatgacaccccatacctctctccattgatcataattgtccccttgagcggcttccttaggtccacttcaacacaaacccttgcaaacctagctctctcatagtttaaggtagtcaagtcaactttaatcggttttccaacccccgcacaatactcattagaattggtcggtgatacagagtcaccgggatgttagataaccggacccagacctggtgtgttgtaac

SEQ ID NO: 23523 - DNA, 600 bp, Arabidopsis thaliana landsberg
  unsure (1)..(600): unsure at all n locations
ggaagtgttggctggatttgaatgggattctcttctcctttttgcatagattcatcattaccagcagtcaataaattagttgctctggtgcgaattgtaagagtctcagatgcttcaccagtttctctgacaactaaaggaatagggccaacaacatgtgttgaggaactagaaccttcctgcataggttcgtcatccccttgattaatgccttgcatcggttctatagcttgtctagttgcttcaacgttcaactggagcacagtgctttgatggttacaagctaattcatcatgcagcaatgacccacatctaaagcagaatttcttcagtttagcgaaaacaaacctaaccatgaatggggctgtggcaggttcgaattcaacagatcgtacaaagattaaacgatcggagatgttcattgtaacatgagcctagacttcaccttcagcatccgcaggggcttctataattttggtttcatcaatatgccccagaaccccnnnnnnnnnnnnnnnnnnnnnntctatcctaaaatcttgaggaatatgcagaattttaacccaaaaggagatttgagagagaaaattgacaggtacg

SEQ ID NO: 23524 - DNA, 870 bp, Arabidopsis thaliana landsberg
cccaagccgcttgccgcaatcaatccttaatatatttgttacaaatgatttgagaaaagggtgtgagttttcaaaagaaaatgcttttcaaaatgtgtatgatgaagggttttcacccttatcaccttgtgagtgggataatcagggactccctggtttaggggagggcctaaggtgatggctcagctggtttaggcgtgagcagaaggattgtcccctcgtataaggaccggtttgtcatcttctctacctgtactctataatagtacaaccactcgagactgtgtgggcaatcactcgatccgaactcgtacggtccaaccccagggttaagaaggctggggagcaccgggaggataaggagggggaaagttttgtccggtttgggcatggtggtggcctgactccttccggataaccgttaaggttaggacgtacgggtaaggaaagagatccggcattcgggtctcgcgacggtgagatcgcagaaaccgggctagtgggtaaagtgtacccctctgcgcagagttgaaacctattcgaatagtccgtgtccactggtatggatgagtccggtgtggtatgacaattagaacttcctctatgaatttcaagaaaagggggaatgtgcgagtgaataagtgttaagaaagaactaaggccacgggagcgggaagctcagtggtggttgagttttggttacttttaaagacaatgggttaaaccttcaagcaacttcctttctctaagaaaatgatgagtgacatcaactccaccaaattgagcatgtacatcataggtctctttctctctacgggagcggggtgggcttgcggaatacctagtgtattcacccagatttattatgtt

SEQ ID NO: 23525 - DNA, 797 bp, Arabidopsis thaliana landsberg
tcctcccactattagtaacctaacccattagccgagttgtacctttcctcgaacgacctcactggtagtctcccacttgtacaaaatctaaccaagctctccattctacatctttttgataatcacttctctggaacaatcccttcttctctcttcactatgcctttcttatcctatctttcagtaaaaggaaacaatctcaacggttcaattgaagttcctaactcatcttcgtcatcaaggctagagagtttgcacctaggtgaaaaccattttgaaggaaaaatcatagagcctatctcaaagctcatcaacctcaaagagctcgacctttctttcctaaacacaagctacccaattgacttaagtctcttctcctctctcaaatctttgttgctcctcgatctttccggtgattggatatctcaggcaggtttaagttcggattcatacatctcatcgaccttggaagcattgtatatgaagcagtgcaacatcagtgatttcccaaacatcttaaagagccttccgaatttggagtctattgacgtatccaacaatagagtcagtgggaaaatcccagagtggttatggagccttcctcgtctgagctcagtgttcattggagataatttgttaactggcttcgaaggttcatcatcagaaattttagtaaattcatcggtgcagatcttagttttggattcaaacagtttagaaggggcacttccgcatctaccactctctatcatctacttctctacaagatacaatagaatcggaggtaacatacctct

SEQ ID NO: 23526 - DNA, 442 bp, Arabidopsis thaliana landsberg
tacctgagggaatacgtttaaccaatcccgatgcgtacttatgcaattttgtaactgcttctgaccactctatcaccggacccatctgggctgctctaggagattgcgatgctcctggaacgacagcaaagagcaactctatgcattcttcaatctgtgtgacgcatttttgcgatgccagggaagtgtctttcagacactgactcacaccctcccaacatgataccatcagtgagctcttctggtcacaactatatgttggagctattgtctgctagactacaatgtaggagacaacgtcaaacaaaatatatagtttagaacctgagaatattctgactaaaacccataaaagactgagcaggcactactgaagactcttctctagtgccttgaatcttgattgttcctacagctcgtccagaaaaccttgaatctcacc

SEQ ID NO: 23527 - DNA, 586 bp, Arabidopsis thaliana landsberg
cgccggcgatggagtgtaatcaaaatgtcttggatctgtgcggtggaggagaagaggagcacgatgaccaaaccgaaaaagcgccgcttcgtcacctttttatagtccgtgtcaattttctagggtttttgctcttcaatttattggaaatttcaattatgcccttaatgtttctatagttttgtaatttgtcaattaaaaaagtaattactcgatttattcgtttcagtgaattgacagtgattaaattagcataaaccacttgtacattcaacattttgtcgacatgaaacgtatttgaattactttttaatttacaaaatatgcagaaataaattggataattggtaaacatagaatatatatatatatatatatatatatatatatatatatatttcatattttcattggattgttcaatgtttcaagtttcaacaaattttgtttgtgggtggaggaaaatccgaatgacttttctgtttttttctatcgaacgtataagttgaattctatagaaatagaacgaactgatgaatctcaattatgactagtgtgacaaaaaacaaggtggtgggacttcttt

SEQ ID NO: 23528 - DNA, 479 bp, Arabidopsis thaliana landsberg
aaaaacaacccaaatgtgctcttattaatcatttcatctttaataagtctttatttgaaaggcatctgtacaattaatctggggcacaatataaggcttcctagaagattaatccatattatgctgtgaacaatctcagaataaatcttaaaagtgtggaaaagacgtgatagttcaaccttaatttttcatttgaaaaaatgacgatgatgatgtctgatcttccgaatgattggtagaagagattttgtctagggttccgataacatctctaggagcagtgagatctacttgcaaacgatggaacggtttatccaaagatcgtattgtatgtaaaggaggtgcaaatcaacagtttacagggttcacgagatatgtgaacgaatctacggtttgttcaatgagacttgatcttaatgaaatccaaaataaagacgttgaactagttgaactctctataaataagataaataaattta

SEQ ID NO: 23529 - DNA, 931 bp, Arabidopsis thaliana landsberg
ttgcaagagcggagttacaaggttggcaaaaagggtacgcaaattatcttcctcatcactagcattatcatcactagaggactcatatctagtggaggatttagatttaaccttcttctttttgccgtcctttgccatgaggcacttgtggccgacgttggggaagaggagtcctttggtgacggcgatgttggcggcgtcctcgtcgtcggaggagtcgctagagctttcgtcggagtcccactcccgaaaaacatgggcatcgcgcccttcttcttgtagtacctcttcttctcctttcttctccccttcttgtcgtcgcctcagtcactgtcacttgatataggacatttagcaataaaatgaccgggcttaccacatttgtagcaaaccttcttggagcgggacttgtagtctttccccctcctctgtttgaggatttggcagaagctcttgatgactagcgccatttcctcattgtcaagcttggaggcgtctattggttgtcgatttggtgtagactcctccttcttttcttccgtcgctttgaatgtgacgggttgagcttcggatgtagatggatcatcaagctcgttgatcttccttgagccttcgatcatgcactcaatacttacaaaatgcccgattacttcctcgggggtcattttagtatatctaggattaccacgaattaattgaacttgagtagggttaaggaaaataagagatcttagtataaccttaaccatttcatggtcatcccattttatgatcccgaggttgcgcacttggttcaccaaggtcttgagccggttgtacatgtgttgtggctcctcccctttgcgaagccgaaaccgaccgagctccccctcgattgtttcccgcttggtgatcttggtgagctcatctccttcgtgcgcggttttgagca

SEQ ID NO: 23530 - DNA, 608 bp, Arabidopsis thaliana landsberg
taaattcaatcgatcgttcttcttcctttcaccagtatttccgttctatttccgattcgaaatcagtcatgccgcctaagacgcgtggaagaggtcaagggaaaagaaaggagatagaagcgtcggcgccggcgaagacaaagaaagttaaggcgccggcggagaaagtgaaggagaaggtgccggcgaagaaagcgaaggttcaggcgccggcgaagaaagcgaaggttcaggcgccggcgaagaaagcgaaggttcaagcgccggcgaagacgactgcgatggcacaaatgactgcgacggcgatggcaaccaatgcggctccaacgacagcggctccaacgacaacgactccaacgacggagagcccgatgcttgatgattctacgttttatgatgctctgaagcatattcctgctgaagaaactcaagagaatatgcaaactgatgaggtgaagatgaaaatgaaaaagaagaaggaagtgaagaagaagaatcaaggagtagtaccaaaccttgggctccgattccgattcagaggagacggagacaaacaaagaactcgcgtgtgctaatcccgtggaagaggcagagagacaagatgatgg

SEQ ID NO: 23531 - DNA, 568 bp, Arabidopsis thaliana landsberg
tcaccagtgaaggaccagattcgggtggcaacctaaaccgacttacagattttcaacttgtgctactcaacttgagctcgctcacctggatcgaccttggttctaaccagttgaaaggtatgctcccatctaacatgagtagcctccccaaactggtgtcttttgatattagtgaaaattcattttctggatccattccctcttctctcttcatgatcccttcgttgattgtacttgacttgcgaagaaacgacttcagcggtccgcttgagattgggaatatctcttcacattccgaacttggatacttgtacatgggagaaaacaatttcaatggaccaattccgggatctatatcaaaactagtcgggctcagggatcttagcctctctttctggaacacaggaaggggcattgttgatttcagcatcttcttgcatctcaagtcactttgttcacttgacctctcctatctgaatacaagaagcatggttgatttgagttttttttcacatctcatgtcacttgatgagctggatctttagggattaatttgagatcagttcac

SEQ ID NO: 23532 - DNA, 312 bp, Arabidopsis thaliana landsberg
tctgccatagtgtctgccatttgctgcatcaccgccatctgagcagcaaccagtggatcaactccgcctggtggaggattaggaggattcatccctgctggctgtggctgaggttgtctataaatccttcgagtgtgttgattaggaggcaaatcaattccaccaccccgcctggtattgaccatctgagttagatacatatggtaagaaaatagtatccaaggcagtaattacaatcatgtttctttggggaatttatagcaaagaagattagtgtcccacctagagtagctaataccctaccttagggtg

SEQ ID NO: 23533 - DNA, 832 bp, Arabidopsis thaliana landsberg
  unsure (1)..(832): unsure at all n locations
tcatgcctctttcatttgttatatgcagaagctccttcgctagcatgctcgcttggaacnacatgaacttgctttgataccgtctggcgttcccattccctagctcaaattccgtaaaggaatccacaattgctgcacaggccttctttgcatctcttgaaccctcaacatgcatcttctgaaacagctttttagcctctttagagtttttggcttctgctatagcgtctttgaattttatcttatcaattcctgcaactgttgacataagagaggattgtgcgactaagaggtacatcatgtagtctgaaatggttttgctgtactctttgcttctgacatttcttgctgcattgtctacttctgtttggtgtaagagctcagttgcaacgtgccacaccagaatgccctgatcatactccacttcagtgacatatggcaggagtttctcataataatcctcgatttgcatatcgcgcagaatccagtcgcctctagccgaatatatatggctggcactttccgatccaacaactaagagcgatctatgcttgacctcttcaaatatgaattcccagagctctttggtgaggcgtgtgcgggatgtgaacactatctcatttacctgatctgagatgctgaagaattctaggagatagttgatcaacggaattcctaagcagaatctaataaaaagcctgaaagggtaaagagtccgacgagtccacggaaagttgatgaacagatgaatcatcttagagtctatattcttgcngatgccattcgaggcttttgaaactatcttcngtcctctgatgatgatatcaacaac

SEQ ID NO: 23534 - DNA, 1004 bp, Arabidopsis thaliana landsberg
cgagaccagattgtgatagacttcacagcatcatggtgtccactttgccttttcattgcaccagtgtttgcagggaggggtgagaagttcactaatgttgtcttcttcaacatcgatgttgatgaattgcaagctgttgctcatgaattcaaagttgaggcaatgcctacttttgttttcatgaaagaaggcaacatcattgatcgcgttgtcggtgctgcgaaagatgacatcaatgagaagctgatgaagcatggtggacttgtagcttctgcttgattgatttcagtttctaactctttgcatcataataaagtttttatctttcgtatgaaataaaagtgatgcattgctactgcacatttgtattataactatgttgatttttcgattactgctttgttatctcttggcttcaaccacgaacacgaaaatagcgacacacattaagactggttttaaacacgataagagagcgtaggttgaaaatatgtagttatgaacagagcagtgattagttctctgatttccactataaatgtgtgaaaatgttatgtaatactatggaaaaatcactttcaacagttcatatttctccatctacgtcacgtctatatctctttaagttccttgaagttttatccaacgtttctctgtttttatccttgaacaagaactgaaacagagaaaacaagagaagatgaagctgacctgtagattcaaacatttccctatgctctttagatccaaagccagccgctcgttccctctaggcgcgtcagagtaggcctgtcgatgggactagcatagacacatagtgactctacttgaacaagcgtcagactgcatacagcaggttagagctggtaggacttggttagtgatccactacaaaaataatccatatcaatagcacacgaggatagatcagttttccctactgcaataaaagatgagttcatagttcatattaaaaatgagttcatagaggcggcacagagaaa

SEQ ID NO: 23535 - DNA, 894 bp, Arabidopsis thaliana landsberg
acctgagcctgaggctttagaggcagttgacgctgcttttttacttgtctctgcagattttgtcccaatagggggggatgcataatcctgtctagaagatggattctcaaagcaaactttattgacaggccatgaaacaaaagccatcaaacagtcctcaagataggtcatatccattgttggtctccatatgaatgtgtctggttgaagcactgaatccacaaatacttttactgcctttggtccaagtggtagtccattaaccaacgcagtttcttcttgtgtctgccaacaaccctcagcaacaatcacatcatcattagacaaatccagcagtttacatttattcggagagtttgctcgtagatcctgtcaaaaacatatagaaaacaacacatcaaatagcaactcataaacagtctgagttcaacgaagcaacaataaaaaattaccaaggcccaatgtcttctatttggagttccttgtccaaaagaacacactttgacgctggccatgcaataatctgtccaacagcttcctccatagtaaacatcttagttgctggtctccagaggaatgcatctgctttagtagcagattcaaccaaccctttagggcctagacgacagtcattaactaagtcatcaggatcagaagatagaatacgcccctcaccaacgtcttcatcactcccagaccaatcaaccaagggtgtgatgttttgtttacactctacaaaatagttgattagaaatctaagtcaggaattacaatagtaagaaggactactcatggatctaatatacattacttactctggcccctgagttttcacctatttctagtaaatgtatctataacattaaaagatataatgtcagttctcactagtat

SEQ ID NO: 23536 - DNA, 924 bp, Arabidopsis thaliana landsberg
tactctccttaccaaaggtttactacaagtcccctccaccaccatacgtctacagttccccaccggcaccgggctattctccttctccaaaggtttactacaagtccccacctccaccatacgtttacagctccccacccccaccgtactactctccatctccaaaggtatactacaagtccccaccaccaccgtacgtctacagttctccaccaccaccgtactactctccttctccaaaggtttactacaagtctccacctccaccatacgtctacagctccccaccaccaccgtactactctccttctcctaaggtatactacaagtccccaccaccaccgtacgtctacagttccccaccaccaccgtactactctccttctccaaaggtaaactacaaatctccaccaccaccatacatctatagctccccaccaccaccatactactctccttctccaaaggttaactacaagtctccaccaccaccatatgtctacagctccccacctccaccgtactactccccttctccaaatgtcgactacaaatctcccccaccaccatatgtctacagctcaccacccacaccatactactctccttcttctaaagtcacttacaagtctcccccaccaccatatgtctactagatgccatactatcgaatttgaattgtttcattaacaggaaacatgattgtaatattttcattttatgatctcttttcatttgattcttctgattttgttcttttgttcaactatcttattatgttttttttaattaataaattttgtcgacctttatacatgtatttcttagttgatatttgtttcaatttgctcgagttttttaactatatgttttgctatcaatgactaaattttctttggttaggatatatagtttatattagac

SEQ ID NO: 23537 - DNA, 749 bp, Arabidopsis thaliana landsberg
aaattcaaattcccaaccccaatccacccatttgcttcttgcagttgaatgttcttcctctttcgaatccgttataacaccgagtcactttcctcatcgcgttttcgctaaagattgtcgagtcgagacaccgtgcagcagtttgacaaaacccaagaaactcagcttcccgtcagtatgtcttatccagtcatttagaatggtatgaaccgggatggatgatccaacaccaagttcctacaaaacatttatgttcccttcgtttaggaattagctgaataaattgttaagcatgacagaagcaagtgtcgaatttcttataaacttacagaagcgagttcttcgatgacgataactcggtttccattcatttcaaatagctcataagcatgacgaatgctctgctcccaacaatcaagagactcatgctgatgaacgctaatggaagctgcacaaaactcttcaaaatccatccctttgtattgaagtccatttaactgtcatttcccaacaccaaactttcgttaaccaaccttggattgtatcttaaacagattaagcaaaaggacaagaacagaaaggagacaataccaatgcaagaaagtccgggatccgtgattccttcattgcttctgttgcatttgtcgcaagtgcctgtccaacagaaataaatctagctttgagctgtttgctttctaccagagagagacagagaggcagagaaggcacataccagtctgatgctatct

SEQ ID NO: 23538 - DNA, 1409 bp, Arabidopsis thaliana landsberg
gacactaaaaccaaatctacacagaaatcacaaatcgaagagtaattaaggcgttattaatcgaataaccttaaattatttgaacaaatcggatcaaattcaaagaatcgacgagaaaataaacagatctgcgaaaactatgaaaccctaatcgagaattaagatgatatctaacgatcaaacccagaaaatcgtcttcgatctcagattaacagaatctaaaccaaagaacagatacgaaattacgatcgaacgataacaaaatcgaagagacagagtaaggaacacagaaatttaccttgatcacggtagagagaattgagagaaagtttttaagatttttgagaaattgaaatctgaattgtgaagaagaagagctctttgggtattgttttatagaagaagagaagaaaagacgaggacgactaggtcacgagaaagctacggcggtgaagcaatagctaataataaaatgacacgtgtattgagcgttgtttacacgcaaagttgataaacacgactcgtgtgtgccggctgcaaccattttgacgccgtttattactaacacgtcgacaaccacaatttctaacggccgttataaaatccagccgttgagatttaacgatcgttgatttatatttttagcattattataataaacggtggagctgaaagttggcaataattgaagcgtgggtcccacatcattgaagcgtacaatttcgtattttctagaattcttcgtgctttatttctttcccttttttgtttttttggccattttctaatgcaagtgggcttataaaatcagagaatttcttggaaaagtaacttattatcttaaaacaaaattgtgaaattatccatttcttctatttttttagtgttattggatattttggtatgatttgcataggataatgaattttgtatcaagttggcgaacaagtctaaactaaatggcaagtggtttggtgattcggtttagtatatatcaatgggcctcatttgggcctcgtccatatttaacactcgtgacgtcttcttcagtccaatgaaagcctcgtccaataatattttttaatgatacacaaagcattctagtcttcttcttactaacattatacatgaagctttctttgaataagttcactattaagaagaaggaaacttatccggtcctatatcatcagttcatcatattggttgtcttgtttgataagttctgctttgtttaccttccagttttgccatttgatgttgcaatgagatttctttattgttcttttggtaatgtttaaaaaataacaaatgtcgttactcaattggtaagacctaggcgacttagaggtggcggccgagtgatcttgagcgaactaatatacatgtgtggttcgggctggggggat

SEQ ID NO: 23539 - DNA, 510 bp, Arabidopsis thaliana landsberg
gagaaacatcaaactgttgctgttaaaaattagaagaacgagtacatatctataaggcaatggtttgccttcagaattcacgaagggaaacatgagaagcatattttacttaggtttagaaggctatggtagcaattcttggtggattcttatacagcaatagaatcaaaccggcttggttacatcaaacttaaccagagtagtctgaggacaaataattataattctgtgcaaaaggcttcagaagaaggaaagcatgatttgaaagatcaaggattagcatgttatttgtcagctacttttacaggtggtcctagatatatgaggaacatgtattatgatgcgatgacattgcgtaaacattttgggtttccagattattttatcacatttacttgcaatccaaagtggccagagctgattaggttatgtggtgagcgaaatatgagagttgaggatagacctgagattatatgcaagatcttaaaatgaaactcgattctctgaagc

SEQ ID NO: 23540 - DNA, 545 bp, Arabidopsis thaliana landsberg
gatatagcattgacacttgcaactctgtaacatattctcatgccacacgaattaacaaattgccaaaacacttgactctacattcgcctctgtattagccaactctctgactagttctcttctctttttttgctacaaatgcatctttttttgtctttatagagactagttctattctttttttttgctagaaatgcatatttttcttgtctttatagagactagttctcttctctgttttttttacaggtttaacaggcataatggtaaactatcttgggcaattgttggagtatttatgaggaaatttgatggtccatactttagttggaaggtcactcctttgaacatctgagagagatatttcaggagtttcgcggtaatatcttcactttatctttaaaatacatattgttactcatttactaagtatttgtgctaacttatctcttttatttgtactatgtagcggatgttctattgggatcatgggcttactgaggctgttagagcggggtttcgagtcatagccagaagcggatgaa

SEQ ID NO: 23541 - DNA, 878 bp, Arabidopsis thaliana landsberg
cactcgcaaatattggaagacgaatgctgtttttgttttgatttggatttatccacgtcatcgatccgtcaagtagggttagcgatgtataaccattggatcaataatcaacggtagatatgaaaatcacacggatcaacgcagttttatatattaagacattagttagccacttcatatccgtcaaattcaattgatcctctctccaaatcatcttaaaagtatcttcttcttctccatctggtttattgttcgatcgtcaattcaattgattgatttggaaatctagcgtttctgttcgttaccattcactgaataatttttcttctgttcttcacagtcacagatctttgggtatcaagtaaaactgtgaagtgatgtcgggaagaggaaagggaggaaaaggattgggaaagggaggagcgaagcgtcacaggaaggttctgagagacaacatccaaggaatcaccaagcctgccattcgaagattggctcgtagaggtggagtcaagcgtattagtggtctcatctacgaggagacacgtggcgtcctcaagatctttctcgagaacgtaattcgtgatgctgtcacttacaccgagcacgctaggaggaagactgtgaccgccatggatgttgtctacgctctcaagaggcaaggaaggactctctacggattcggcggttaatcagggtttttcagatttgtgtttggagatctgtttctggaaattagatttgagaatttcaatgtaggtattttagtaaatgtagcaagatttgatttcctttttttgctatttcgcttttgtaatgtgttttcatttgctaaattctaaacaatggaaacacgcaatttggtgaaagttgtttgggtt

SEQ ID NO: 23542 - DNA, 475 bp, Arabidopsis thaliana landsberg
  unsure (1)..(475): unsure at all n locations
atcccgaaaggagctcctaattctgcaagaggcgcaaaaatcgtgtgggatgttgtttgcacttctaaggaatgtggtggtctaggctttaggaggctaacggcttggaataaagtccttgccctcaagcttatttggcttcttttctctgcggctggttccttatgggtttcctgggttcggttaaatctcattggaaatagatgtttctggggacttgaatcggccttcttcgggaatttgaatctgggccagcctgtatacctcaggcctttgctcggcccttcatcttttgtgatcttggttcaggcatcacagcaaaattctggcaggataattggaaagggttaggccctatcattgatctcacgggtccnnnnnnnnnnnnnnnnnnnnnnnnnnnnnnnnatgttgtggttagagacgctatctctggcccttcttggaggattatgtcgtctaaaagcaggaccca

SEQ ID NO: 23543 - DNA, 853 bp, Arabidopsis thaliana landsberg
tccttaaaagaattttgggtctttctcctccataaaagtatttccataattcttttagagagagttgaataaactacatatacgtagaaatataagttgaaatgagaaagtagagatctttcacatttatgttgattacttttaaggtaatattttgaaaacattaaacgtacagtagactaaagatatattgaataacaaatatttttttttaagttttttaaatgactcaaaattggatggtagagatgaatctcacgactatcattcttcttgtaaacaacaacctatcatcttatttcctttaaatagagggttatatttacgctcttcttcacgctcaagtattacattactcattatagttttgctaattcaaccacttcccattatttttctctaaattcgctccttctctcctgcttcctgttttctcatctccttcaatccttgttttttttatagaattatagatctcatttctcagtttgttaatgaaagtacatgttcatttgatttgctgtttcactcattatcaattttgaaataacaaatcaaatcagcacgtaccttaacaaatcgagaaataagatcttgaattttacaaagaacaaggactggagaaagagagaacacaagaaacatgagacagaaaaagaattaagaagaaaattacaaacggaaaacggttgaagtagcaaactataatggtttatgtgatatttgagagtgaagaagggagtaaagataaatcctctatttttaggcaattaggatatatgatgtgttgttgtttacaagaagaatgatagattcatctataccatcccaatttgagtcatttaaaaatctt

SEQ ID NO: 23544 - DNA, 480 bp, Arabidopsis thaliana landsberg
tgatgatcttgtttaggtgtaagtgtcattttcgtttttatattcaagcacttgaggaactatagttggatatagccacagcatatgacttaattggggtagagaccagaaccaccggcctcttctcaagagctagggagccactaaagaaccgctctgccgtttttgctttgggtgacaggataaaaattataaaggtatgcatcattcagcagttatcattttttgattgattttttcgaccattctacatgctctggcgaattacgttatatgaaatgagttgctcttctgactctttaatacaaaagatggtactaggtctgcgtctttacaaataaagtataagttatattaatgtattgtacaccataagttttattgaggagtgcccacttttggttttggttcagatattttagtcttaggttataaattataggaatcaaatatcttggttcattcagttttggttttacg

SEQ ID NO: 23545 - DNA, 431 bp, Arabidopsis thaliana landsberg
caccatgcaactgcaacctgctgttgtgtacacagggcatcagctccccttaagccttcaggattgcaaactcatccgaatgccccggctcacagcctttaaggcgatcgctggccacctttgttcctttgtaaactgctctaaacgaatgtggtgctaactgaccactaagctcgagaccatctgagttcaaaactcatcctctgatctgatcaccacgctgattggatagactgccgttaatgtactgatacagagaacgacgagctaggcggagtcatttgaagctgtatcctatgctacagaccatacgactgatgtttataacataccccaatggagtccacattaacatgcacgaattttgcaacaccagcattctgttcttgacagtcacagataccaaatgggagacttacagaggctgactt

SEQ ID NO: 23546 - DNA, 166 bp, Arabidopsis thaliana landsberg
gttttttattgattaaacattcagtgattggttggcttcagttgtgagtatcattcatctatttaatttatatcatctttcaataggtctcgtgtctcacaagaagcaaagttcatctgctaatatcactctctcttctccttactaattacgttttcaccgtaag

SEQ ID NO: 23547 - DNA, 776 bp, Arabidopsis thaliana landsberg
ttgggatgcttcctggtgtccttgtcatgcttcacaggatcaatgactatgtcgcggagatttttgaggtctccaacttgacatttgccttcaaaggcccatggttctctggaatgaacatgttgatcactgcagatccttcaaatattcaacacgttttcagctccaacttctccaattacgacaaaggaccggagttcaaagagatgtttgattttctaggaaatgggatcttcactgctgactccaaactatgggaggatatgaggaaatccgcattggtcgtgcttagccatcaagggtttcaaagcttctcattgacgaccatcacgcgtaaaatcaagaacgggcttgtcccggttcttgatcattttgcggaggcgaatacgattttcgatttacaagacgtgttccagaggttagcattcgatgtaacccttactctggttacgggttatgactcaagttctctttccattgaaatgccaaagaatgagtatgctaaagctatggatgatgctgaagaagtggttgtgtatagacatgttaagcctgtggtcttgtggaagctgcaaaactggattggactcggagaagagaatatgatgaaggaagctaatgccgctttcgacagatcttgtgcaaagtatatatctgcaaagagagaggagataatcagtcatcattctaatattggaggagaaactcatgcagaggatttattaagcgtctacatgaatctagatatttccaagtatgagccttttgaacccaaa

SEQ ID NO: 23548 - DNA, 942 bp, Arabidopsis thaliana landsberg
gttaacgtctttaaaattctagagtggaaacaatatattaagtttgagaaatctttcttattgattatggctacgtcactagtatgtgtgaccaatatttgtcgaagacttttttattcttgatcaattagccccaaaatcgctactaattcgtaaacaaatttttattactaaatacctctctgttattcctcatgtgagaacgtgatataaaatcaacataatcgagtcttcgcagttcactctagtttatcattataataagtgaggggattacatatgaggtatttagagaaaacggggaaaagataccaaaatatcttacagacccgtggttctatatgtgcattttaatttttaatgtgctaaagtcagagccatgaatactatagtatgcctagtcagatttgatgatgatggttgttaaacccaccgctcctcctagtcaaacatgttctacaatttccaaacacattcaaaaagcgcagaaaacaaaaaaaaattatgtgtatatgtgttacaattcttaaaagaaaatgtaaagccagataattgttacaagagatgtacaaagctccaagtgtgaagaacatcaacatgaatatgatccatgaaatctaccaaatttccgtgcttgcactttcccatacatttttgtttttcacctaactcttacgaacctaaaataaaataaaatacaaaaaaagggagaaagatttgagcacttgtcgacacatcgtagcatcctacctctgccgacacgtggctcgagacaaatacggaactcccggtcggaacagaaacaaatacttattttgactacctgaaattcgacacgtcatcaccttctagactcaaaagagtacaaaggccaatgagactctaccattccaacgaagtgtcacgtcacttcctatcaaacctttcctaaatacgttcact

SEQ ID NO: 23549 - DNA, 1873 bp, Arabidopsis thaliana landsberg
aaggcctcggttattcacagtggaatccgtgacccagcacctccaactattgagtctctaagtgagtttttgttgaacttttgtgtagtgatgctttcacaatagttcttacatgtttggttacatatttttgtaggtgatggcagcgatgagtccgatgaagaggataagaagaagaagaaaaaggagatatcgaagaagaagagaaagcatgttggtcctactctggaatctgggaaaaaacgtggaaggaaaccttccaagtataagggggaagagtttacagctgaggggaagcaaacgaggaagagactttgacttttctttcttgcttatgtgtgtgtgtggactcttaggtgtttggagaaataggactttctttttgggtatttgggaatgttatgcgttagttatgtgtagaggacaaacttattttctgaaatggtttatgtgttttaggattttattaaaatcaaaacgtttggctaagttgtcccggttggccagtcaataatacaagagtagctaagttgtcccagttggccggtcaatacacataacttaaaatacaagagtagctaagttgtcccagttggccggtcaatacacataaattaaaatacaagagtagctaagttgacccagttggccggtcaatacacataacttaaaatacaagagtagataagttgtcccagttggtcggtcaatacacataacttaaaatacaagagttgataagttttcccagttggccggtcaatacacataacttaaaatacaagagttgctaagttgtccctgttggccggttaatacacataacttaaaatacaagaatagctaagttgttcctgttggccggtcaatacacataatttaaaataggtaaatacataagttgtccctgttggccggtcaatacacataacttaaaatacaagaatagctaagttgtccatgttggccggtcaatacacataacttaaaataggtaaatacatgtctaattaggttcaaatattacataaaatccaaatgccatacaccatcctcaataacataaaacatatcataatcaccatgtagaaagtaatgccctaagcctatcaatctcgacttctttggcgagtaacctttctttaagggtttcaatttcaccttgcatgagttgaatagtttcccggatggactccaaagcatgattgcatgctagttgtccatgtcttagtgcggaatcaagtttgtgatttaccttctcaagctcctcagttaccgcctgatcccaccactgaataaggtggtttcgggactcgtactcttcatcctgcgaaagagagaagacttcataaatataattcacttgtactttgttgttccaatgaagtgaaaacacaataacttactttaagcattgggcatttgtagactctgtcgccttgcctgtaaccagttttgcacacttcaagttttacaggcttaccacaaaaacatttttctggaaccccccaatttgcatcggcattcgcctctccactattccaactagcttcggacgtggatggttgagagtaactatagggcatctacaaaacagagaaacccgtaagaaaccctagatctactaattacggcggctaaaaacccgtaagaaaccctagatctactaattacggcggctaaaaacccgtaagaaaccctatatcataccttggttgttgttgttatcgtcggcggcggcagataatgggaaccctaatttcagttgtcgtcgccgatgttgggaaggaagaagagagaagaacgagagagaggaagaagagagaagaacgagagaagtgaaatagaagagagagagagagaaagagagatt

SEQ ID NO: 23550 - DNA, 694 bp, Arabidopsis thaliana landsberg
  unsure (1)..(694): unsure at all n locations
tgctccgagtgatcaattggtcgaatagatgcgttttcctctcctatctgtatgctcagatgtctggttgagtggggaatgaggaggatccgaagatgctttgatagatcaacaagtcttgtagagttggtcgcccgtgatcgagtagaggatcgagtaggagggacgagtagatcgatctgctacttcctctgaggctgccttgatcgagtaagtgggtcgagtgaattgttgcttcctctatggctgcctcgatcgagtgaactggtcgagtagaatgctctgctgcttccctcttggttggatagagtagagggtcgagtagaatccttgtaaactccttatgcacctgaaaatacaccaaaacatgcaatatgtatgcaagatgatcctaagtgtgcaaaataagctaaatgtgatgcaaactgatatgaaacaatgagtgatcactaagctaaatgatgataaatacatgtctaaaatgagtaaaatacagnnnnnnnnnnnnnnnnnnnnnnnnnnnnnnagatccagaaaaacactatccgannnnnnnnnnnnnnnnnnnnnnnatgtgttgtggttaaacccattcgatagctcaactcgatatcttgtacttgtcaacgaagactcanagtgaaggtacaatgatcttcaatcacgactttagtgactgtgaacttgccatata

SEQ ID NO: 23551 - DNA, 501 bp, Arabidopsis thaliana landsberg
taaatattttaaaacccttttaaaatcccttataaatctcttaaaacccttttaaaatcccttgtaaatctattttccgccaaaaaatatttacaaggatttttaaaagcatatttttagttgagaaaaaaattgttacgaaaaaacaaattggcgggaaatttgttttttggcagaaaaaaagtttggcggaaaaatttcagtttccaattacatgttcctattagatgagagtaattcggtcattctgttcaaggaaagggatattttgtaaaatggacaacataaagaggtattgttgcaaaaaagtagtaaaaagggtagttttgctaatctccctaagataatatttcttaatatttgattttttggaaaaatacaaatattaagaaaacctattaataacacattataaatgtattattttttatgatttatatttttaataattcacaatcaataatattttacctattttgaagtttaatatttatcaataag

SEQ ID NO: 23552 - DNA, 604 bp, Arabidopsis thaliana landsberg
atcattttaaaaaagaatcaacgatttttgggtcaaaatcaattaaaacccgatccaaatagcttgattaaatatctacttcaaaaatgttaaatagattctgattattccacccatagcaaaaaaaagaaaagaaggaaattttgcatcaataaccaacaaaaatcaataattcactaactaaccaaaaaaaaaaaaaaaaaggggatgtatattctatataatatttgccattaacccttgcttcttacaatcactcaactcttctcttttactattctactagagtctgtgcgggttttatattaaaaagcattgttgtactttcttttgttttccattaaaattgttttctatatttatagtcccattagagaatgttatagatatcaaaattttaaaaggttattatcctaattatattttgggatttcaataaactttggaacacaaattaattttgtttgggtctacaaattatgaatagaaagataagtgtgagatatttaatgttgcatacaaattagtagggtggttttggtgaatgatttgttattatgcagaatatttgtaatcctttatattataaagcacaagtcacata

SEQ ID NO: 23553 - DNA, 874 bp, Arabidopsis thaliana landsberg
atatatactatgaatactctaggggtcaatttggttatccattgttcaagtgtttaggaaatttcttaggttatgcattgttatgatgagtcttattttctttaagactcgcaaaaggtatcttgctcaacaacttttgaaccgaggatttcaggtattcctgccacaaaactggttaacggtaagtatgcagattttcttcctctagattcacaataagtattattttatgaatgtatacatgtagttgattctttcacaactggttgtagcaaggacttgtcattgaaggtggactttaaagtcttcccactaggttaactcctggacataggtctaagtgcttaatttatgccttatttattagtttatttgcttcatatttttaatctgtacaaatgatttaatttaaaacaggtataatctctgctaatgcgtttatggaagacatgtttggttcactttatgccaatctccatcggctttgatatttttttcggctaaaaaactcaccacattatagccgtaaggccgtaaccaaatcgaaattgtgtgttccttttataaccacacttttgcacttagttatagacttatagtattaactaaactaagttataggatcatttttacattttaacccactagaattgaagcattaattgctaacccgttagaaactagtagtagaaacaaatttgaagctattaaaaggatcaaggccgtgacaaaacgacgtcgaggctcgagaccaccgaccgagggttacaacttgcaaaatgcagatttgacgaaaagaatttcaatttgctgggattctttcaaaatctctaaaacgtattgactttggtcctttcttttcactttaattttt

SEQ ID NO: 23554 - DNA, 534 bp, Arabidopsis thaliana landsberg
tgttattccccgcggttactgtttcaagggggagggagcttagtggaaaagaagaagaaaccggggggtttttgaatagtcatttgagtactgcaagactttttaaagttttgatttaaatagtaaactgaccaaatgctaaataaagaagggaaaaatggctatactgttggactgaggttaagaaaaattagggaggtacttaaccactacctagcctatttaaaaataataaacccctcaatacaccagatttgggaggggtttatcattaaaacttgctttggttcaaacttttttgctagttactttagtgacatagttcactagaaaattttgttaagccctctgttagtacaaaagaaatgcaccacattttatttcatgaaaacaatgaaaacatagaaaaatcctagaaaaataaccctaaggagaacccaccccaatccttgggataactaataatatgctaatgtgaatctaggaaaaatataagttctgttatttgacatttttccaattacaagttagtta

SEQ ID NO: 23555 - DNA, 622 bp, Arabidopsis thaliana landsberg
  unsure (1)..(622): unsure at all n locations
tggacttagaggaatacagtattaattgacaaaatcctttaatcaataaccattcaacctattttccatatgtttgaggtttaaaaaatgttcaataacgcacaagtatttttctttactttttcctaagttcaatctagatttttggttatgtttattttttggttagtcgatttcccccaacatgtttcaaaaaaaaataaacctggagagtttcattttcattgataacaaaacagaaaagagaaacgacaacatcacaaacattaacgttgtcttattacaaactcatcaaacatctctttattcataaggttgattgatcgtagacaaagaagtgcagatatttaagcggagacgatgttggttatagagaccttaaccatttcagcttcaaagataatggcatcattcaccaaatatccttttgatgcatcgtttaaatctgctaacaatatgatattgttcactcccacaccataaccgctttcaatcgggtaccaagctgcagctgcaaagaaaaaaacaaacataaaccaatttacatcagctgctactttcatttatttgatgatttctcccctcgagataaactttnttttttggttagtatcttactata

SEQ ID NO: 23556 - DNA, 237 bp, Arabidopsis thaliana landsberg
tgtgctctacagcggagggctctcggctcacactgcataaggtcttggtggcgaatgcatatcatatcgcgtttgttcatgtttagtgcatctgcttctcctaagaggcatctgctgtggcatcctcatagtctaagacgaacagttgaacttgcgttggagtgcgtttcactttttgtttagtgctgccagagcacttgtcttgaagtttacacccgctctgtcgaaaaccaaggc

SEQ ID NO: 23557 - DNA, 389 bp, Arabidopsis thaliana landsberg
ctgaccacccacaatagaagtcaccctaaaccctagataatgcgcaaacttaacagtttcctcctcaatctgctgagcaagctctctagtaggggccataacaacagcataaggcccctcagtctgattctcttccctcattggtggcaacctagatatgtaagccaacattggcaaaaaaaaagccgcggttttgccagaacccgtagctgaaataccgataacatcacgctgttcaagtcctaaaggtatagctgccatttgaataggtttaggtttcttgtatcctgctctttttactgctttcattagctcataactaagcttactctcttcccaagttcttatcggctgaggcatctttgatcctctataagaatctttgatag

SEQ ID NO: 23558 - DNA, 1206 bp, Arabidopsis thaliana landsberg
ttatcttttatcgacgaaagtaatagcaaagctagaacgttaagatcgataagcaaaaataaagtagtttgaaatagaagataaagctagagggtgctcaatccagcagcatatactaacagaggttcatccaaaattaactcatgaaggtttataatccgaagagaacacaaggtggaagcattgtttaggcttggtcttcaaccaatgggtggggtttgatggtcgaaagagccttggacgccaggaaatcagtgtgctcttggtatggtgatctagagaatcatgtctccctccagaactttagggtaaggaatcagtaagtgttctgaaggcaatcgaatgtagcctgcaatttaatcaaggtcatgaaaacaattattcatccctaaaacaagtaaggtacaagtgaatactatacatggataaaaaactgagggtatattgtattcaagttacaaaactcgtgaattagcaagaaaacaaacacatcataagcaagtgaaaacagtcaagtatcaagagatgccaaactgaatctactcttcatttgctacattaaaggtttcctacaaagcgatcattcattacagctaaagagaatcactagacgaaagagaaacactttttctcttccatcaatacaccaataacatttccagagatatttcatcaaatacagtgtgaagtcagaatttttcctaaccaaatggactcctggaactacttatatagctactactgtactaaaatgacagaaaatgctcaaatttcgaataatcaaattgtgatttcaaagaaactaccagaaaccaatcaaaaggaaacgaatctcgtgtataggtaactacatgaaagtaaaaaagaacaaaccttgacgaagtttccaagagttttggtggatcccctggaggaagtgaaaacatcatcaattccagcgaattgaagaaccttcttaggaactctagcagccacaataccagaacctctaggagctggaaccatcctcactgtcacagatccacactttccagtcaccttacaaggaaccgtatgtggctttccaatcttgttaccccagtaacctctcctcactggaacaacagacagcttagcgagaataatcgcttctctaatggccgtagcaacttccttagagcatttcactcccaacccaacatgaccattaccatcttcaacgacaac

SEQ ID NO: 23559 - DNA, 558 bp, Arabidopsis thaliana landsberg
  unsure (1)..(558): unsure at all n locations
tttgcttcgctgcgtatatcgggctgcttcagcccactctgatgatatgtctcgagttctggaccaactcttaaagttgatcgccacctttataggtttgtctcgtttatgcagttctagaactatctgatgtataaatgtgtttactatcctcctgggactagtaattgtatcacatttgagtgcaagaggatctggggcgtttcaggtggtatcagagctgttaggttggccgcaggacgtaacccttagcctgatccaaaagtttttgagtcaaaactattttcttaaaaaaattcttgctctaatcccttcatttcaaaaatgctttcctcctttccttctctcagaagtcagatggaggttcgctgccaannnnnnnnnnnnnnnnntgaagatggtttcccaagttgctgagagcatgcacagtccgccttggaattaggagccagccagagtatgatggtcgtgaattcatcgagcatgacacagagaagtgtgtcatgactgtatacattggatccagtcacgccatgtggaatggagtgtcctgctgct

SEQ ID NO: 23560 - DNA, 547 bp, Arabidopsis thaliana landsberg
ataatcattcagcaagttggttggggcaagagactacacaagcgaaggtacaagggacactagtggccacggtacacacacggcttccacagcggctggaaatgcagtccaagacacaagtttctttggaatcggcaatggaaccgtaagaggtggtgttccggcctctagaatcgccgcttacaaagtctgcaccgattcagggtgtagctcggaagctctactgtcttcgttcgatgacgcgattgcagacggtgtagacctcatcaccatctctattgggtttcaattcccatccatattcgaagatgacccgatagctatcggagcttttcacgctatggccaaagggattctcactgtaagttctgcgggtaacagcggtccaaagcccacgacagtctcgcatgtagcgccatggatttttaccgttgcagccagcaccacgaaccgtgggtttataccaaaggttgttctcggaaacggcaagacacttgccgtgagtatcaagtaacactctgttatggtaatctttctctttcttaca

SEQ ID NO: 23561 - DNA, 1913 bp, Arabidopsis thaliana landsberg
ctttgcatttcaatctcttcagcttcaatcctcttctcaagacatttcctttcctccactttctttgctcgcccaacttggagagacaacactttgtttatccgtgactgaggggttgcaatgtcgaaaccatgcttctctagctcggcaaaacaagtactgaggctacctagtttgcttgaagaaacatcgagctgcagcttttttacttcttctaataacccatagaaactcaccatcatgccaactgctgaccattcacgaatatcttctttgaactccaacaacgggctaaaatgaggattctgtggcactgtcttgtatcccttctccatttcatatgtcttccaaaatggcaaattctttgtaaaaggctcaatcgttagtgcaccttttgcttgagtttcctcaacatcagcagcagaattatccaccacattcgagctctgatcagaggatagcactacataaaccaatgcaaaataaaattataaaaaatttgttcaagcatataaacctgattgtttaataaaggatacatctaagctactttgaatagaaattgctttagtatattgaaccgaacctgtaggtatatttatccaagaagagagaggctgatcatcaacatcatcaacacgtatagtatcacttgtaccgttgaccccagcctttgaaacattgcaagtctcatctacaagttttaaccaaggatatgataaagtttggcaagaaacaaagaataccaaaactaatatggccaatgctgattttagacataccagtttcattcaggttagagttttgattttgttctcttttcctttttctactcttttcgttgctattctcctcctcaggcatctgcattcaaaaacaattaacaatcaggaaggctaaagataataagcaccatctagtggaagtgagaatggttatgtttcaaacaacaaactagctttacctcgtgttgagttgaactattttccaagccattctgatgcttcactggctcaggtgtcttctttggggatttttttccttcagtttcagcatcttgttgtttcaatggtgtgactgttatgaccggggctggggtacatgtgaaacagattcacattgacattaaagatcagtattaagcgatgtagaaactaaacacaatgagttaaggaagattatgtttacctattgatgtttcttgaggggttatgagcagatgagttttgtcattcatcacagcatcagccttgttttttcctaattctctagtggcctaatttcaggtaacgcagatatgttaagcataatcaaagacatggcgaaagcaaaggaaactagtgagtgtctaacttacagatacaaattttgctttagtgggtgtctcgctaatttccttagaattcaggaaacttctcaaatgctttgtggcactcgtaggagtcattgacttagcagcagaacaagagcgcattggcttccttttcaagatggttggaggagtttcttttatgggtttttgctgaaaatagaaacaaacataaagcattcataccaataaaccaaaactgtcagaatgttgattgaaactagtgtaattgatacctttagatcgctataccaaactccatcttcccacaccatgaaaggtctaagatctgagagtctaatagtagattactgctgggtagtctctaatctaaccgcgtaacggattttagagagaattttacttacttgccctttatgccataccaaaccaaaaaacgtgtctacaagattcaacactgcatacttgctaactgaagaaggaggcggtatggaggtaacacggcgcgaatgaacaatgatggttggcctcgtctgatcaccattgtagttaatgtacctatggcagtcctcgacaaggaaga

SEQ ID NO: 23562 - DNA, 704 bp, Arabidopsis thaliana landsberg
ctcccctgattaatctaaatcagtgcctaaaagtaatcaaagaaaaaaaaaatgaaagactatgaattgggttttggcttctctcgactatagcttttgccgtttttcacttagtccaagctcaatctcaatcaggttcttattctgtttcataatagcttgatgtttcttacgaaaccctttcaatatatcttgttgaatcatgaacaggttttatcagcttggattgtggactaattcctaaggacacaacctataccgagcagataacgaacataacatacatatcagacgcggattacatcgatagtggattaaccgaaaggatcagtgattcatacaagtcacagcttcagcaacagacttggaccttaagaagcttccctgaaggtcaaagaaattgttacaacttcaatctcaaagcgaatctcaaatatctgattagaggaacgtttgtgtatgggaattatgatggtttgaatcaaatgcctaagtttgatcttcatattggtcctaataaatggacttctgttatattggaaggagtagcaaatgctaccatcttcgagataattcatgtcttaacacaagaccgtctccaagtttgtcttgtcaaaacaggacaaacgacaccgtttatatcgtcgttggaacttcgtccgttgaacaatgatacttacgtcactcaaggtgggtcgttgatg

SEQ ID NO: 23563 - DNA, 1120 bp, Arabidopsis thaliana landsberg
tttaattttactatcatataataatataagataagagcgtaaacccctataccctaaatccctataccctatactaatatctcttagttgaaagcattctacactaatacatgaaacatgaaattaataatgtaaaagttatatgataattaaaatttatgcatattcatttcatagataaaaatatacttattaatgtattggaaaaaatacaatattacatttagtcactaatcttacatgtttagtcaatttagggtataactttgattattaaggataatataatttttatttttaagaactctaaaaaaatgaaactttagttttaagtttaattttaacaccatatcaaaaaattaatacaaagaaaaataacttaatattaggctattaacataataatcgtaaaaaaattatctcattggataatagattaaggtgtggatcaccttattattgatatcaaccgttgattagtatatcgaagggtcacgaattattaagaggacaattaactcattggctaattgaataatgtgtggatcacctaattattcatatcaaccgttgattagtatacatctaagggtcacagagtattggtacgaacaattatctcattggctaattgattaaggtgccgatcacctaattattcatatcaaccgttgattactatacatctaagggtaaataatcatccgaatcaaaaggttgaatctacaaacctttgagttcctcaacttctctctgacgttttagtttattagttcgtcttttgatgtgttcgctggtctctggatccagatttggctgttcaagtagaaagatttgaggattggaggaagaatcactgtaagtcatcatttttccttttgtacacacttatttttagctatggattaggtgatattgaagctctataagcatgaattgatgatatttctcattttgtttattgaaaatcgagttggttatgttaactttatgagagcttcaatgcattaacattgccattatctctggaacctactctctgtttgaatctggaagttgagtaggtgaaatatttatttagccatagaaacgaaaatgaattggtgacattggtagtttg

SEQ ID NO: 23564 - DNA, 654 bp, Arabidopsis thaliana landsberg
aattaaaaatattaactggttattttcattagaaaataaatcattacaattaaacctaatacacatatataagtttcataagaaagtaatatgaaaaacaattgagtatataactttttagtctaaattttgcacggtaatttttaaattcaaaatgaaaatttttaataaatataaaatcaaataaaaagttaatattttttattgataatagaaaaaactaactattgattaaaaatatttagcaattaaaaaaattaaattcttaaaaaactaactagtaatattatgaatagttcacatcttaaaaatatttattcttttaatttatttttgaaattggaaaaaataactattataataattaatgcattaaatatatatacaaaatatatttgtattggatataaaagagaagatcgagttatgtgaaactgcagctgtttcctatttagaacgtataataacacccagcagcacgatctcgtgtaattttcatacctaagatctttcttgcatcttctaaatctttcatttcaaactcactacttagcaaattcttcaatccctgaatatgcttctaattcactgaagctttcagcatttcatcaaccttttacataagattaacatcggtgccatcatcgaactttt

SEQ ID NO: 23565 - DNA, 1828 bp, Arabidopsis thaliana landsberg
ttcggttcggttgcttttggaagaggacgaaccataaagaaagaagctcaaagcccacccattttcgtgattacaggctttttagcaaaaggaagcagcacgtgttctcaaattaaccatagttaactcttcaatataaccatggttaacatttaacctcttcttcttcttattaacttcatcactctctttgtcttctcactttctcttctccacagttcaactcaaccttccaaattccaatggcgacatcacgagctttcactctcttcgctttcacattatctctcctcaccgtagcttctaccgtctccggccataacattactcaaatcctctctgatacgccggaatattcctcattcaacaactacctttctcaaacaaaactcgccgacgaaatcaacagccgcactacaatcaccgtccttgttctcaacaatggcgcaatgtctttcctcgccggaaaacacccactctccgtcgtcaaaaatgctctcagcctcctcgtcctcctcgactactacgatcctttaaaactccatcagctctctaaaggcacaactctcaccaccacgctttaccaaaccaccggacacgctctcgggaacctaggattcgttaacgtcaccgatctcaaaggaggcaaagtcggctttggctccgccgctcctggctccaagctcgattcctcttacaccaaatccgttaaacaaatcccttacaacatctccgttctcgaaatcaacgctccgatcatcgctcccggaatcttaaccgcacctgctccttcttccgccggagttagcaacatcaccggacttctcgagaaagccggttgcaaaaccttcgcgaatttgctcgtatcgagcggtgttattaaaacatacgaatccaccgttgaaaaaggcttgacggtttttgcaccgtccgatgaagcttttaaagctagaggtgtaccagatctgacgaatctcacacaagctgaggtggtctcgctcctagagtatcacgccctcgctgaatacaaacccaaaggatcgttaaagactaacaaagacgctatctccactttagccactaacggcgccggtaaatacgatttaacgacgtcaacttccggtgacgaggttattctccataccggcgttggtccgtcgagactcgccgacacggtggtcgatgagacacctgttgttatattcactgtggataatgtgctccttcccgctgagcttttcggaaaatcttcatcgccggcgccggcaccggagccagtgagtgcaccgacaccgaccccggctaagtcaccgtctccagtggaagcaccttctccaaccgcagcttctccgccagcaccaccggtggatgaatcttcaccggaaggagctccgtcagactcgccgacaagttcagagaacagtaatgcgaaaaacgcggcgtttcacgttaacgctcctgcgttgttcaccgcattggtcactattgccgccacatctctcttgttataaacaaaaccttaattacgaagactgccattgtcttccttcgacgagtttttatttctttgtgatgctgtttgttaaaaactgggaattagagtgttacggtttacgtttaatcttattagttaatttagaattggatgattgttattgttttgttttggtgtgttagtttgtagtagtgtcgaaatattgagatcttctaattgactagtttccattttgtggtttgtgttctcatgcgttcatatttctctctaaatttcaaattaattaataaagctaaaaaacgtcgtaagattaaatgcgtggattaatggacc

SEQ ID NO: 23566 - DNA, 383 bp, Arabidopsis thaliana landsberg
atacccatgtatctatctacaccttataggcggttgtgccattggctgacagcaccttttatcttgttaccagcaaaaaatacttcactatccagaaggcgaggtatgaaggtccttacccacaatgagccgcaaaccaagcctgtatccaccttgtgccacctatgatctgactacccgacgatccctgacagatcttgacttgtatcttactaaggatactgaacttacacgctattgttgagacagagccctagacagccctctatctatttacatattgagctaccttatacagcaacatccacatacgcatggccaccgcgaaagatttacctgcctatgggtactgtattgctgacataaccggtcatgacgctagt

SEQ ID NO: 23567 - DNA, 611 bp, Arabidopsis thaliana landsberg
  unsure (1)..(611): unsure at all n locations
attcacgggttagttattgctaaaacctggctttactaataataaatacctgaccaactaaaagcaactgcttgagcctaaccccacataaagctagtccacttcagccaaacgggacatttgctgagtacgttgatgtgtactcatccttgctttaccaccaaacaccaggttgtccacattgcaaccactgctcaggagaagacgaagtcatggaaggagacttccaggagttccaagactacgacgaattctaggtgtgggttggcggcaacccccagttagctgcctgtgaagccttatctttactgcgtttcgctagcactttgatttaactgttaagttgatgactatgtggatgtctatgactctgtgatgtaataagttaatactcttttatgttataattcgagcactgtgcgatgatgttcatttatgtaatcgctgtgtacgtgaattctgatcctggcacgtacatagttcgcattcggtttgccttccaaaaccgggtgtgacataagtggtatnnnnnnnnnnnnnnnnnnnnnnnnctgacctagagtagcactggtcgactaaggctattgacttcctctcacttgactctgatg

SEQ ID NO: 23568 - DNA, 497 bp, Arabidopsis thaliana landsberg
agaatggaagagaaaaagaaaaggaaagaggagaaggaggagatttcatgtcgatctgtttcgtcttcaagacaaattgcttgatcgagaagctaccaccgggctggtcagatttcaagaattaccttaacttcaaacgtaaggcaatgacttttgatgatctcgtctgaaggttgatgattgaaggcaacaatcgtggggctcacgcgggtgctcagaatcaagggcatgatgttaatgtagctgagcataaggccaagctgaaaggcaagggaaaagggttctctaatcctcataagaacttgaaggtttcatcgacaacaaactttaagaagagcaatcctaagcggaagttcaaaggaaagtgtcatcattgtggcaagattggacacaaggctgatgtttgcaagagcaaagccaaagatgtcaagagccaggcaaacctaactgaagaggatatggttgcagtggtcactgaatgtaacatggtggacgac

SEQ ID NO: 23569 - DNA, 939 bp, Arabidopsis thaliana landsberg
agaagcccagtctcttcaccacaaatgtacgcaccagcaccaattttgatatttacttcaaaatcataaccagaaccgcatgcaggcttccccaagagaccagctgcatacgcttctcttctagccttctgtagattcaaacgctcattcacatattcacccctgatgtaaatatacgcagcactagctctcattccaacaccagcaatcaaacacccttccaacaatttgtgagggtcatgacgcatgatctccctatctttacaagttccaggctcactctcatcagcattgacaaccaaataggagggacggccatcagaaactttaggcataaaggaccacttaagaccagaagggaaaccagcaccaccacgtgcacgaagtccagatttgttcatttcattaactatccagtctgcccccttgatcaccaaatccttggtcctataccagtcacctctcttcatcgcgcctttcaggaaagggtcatgcagaccatagaggttggtgaaaatgcgatcctcatctttgaggccaccaaagtgagtcttctctggagggggtgggggaggcggaggctgtggtgtgcttgacgtagtggcggcctgggtgctaagtgatctactagcaggacaaaggccagcaccattgagagaacgagcaggctgtgcccttgataaagaatgagtgtactcaattgcagcctgaaagaatgttaaaagtgaggggcatgccaacgaatcatagtagtctgggaaataacatattgttaggaaaaggtgcttttacactattcataaattgatatattcatagttagcttactgcagtgactatcagaaattcagaagcaaagggtgaaagattcattcccagtgagtaaagcggtactgacatttcattttcatcgataggatcacataccatgatcacata

SEQ ID NO: 23570 - DNA, 693 bp, Arabidopsis thaliana landsberg
ggggaatctcttagtgaatgctaattgtgatctaaagatttgtgatttcgggcttgcgagaacttatgaacagtttatgacagagtatgtggtcactcgttggtaccgagcacctgagcttcttctctgttgtgataactacggaacctccattgatgtttggtcggtaggatgcatattcgcagagattcttggaagaaaaccgatattcccgggaacagaatgtctcaaccaactaaagctaatcataaatgttgttggtagccaacaagactgggatctccagttcatagataaccagaaagctaggagatttataaagtatcttcctttctcaaagggtactcacttttctcatatttacccgcacgcaaatccgctggcgatagatttgttacagaggatgcttgtgtttgatccaaccaagagaatatcggtcagcgatgcgcttttacacccctacatggagggactgttggaaccggaatgtaacccgtcggaaaatgttccggtcagtagtttggagatagatgagaacatggaaggagatatgatcagggagatgatgtgggaagagatgcttcattacctcccccgagcttaaatcaatattttgtaaaatcatctctctaacacttgtttataactttagttggtggtaacttgtattcggcttccatgtttctttgatac

SEQ ID NO: 23571 - DNA, 1338 bp, Arabidopsis thaliana landsberg
tagtaaacattttctgtaaaaagttgggttgccggaaaaacaattgagctctgtgtttttttttagtcgtgtagaggaggaattttggagttgggtcgacggaaattgtttcttttagggttgtgaaaacctctatttcaaataaagggtttaaatataggaaaatatatcagaattttgtaaatatattaagacatatatttttaattgttttcaattttcaaaaaataaagtataaattgggttaaaaaatcttcgaaaacctatataactattttgtagatatcctttaatgatccacgattaatatgattctcaaatccttccatattttaacataccaaaaccgttaatgctacgtcaattcaagaataaagtgggtctttaaatcttccaagaaaaaacaaaacatctatacatacactattttctactctctataaatactttagtaacaaatactcaaacaagcattttccttcatatcacttaaaattttattgtctctcatgaatccctctaatctaaatttagctacttatgttgcatttaacgatttgcaacttggaactcacgtccaccatgttattggccgtatggttagaatgtgggaagttcatactgaaatacgtactgtcaacgaccgtgatggattctttgaaaactcactcctactgcttgatgagatggtataattgtccaatgactaacatatcaatgtattgttctaacataaatctcatatcacaccatcatatatctatcttctcatctttctaaacagaattccttaattcgttgcttcattccttcatcacttgttgaaaaatacactagtattttttaagaaggaatgatcttacaaaaataaatacaatagtattccttcatcattccttcactatgttgcactggtaatacaatagccttcgtggcgtcacagtaatttatacttgcattatccacacacattacaactcatatttaaactataaaaaataaagttaatgtgggaacaactatgcactgtactattgtcaaaaaaattacaccatttgatataggttcttaaaaacaaacaattaacttacgtcataactaaaaagttacctgttagtattgtaatatcagaagtaattataaaaaatgaccaaaaaaaaactcagacacattgtatccacaattaaaaaaaaaatgtattgttttgttagtatggagtgtaacacaaattatatgtaaaatatgtattcgatcagcacgtcacgcttatttaggagcaaaggttacctaaattagaattgataacagtaaaacaatattcaagttattagcgggaga

SEQ ID NO: 23572 - DNA, 2027 bp, Arabidopsis thaliana landsberg
gtgctgggtcttctaattggtctgaccaagaatggaacagctcacttaactcagcctttagaaccattttacgcacacgcagctacaacacaagagataataaaacccattagtatgtttaactcaaccatagtataactcaagcgtcacatcatataactcagccattacagaatataactcagccgtcacataacataactcagccattacagaacataactcaaccgtcacataacatatttgccataaaagagaaaataactcagccttcacagatcataactcagccgtcacataacatacttgacaaaaaaacagaacattaactcagtgataagagagcacaactcagccataacataaatatttgataaaaaacagaacataactcagtcaataatcataacagagccaaaaccgtacctcaccaccattcgctttgatatcttcagcaatggccgattctatttgttgcacgagtacggctgccaccccatctaagcaacggaatctcatccgctttaactatgttcccaaaacgctcgccgatggtgatgattgaatcatacgcccaagcctgcaacacgaaagtcataccactgacggtgtacgtcttgccaataggcctcagcaactttatagaaacgacaagggcttcatatgctgctcgaccccatggataagtcttcatggcttcgtcgtcgaaaactcttttggcactctcaaatggtatcctagagttagtatgcaagccaaaaagtccaatggatagaagaatcaataacccaaaccatctacgcttttcaggaggccaagctctaaacgttactaagccctgcctaagttcatctagattaggaccttcaccggttggcacacgcaattcactgaagaacgctttgtagtcagcttcaggctcaaacttttctgtaggcagttgatctatatttaaacccgtgatatgatgaaattcgttcaatccaaaccggatgggtttaccagccacgatacaccaaagcaccttcttcagtattctcagctgtctgcatagtagataatgtacggtcttaccagaccatagaaaatgactatcaacaagcttagcaattaatccaagctctgtctctttcagttctgcccatatttcttttcctattgattctctaattgcagggaactctcccagctttatattatgattaatgcctttaccctttagattagaatccccctcttggtaaagtcttggagggtactcccttgtttggtcttcagacatctgtataaccataaatcagccgtaagcattccataactcagtcataacataaaacaaactcatccacagataccataactcaggcaaaagataaatctaactcagccatagataacataactccgtcataacataaacccatctcagccacacataacataactcaggcataagataaatctctcagccatattttaacagaaactcagtcaaaccataacataacaacagctcagttaaaacataaaccagactcagctatatcaaaacagaaactcagccataacataaacaaactcagccgtcatataacagaaactcagacatcgatgtaaggttaaaccataactcagtcacagcataaaacaaactcagagacggatgaattgataaatcataaatcagtcggcaaacaaacagtaactcagccgtcaaatcaaatagatctaacaaatcggccaccatatgtcaatcaacgacgacgttaaaaaccagctttaagcatcattaaaaaccatcgttaagcatcggaaaacgatttcagtgacgggaatcacttgtgattgaacttagatgtcgaattcttacttaacggaaatatactcaccagaacttagatgtcggatgtgacttcacgataccagaaatgcgactcctgcgtcttattttcggccggaatagacgagagagaaagaggaagaaagaggaacagactagagaaggagaacgatttcgttccatacga

SEQ ID NO: 23573 - DNA, 1063 bp, Arabidopsis thaliana landsberg
ttgtggaatgaagcctctatctcaagaacattcttctcacttgattatattttcaaccaaggagttagaaggctgaaggcccattaacaagtagttttgtttttctggattaaggatcaaaacaggtaaagtaatctcctttcatgtagtccatagaactcgataccatgatctgatcacgaacttcccgaaattagatgggctttgtatgtttaacgtgtgtagtcggttaggtttagctgcacattctcgtctatatatactttgtacacaagtttgttatcaagaggaagaatatattccttctctatgttcttcatttgccatacttctttaaatgaagctgatcaaaaagtggtttctgaaatgaaatgctaaaagaagataaaaaaaaaagataatcagaaaaatgaatatttatagaattacatgtattaaatacacaaacagcccacgggaacggcccagtacttgagatagtttggcaaagcaaagaacaaacaaattttgttttgtcccacatcgagcaaaaccgaaactagaagtcgaaagcatcatatatataaagcatctggtgattacctttcttaacccttggagccgtgtggtgagcacaaagcgaactattctttcgccttttactaaagaataccgtgtgctctccacttcaaacggcatacacctatttttggaggagtaacttcttctgaagtttgctccattaatcttacagtttaatcttaaacacttacttgcttaatacttaataggttgtttgatactattttttaaattgtcctagaattagagttttgtctaaaattggtttaaccactggattgctatatcaaaaacatgattttcaacgaattgacaagcataagcttactttggagctttacgttcacaccaaaattttgaagttgaagctactctcctaaacacattttataaatatcacagaattaaagctttgagcatgttaagaaagaagataatacttgtgactttgctaaacaaaaccattacttgtacccattgtgatggaatctctgatgattga

SEQ ID NO: 23574 - DNA, 508 bp, Arabidopsis thaliana landsberg
ctcgcataactcctactgaagtgcatcgttaatggaaagaatccaccttcccaatcagtttgcagcagagagacatgtaaaaattagctatgaacaataaagattgatattgctcttggagtaacactcttactagccatgtcaaagtaagatacacagcagtgttcagattcaatgtcgtattcaagaccaaaatcatacgcaccaataaaaaacatcacatacaagataaacaaggaagcatacaatcctatctccagaccaaaaccaggacaatctagccgacctattataagaagaaaacatactttaacaaaccaatgaacctaacatttgaacaagtgccaaagcatataatttacttaccctgagggagcttgctttgatcataaactctaatgtctctgttctgataagactgatcacgaaaaaccagctgagagtttcgagagtgcctgtcaaatctcattcgtttctttcgttcttcacgctcctataacaccaaatt

SEQ ID NO: 23575 - DNA, 1201 bp, Arabidopsis thaliana landsberg
tttgattcacgggcagaagcaaagagccacgtgttcaacgcgctctgagctcgccagagcacgcccgcacgcgcccccgcgtgccccgcgtcgcgccaaaggccagctgacgccatggcccgcgcccgcgcctatgtaacgcccagtgacctcgaccgtacccctccgcacatgctcaacctcaccggagctcaaactcactgtcggttgctcgtgcatggcgtgtccgcggccacctgagcccctgccgccgtagaccggccagccaagcctttcccaaccccgtccgaccctcggagacgactgagcacacctcggtgaagctccctgagcgaggaatcgaagtctgcttcaccggagaggccagtccatggtcgccggactccctccgaccgccggcgagcgtagaccgggtaagccactgcgccatttttcgattcaatacacagatagcttctacatcaccccgtgaagctcaccgtgcccttggattgaaccagttcgctgtagtttggccggtacactcgccgccgacgagcacacccgcctgcgctcgtagaccgggcgattccggccatccccgacgtcaagccgtacctcgacgtgaccgccagagtctccccgagccaaccctacccttcaccggacctccctcgccgccggtaagccgcgccacccttttctttcccgcggttactgtttgcatagggggaaggactgcgggtgagagggagagaaggtagggggttttgtgaaatgacagagacacaggggaatagtggcgcgagggtagatttgcgcaagttgatttagtttaaacccagggacctcggtgtaaactgtttttccagaaaacctttattaaatctgtttttaaattggacagaaactttgaaaatgcataacttctgtttaattcatccaaatttggtcaaaccaattttgtcagactctaaataatgtaacctacttaagaaaaatataaaaccccctatgtactatagaaaactttaaagctctgatttaattataattttgaccaaaagcttaataacagggccaaaaattagttgcactatttgactggggttagaaaatttttgagaagtttgtatctacctactaaaccaaataaaaatgttaaacctctctgtccactccattaagttagtttttaccccttattctataatatgcttag

SEQ ID NO: 23576 - DNA, 804 bp, Arabidopsis thaliana landsberg
tattacattgacagtaaacataactttttatttgtgtaatgtggtctaacatttacttgtggcaggtatccagatgatatctatgaccgtgtatggcatgcatccttcctggaaaataattgggcacaagtatcgacgactttgggtgtaaacgttactgataattatgatttatcacaagatgtaatggcaacgggcgcaacacctctaaacgatagtgagacattgaacattacatggaacgtagagcctcctactacaaaggtttactcctacatgcactttgcagagcttgagacactaagggccaacgatacaagggaattcaatgtgatgctgaatggaaatgacttgtttggaccttacagtccaataccgctaaagaccgaaacagaaaccaacttaaaaccagaggaatgcgaagatggggcatgtattttgcagcttgtgaagacgtcaaaatcaactcttccgcctttacttaatgctatagaggctttcaccgtgattgatttcctacaagtggagacagatgaagatgacggtatgtcaatttgacattcttgatcttatttcaaaatgtttagcgtgttgtgtgttgattcttgatatcatcaagctttacaatcgtagctgctgctatcaagaatgttcaaaatgcttatggattgattaatagaagcagttggcaaggagatccatgtgtccccaaacagtattcgtgggacggtctaaagtgcagttactcagatagtactccaccaataattaatttcttgtaagatgaatcattcaatagatttt

SEQ ID NO: 23577 - DNA, 541 bp, Arabidopsis thaliana landsberg
  unsure (1)..(541): unsure at all n locations
ctacgcaaacgacacgccttagtagtcgctaattagcgactaatctattactaatttggctgtttgatattatcaaacgagacgccttggtaatcgccaaagttagtcgtatattagtcgctaaacagcgactacatgtacgacccgccgtagtagtcgcaaaaaagcgactattttacgactattacggcgtgtcattaaccatagtcgcaaaatagacgtaagtttcaattaaaaagcacatgtttagcgttttgtaagttggtgtaccgattttagacgaatacttaatatagtcgcgttttagtcacttaaaaattgtctatataatgaaaatttcacgtacacaaaattcattcacaacacagacaatatatctaaaagaaaaacgtttttggaaaaaaaacgaaaaaaataaatattagttttattattggtcttataatggcggaaactataatatacaatagtggtgggtntatcgagagtggatgtcaagaggtttgatgaagtgacagaaaattttcagcagaaatgtcgt

SEQ ID NO: 23578 - DNA, 526 bp, Arabidopsis thaliana landsberg
  unsure (1)..(526): unsure at all n locations
tctctcgtctttccccaccgaaatcaaagatgagcgacctagaggattcccagaacaagagcaatcatagttacggcgacgacgagagttcgtcagagacgaggtcggcggcgtcaccgccgaagtacaaaggcgagtcctaaccctaggcggaatgggtccaattcgtcagacgtcaaccagagccgacaagccgaagaagaagaaagctcccaagcaaaagggaggcacgccgatgacgaacaacgacctggtcgacctccgaaggagatgccaggttccagtgggggtgactatgatactcccaaggccgtcgttgcatcctgagaacgttctggccgggtggtgcagcgcttacgccaatttctttgagaaatgtggcctatttttccggtttccggtgtgcatccacgagatgctcaattgcctcggccttgcctttcctcagatgtgcccgnnnnnnnnnnnnnnnnnnnnnnnnnnnnnnnnngggcccgggaaataacagagaattcggctgccatga

SEQ ID NO: 23579 - DNA, 708 bp, Arabidopsis thaliana landsberg
aatcgtataaaaaagaaggtaagaaaaaaaaaggattagcttgtaaaattaagatccatcacctgctcaggagcacctttactgactctgtgccagttaccactgccgtcaatgtaagtcaaagcagttctcttatccacagggttgaatggaaggaagtgaacttccctgattccagctctagcctgtgaaaatcccaatcaaacatcagaacatgtttcttggacgctcagtaaaactacaaataacatgtgaaccaaaaagggttatacctcctttggatcagcaagcatcccaaccatggctgcatcaatggcatcctggttctcaaccctggaagccatagctgcaaataataggacttgatctttctccacacccttgcagaaaacctcgaccaagtttttgtccacactcaatttgttgagggttagtgtcccggttttgtcactgcacaggacatccattcctgccatctcttcaatggcagtcatacgcttggtgatggcaccttgctgagacaacctgtgagacccaatagccatggtcacggacaagactgtaggcatagcaatggggataccaccgatcaagaggaccaaaaggttgtcaattccatctctgtactttcggcgttggatcgggtacatgacgatgatctcaatcaccatacccgatagcatagaacagatacagaagttcccaatg

SEQ ID NO: 23580 - DNA, 662 bp, Arabidopsis thaliana landsberg
ctcctgtgtccttacctctttactcgggaaataataattttttttcctcactcattagacctattaattggatgaactcaactcttacatgtagtatgctcatatatcctcatcattacttcttttgactttattttgattcatatatttttgcacctcaaagaagacagagtaatttataatacaccaaacacaagaggaaatatagtcaatggatctaatagctcacaagtgtttaatccaactcttccaagagctgccgcaaaaaaaaaggaaatcaggttagtaacttatatactattgaatatgcaatattatcatacaaattttaaatataaaaatattatttttttatatgtcatgtgttgatatttatattttttattgcaggaaatttatccaatactaaaaagatatcatcatcacttcgagagaagaccaatgataaagcaaccaacaattatgatattgttaacaaaatatctattcgaaggctgtctgctgttaaaagaatgaccagaaaaatatcaaacgcttcacgttaagtataattttttttttactagatacaatacatattagtttaatattcttatttatctctatttggacgttgactctctcagtaggatcaccagacttcttaactcctaatcaaacta

SEQ ID NO: 23581 - DNA, 469 bp, Arabidopsis thaliana landsberg
ccatgtccgatcgattagtatagttggaggaagacgcttccagccttatgattgtttttactatgtcttagatattaatggggctgggtagctgacttggctttattccaccacttgatacaaaattgctgtctgtttgttccttgaacaggaaaaatttgaaagataaaaagcattctgtcacagacccacttacacaaacgctacaaacaatgtacaaagccgggtgcttgaatcttgttgacgttatacaaggcaagagccagtttatcttggattttattttatgaagctctactgatttgcttatgattatcttcttttagatggcgaccaattttgcttatggcgtggggcgttcatcactttccaatcaactttactttcttttgcagatgtgaagacagcattgaaaaacacagtttcacttgtgcgttcttcaactttgacctgggttgacattctgact

SEQ ID NO: 23582 - DNA, 833 bp, Arabidopsis thaliana landsberg
aacagtagaatgtaagaaaactactttgatcagctgttgacgttaggccatgacatgcttcctaaagtttttgttcagccacagtctactgatgcaatgaataaattcctgaagatttttgggtttggatatgatgtcattcatgcatgcaagaatgattgtatcttctatcgaaaacagtttgataatatggaaagttgtcctaggtgtgggtttcaagatgggaaacagataagaataatggtgaggtaaagaaggggattccagcgaaggtactaagatattttccaatcaagaacagatttaggagaatgtttagatcaaataggattgtagaggaattgaactggcattctagcaatgcaagtggagatggtacaatgcggcaccctgttgactctctaatgtgggctcaagtaaaagataaatggccagattttgctatggaacaaagaaatcttcggctcggtctgtctacagatgggatgaaccctttctctattcagaacaccaagtatagtacctggccaatcttgttagtgaactacaatatagctccatctctttgtatgaaggttgagaatattatgttgactttgttgattcctggtccaacaactctgagcaacaatattgatgtgtaccttgcaccattgattgatgatttgaaagatttgtgggctgagggtattgaggtcttcgatgcttttttgaaagagatgttaacccttagagctatgttgttgtggacaatcagtgaaaatcaaacattaggctctttgtctggctataaagtgaaaggaaaacaagcgtgtaatgcagtggaaaggata

SEQ ID NO: 23583 - DNA, 921 bp, Arabidopsis thaliana landsberg
tcactctcatttctttgctttataattttcttattattatttggccatacctcagttttttatagacgtaacatgaacatcgatattatgaaatctaatgattgaccgttaaaattcattgcatcaactctttacaagcttacacttgtaacttttttattcattgtttcaggttgtcaacgtcaatcttatttccgcagtattatgtaccatcatattcttccctcaacagaaacataaacattctatcacgctgcatgataattcataagtacatcacaccaaaactagtggttaagcgacataaccaagatgaacctaagctagcaaaccacaaacttgggttttatcttctgatgtttgggcctttcctctaagcccaataaagtaatctagcatcaccaaaactgagagaacccacccacacgtttgagcatttttttttaaaaaactatttttaacagcagttattattgttttactcccgtaaaaaaaaaaataactatctccctctcacaaactctcctaacaaataatttggtaacagatctcatcggagcaacagtcatcaaagagccaatggcttcttcaggtttcagcggcgatgaaactgcccctttcttcggattcctcggtgccgccgctgcgctcgttttctcctgttagatttcagatccctctcttgtcaatttccccgaattgaatcacccaatgtttttgattcgattcgaatccgatttgatgttttcaggtatgggagcagcgtacgggacggcgaagagtggagttggagttgcgtcgatgggagtgatgagacctgaacttgttatgaaatcgattgttcctgttgtcatggctggtgtgttaggtatttatggtttgatcatcgctgttatcatcagtgctggattaaccccaagg

SEQ ID NO: 23584 - DNA, 852 bp, Arabidopsis thaliana landsberg
aagttctaccagtaattacatggtgcagggagagcagaaattgttatgtcatctctaaatgcttcatatctttgggatcactgcaaagtgttgaggttgactaagaatatgcggcttttaaacaatgatttaagtgttgatgaagctaaagaaatccaagaattttccgattggttattggctgttggtgatggaagggtcaatgagcctaatgatggtgaggtgataattgatatacctgaagaattgttgattcaagaagcagataatcctatagaagctattagtagagaaatttatggagatccaactaaactgcacgaaatcagtgatccaaaattctttcagaggagagctattctagctccgaaaaatgaggatgttaacacaataaatcagtatatgctagagcatctcgatagtaagtttacatatactatattgattatttagtgcatcgttttatgttctgtattaatcattattttgctgaagatttaaatgttacttgatttggacaggtgaagaaagaatctatctatcagctgatagtatagatccttcggattcggactcactaaaaaatcctgttatcactccagatttcttaaacagtattaaggtatcaggtatgccacaccattctttgcgtttgaaggttggggctcctgttatgttacttagaaatttagatcctaaaggtggtctttgtaatggaacaaggctacagataactagttgtgtagtcatattgtcgaacaaaggttataacaggagataggattgggcagatcgtgtatattcctctaataaacatcacaccttcagatacaaaactaccattcaagatgc

SEQ ID NO: 23585 - DNA, 457 bp, Arabidopsis thaliana landsberg
  unsure (1)..(457): unsure at all n locations
ggttgtgagaaggtaattgccattagagactggagaagctgtttgtatttattaatcccaaaaggccttccgttccataatggttgcaaggggaaatgcttatatttcctgtttgatctgtttcgttcggacaaaactcacttggaaatatgaatcttgatcccttacttggtctacttgtttcattcataggtactggacttgcttgaagatgcttgtgagtctttgctgcacggtatcataacaaaaaattgagattgatagctgaaaaatgatgtgaagcttgaaacttgctgatgttttaaatcttgttaaactgaacatattcttaagaactctttatatgattgaatgatatgaactcttttgttttatcattattattactaggactcagcaatattataaatntgtctatataatagtattttaaaacaaatcaaactcaaaatgatga

SEQ ID NO: 23586 - DNA, 637 bp, Arabidopsis thaliana landsberg
ctctacagcctcattgatgcctttgaaaggaatgggatcaacttcttcgtagacaaatacgaacagagtggcaaattcctcaaaaatctctttcttaggatccaagagtcgaagatcgcgcttgccatcttctcaaccaggtttgtactattctttcaaattattcagaagattcaagaaaattaatcatccttattttgatttcagatacacggagtcaagctggtgtttggatgagttggtgaagataaagaaacttgctgataaaaaaaaactccatgtcattccaattttctacaaggtgaaggtagaagacgttcgaaaacagacaggtgagtttggtgacaacttctggacgctggcaaaggtttcaagtggtgatcagatcaagaaatggaaagaagccttggaatgtatccccaacaagatgggtttgtcgttgggagacaataggtacttatccacttacattcactaaatcttcttcttctttttgtatagaataagttatatattcttcttttggcagttatgaagcagatttcatcaaggaagttgttaaggcggttcagtgtgttgtagcaacgattggacttgaggaacatgaagatcattttgggaaaaagaagagaaagga

SEQ ID NO: 23587 - DNA, 453 bp, Arabidopsis thaliana landsberg
  unsure (1)..(453): unsure at all n locations
tgcatgacttgaaaattgaaatctatctatgatatnnnnnnnnnnnnnnnnnnnnnnnnnnnnnnntatatatcttaacatctttcttttttggtattatttacgttacgatttttcatcgtaaatttaatttaaaattttatatatgccagtgtaaaaagaaattactcaaggtcattaataaaaataaaaataaaacgtttttccccagcggtctatcattgtaagttttattttacaaaaagaatcttctaatataatatgggctttgaaaatgtctaagtggaaggcccattaatatctcaagtccannnnnnnnnnnnnnnnnnnnnnnnnnnnnnnnnnnnnnnnnnnnnnnnnnnnnnnnnnnnnnnnnnnnnnnnnnnnnnnnnnnnnnnnnnnnnnnnnnnnnnnnnnnnnnnnnnnnnnnnnnnnnnnnnnnnnnnnnnnnnt

SEQ ID NO: 23588 - DNA, 687 bp, Arabidopsis thaliana landsberg
agaaggagcatattgtgggttggtacagcacaggtcctaaacttcgagagaatgatttggatgttcacgctttattcaatgtgtaagaccaaaatcagtctaaaatattagatatgatggtctaatctaatatatggtttggtggtctgtttaagttatatatgtacaaacgtttttaagcatttacaatctatctctcctctcttgctagaccttatttctgtattacttcggttttaatcttagtttctggtgttgcagctacgttccaaatccagtgttggtcattattgatgtccaacctaaagaacttggaatccctacaaaagcatactatgcggttgaggaggtgaaagaggtaaataccagccaattttctaaccattttacttgctcgactgttaagttgcatctgacatacttgatttactttctgcattagttatatccatatatctaattgccttgatccgaacttctctctctgcagaatgctacccagaaaagccaacaggtttttgtacacgtgcctacagaaattgcagctcatgaagttgaggaaattggtatgtctacatggggaaacaaatcctttgatagtttgatttccttatttcagagcataagaatgatgaggggaatttttttttttgtaaatgctttcgaggaaagtgaatggagtcctcc

SEQ ID NO: 23589 - DNA, 263 bp, Arabidopsis thaliana landsberg
  unsure (1)..(263): unsure at all n locations
ccagaaacncacagttaacattccngccaaagcngacacaaggctgggcactgtttattttttccttctntgccccacacccccggnagaaatttaatttttggtaactgcattctccttcttctccttatactcattaccccttatatttacttccttttatcatcattatatacaaattggaaaatatcatttttagattgtgatcttcgaaaatatattataaatgttaatagatctaaaagattatacaaagaaaaaaa

SEQ ID NO: 23590 - DNA, 603 bp, Arabidopsis thaliana landsberg
ccgtggaattatcggaaagtatcgtaataccttctgtgggactcctttcttagcttctccagtttgcatgttactcttccaccgtgacgcattgcatttaggacaattttctagattcttgtacctctttctaaatagacagcagtcgtttacacatgcatgaatcttttcatatcccttatcaaagctctttagaaatttcttgacttcatacaatgatgtatgaagcacattgtctgcgggcaacatctctggcaatgttccaaggagttcaacgaaactcttatcggaccaaccatttttggtcttgatcctaaaaagtcactatagcagacagcttgctgtggtttaaacagctaggatatagagctgtttcagcatctgctaactttgccagaaactcatcttctcttatgtcctcaacctctgcaatctcacctaagtcagcatcaaaaccctgagctgcttggtatagcccaaaatttcagcattcaacgactgaagttggctcacagtcagcactgagtcacgtcccatgatgatacaatcagtctcacttgtaagctcatcatcccttcttaaagatgatcacacatcgtgctg

SEQ ID NO: 23591 - DNA, 992 bp, Arabidopsis thaliana landsberg
tctgccgtttagattttatcgattgttaatatcaacgtttcactgcttctaaacgataatttattcatgaaactattttcccattctgatcgatcttgttttgagattttaatttgttcgattgattgttggttggtggatctatatacgagtgaacttgttgatttgcgtatttaagatgtatgtcgatttgaattgtgattgggtaattctggagtagcataacaaatccagtgttccctttttctaagggtaattctcggattgtttgctttatatctcttgaaattgccgatttgattgaatttagctcgcttagctcagatgatagagcaccacaatttttgtggtagaaatcggtttgactccgatagcggctttttactatgattgttttgtgttaaagatgattttcataatggttatatatgtctactgtttttattgattcaatatttgattgttcttttttttgcagatttgttgacagtctctaaccatgggtaaagagaagtttcacatcaacattgtggtcattggccacgtcgattctggaaagtcgaccaccactgggcacttgatctacaagttgggtggtattgacaagcgtgtcattgagaggttcgagaaggaggctgctgagatgaacaagaggtccttcaagtacgcatgggttttggacaaacttaaggctgagcgtgagcgtggtatcaccattgacattgctctctggaagttcgagaccaccaagtactactgcactgtcattgatgctcctggtcatcgtgatttcatcaagaacatgatcactggtacctcccaggctgattgtgctgtccttatcattgactccaccactggtggttttgaggctggtatctccaaggatggtcagacccgtgagcacgctctacttgctttcacccttggtgtcaagcagatgatctgctgttgtaacaaggtaacaatatctttcatctgtatgtgactac

SEQ ID NO: 23592 - DNA, 889 bp, Arabidopsis thaliana landsberg
tttgtttgtgggacggggttttgtggatgtttttaaatttaagaacaaccatatgtatgagttcaaacccatatgaatttattaatcagtgaaccaatatttgtctcttagctgacaccaaaccacgtcaatatcttagcacatgttgcataattatatatggatttgtaaatcaatgaaccaataacgttacctaccacacagaaggcctgggcacgaaacgaatatccaaaaaaattataatatttgttattcgattcgttttaaacgaatacttgattttgtgatttgctttgcttcgaaaatttccggatatccggaatttcgaatatccggaactttttgtgatatttgcggatatccgctttgatacatttaaatattaaaaaatatatatatactatataaccatatcagatattcaaaatttttatttaacatgctttcaaaataagttctaaataccaaacataactgttgttggtatcaccggtcaacaaaatgttatcaaactaattccaaaaactaaaacccgataatttttatgccattgatcaaaacataacatgaaaaaaaatgatcaaacaaacatcttaacataaaaacataaaatggcaacaatacataaactatttatgatatctatatatagatataactatattttctaatatttataaaaaaatacggatcgaagcggatattcgactttttaaaaaacaatatttgttatttgatttggtttttacaaatactacattttcctatttgctttgctccaaaattttacggatattcggatttttcgaatcaaatcaaatcgaataccgaatcaaagcaaatcgaacgaatattttgcccagccctcatcattgttgttacaaaaaat

SEQ ID NO: 23593 - DNA, 650 bp, Arabidopsis thaliana landsberg
gttgcttttgattgtgtgacttattatagaacgtttttggactgtttcagacgcaaatagagtctttcctggttttagagttgttgttagaatcagcttgttaaggtgagtgcgtaaccatgagcttatattagcgattgggttgtatgatttgttctgtgtgatgatatgtaggtgtggtgaatgtgttttgggatgaattgttcaatgactggtttgtttatgttgtatttgtgattataccccttttatttccttgtgtatataactcgtagattggaggatcgcttcgctaagtatttgtgataattcttaaagtcggtttaacaagtgacgttaataaaccgacgtcttccatcttattttttgtagtgatatcctctctggacaaacgaagagatgaatcatcataatgaatactccggaaacttgacgaagccgtcggagagctcattgttgataagtcgctcgggaatgccataaactagaccactgtcgaagacgacattctgattcaattccttgataggtttgtgaattatttacgatcaaatttttttcttttagtttcatgagaatcaaacctaggaccaacgtgatcttggataatagtggtaaatctcccaggtgaaggtgctgagttggaggct

SEQ ID NO: 23594 - DNA, 600 bp, Arabidopsis thaliana landsberg
tgctctacaggtgttttatattagaagatactagatacaaatgttggatactgcggctacttctttatgccaagcaatgttgtggctagcatgatggtatgaacaagtgaaatttactaagagtgggctacatacctcatgactcaatgacaaaactatgatcctagatcacaaaaaatcgatatcaagaagaaaacactttatacaccagaggaactgaacctttcaacactcaagtgttttaacaagcaagacgtatcaaacaacaaccgtggttatattccaaggttacttatttttttccaaatgaaaagcaatagagtggttaaccatgatggtgtgaacaagtgaaaacaactaaaagtggctacataactaatgacttactgataaatttcgatatcacagtgaagaaacaaagactgaatatgtgttccttactctttctaatgattagcaaacaatcaaacattattgatgcagtaagaaactaacttggaaacagtgcattcctcgaggtgtatcacattcttctgacttcccatctttgatcagtcactgaaaagaagcaatgcccaaataaagttttacccgaaatat

SEQ ID NO: 23595 - DNA, 640 bp, Arabidopsis thaliana landsberg
  unsure (1)..(640): unsure at all n locations
tgacatcgttaagggacctataatccacgcacatcctttatgatccatcttttttctgcacaaatagaactagcgctcccccaaggtgaagaattcggacgaatgtactcagcctcttgtaattccgttaattgcttcttaagctcctttagttcttctacagacatcctatatggtcgtttagaaataggagcagtcctaggtaagagatcaatgaccagctcaacttccatatctggtggcatccctaataactcctctggaaagacatctggaaaatctctaattgcatggatgttgtcacctacaaacttctcatctactaagaatgtcgctaatctgatggtggtagttactgcaacttcaacttcaaatccttgtcctgtggaactggtgagttctatggttcccttagcacagtgtatatactgcatttgccattcttaaccatgacataccaaggatcatgtctgtagtgctctcttctaacactataggggtagccatctgggttagaacacagggtaagaaggaaagaatggtagacaaggcatgtaattacgagaaatgttactgcagggggtttattagctaagtagattagtgtgttaccactanagctaatacattaccttatggt

SEQ ID NO: 23596 - DNA, 613 bp, Arabidopsis thaliana landsberg
  unsure (1)..(613): unsure at all n locations
cggagttctcctatcgttctcatcctaaaccattgctggggaatcttccaactaatgcagaacgttatagtttgtttagccaatccgattacgaattatcttgtctattattcatgtgaagtgtgccaaattaagcctcctcgatttttctctttccataagcgactttatcccaaaactaatggtatagttgtcaatggcatagtactatagacatcttatcgtggtcacgtcatacaaaaaatatacgtgataagttatataatgttagagaactattttaatatattttctttcatgtagaatattcaaactataagagcaaatcgagtcacacttcgaattagcaaaaaataccaaaattgagctaagaattaacataaggtgatattccttaactaaatttaataggttgctatacgattcacttaagtttaattacacatgacactacatgattttctcgacctttgactaaaacacaaacattttcattngacgttttcacaaattaatgttaaataaattatagggttattttaaacatcaactaggatttaatccgtggtacaccacggngcaaatatattcatatatatatatatatataata

SEQ ID NO: 23597 - DNA, 1031 bp, Arabidopsis thaliana landsberg
gccctttgcatggaatcagaactgatgtgagcgaaaaatcgcccagtgaaactataaacccgaatatcatgttctcaacacggtctaatcccgcacagaataatgttcatgtgctggtactaacagacatagtttccattccattaattttatataaagtaaagcacatcagaacttatgctaacaaaatacataattaaatcatcagaacagaataatatcatcagacagaataataacatcagaacagaacgaccaggtatccagcaatgcatgtcagaatggtacaatcccagcattggttgatccaaaccatatacaaacataatatttacataataaactcgatagggatggtggcccctatcaaggtgataaagaagtatggtccacgacattaaccgacctcaataccactaacagactaacagaatatggaatacatctgttggcgatgccggccgccacagattgcctaatagagctagctaaatcagagtcgcatgctgatactggtcttagcagaataacatatttcgtcatgagaatcatattcagaataatcaaactgaaacaaataatcaattttcagaatttacatgttcaaataatccaaatgttctttctattttattctcaaatattatacaaatgtacatcggacttaacaaaataacatatcttattattataatcataaccaaattaattatgaaagcaagcaaatcaattttcagaatataaaaatatttcatttattctttttatcatactcctaaaatattatacaaatgtataatacctaataagggagttagaattcatttgaaaaatattttcagattgatggacggttaggagcaattctacccacgctccaaatactcaattaattctcctaaattcagccgtagattatttaattacggcccatataccattagaaagattaaatccaggtccatcttattcatggatcaggccttcccaaaccgatataacaaaaccgaaccgggtccaaattccatcgg

SEQ ID NO: 23598 - DNA, 568 bp, Arabidopsis thaliana landsberg
cgtcatagatgaagatacacaggtattataaacgttcatgcatactaacttaagtcctaaatgacttttcattttattttatttttgaaaattaaacgaacttctaatttgcacattaagtgtttaatccgtatctatttctgtatacattaacatgtgatgataatgatgatgagttgatgatgatatatgatgatccatgaaggtgtatatagtctacatgggttcactttcgtctcgcgcggactacataccaacgtccgatcacatgagtattcttcaacaggtcacaggagaaaggtgtgatttaatttcttcatttctctaatcatgattagttatagtcagttaaatttatttgttatgaagttttgataagtgattttatttttcagttcgatcgaaggtcgcttggtgagaagttacaagaggagtttcaacggcttcgcagccaggctcactgagtcagaacgtacattaattgccggtgagtgttcttcgatcgtgacacaataatttataggttaaacaatcaaaagccttttgtgttttctaaaatggagggagt

SEQ ID NO: 23599 - DNA, 613 bp, Arabidopsis thaliana landsberg
cctttttcttgctaatattaagcttttggtttaaactgtaattaaatcaggaccttacatttttctatagtacttatggggttttatatttttcttagacaggttacattatttagagtctggcaaaattagtttgaccaaatttggataaaccaaacagaagttatgggtttttaaagtttctgtttgaatttaaatcaggttttaattaagtttttctggaaaaacagtttgcgccgaggtccctgggtttaaaccgaatcaaacctcgcagatctacccttacgccactattcacttgagtctctgacttttcacttaaccccctggatttctctccctctcacccgcagtccttcccttaactgaaacagtagccgcgggaaagaaaagggtgacgcggcttactggcggcgagggaggtccggcgaggtggtcagcgatgttcaggaggtcgcgacggtcacgtcgatgtgcgggtcggcgtcagaggtggtcggagctcccctggccacgaacacaggcggcggcgatcgacggcggcgcctgctccggccaaaccacggcgggagagttcaattaatgggcacgaggagcttcacggtatgacaca

SEQ ID NO: 23600 - DNA, 555 bp, Arabidopsis thaliana landsberg
accgaaaccagccactcggaaaatatctccaacatagtgcgttttttttcgccgcctctggttccatctcgcccataactttctttgcaaggcattcaattagaatctgcaacgtttaatgatacaaatactattgagatgataatataccttaaataaaagagataaatagacaacgtgacatattttactttgcttgttgtttccttgacgtcaagggagccattcctagctccttcctccatgtgtgtgcgagtcaagagatcaatgttttccattatcctcaacttcaaactttgtgaacccaacatctggacagtcaagttccggacatgtttatgtgactctgtgctctgtaaaaacaagttgttgtcttctacaaatagccgtgctatgctctttgtgataccaggagtacgatttgtctttgccatctccatattcaattcattatccattgagattataactttgcctccgaataagcttgtccgaaaaaccggtccatgtctattttattaccaaccaataaaaaaacaacttacctaagtagta

SEQ ID NO: 23601 - DNA, 1346 bp, Arabidopsis thaliana landsberg
tatgttcaaaaaccttctatactcatttccatacgtataccatggcaattcaactattctgtttcactttttggtactctttttctctcctaaacttattcgttttcaaatcattttttttattctacataagtttacttagagaattttgatatgggtcaaattgccaaaagatcctttctcaaataagaaatcgttgtagcactttagagtcaaattctacaatagatttatatgttgtttgaattaaggtaaaacagaaaagttgtaaaataagacaaaaaaaaacaatttaaattgaagtaaattcagatggatgaagcgttaggcttaaggaagtgctgagaatatatcataattacagatttagcaatattgttaggaattataaggaaccgttctagaactcttattaaaaaaaaactataatcaagtctgtatggactatctatgtctaataattagaattccaattatcgtctctaaattccttatatcaaacaagcattaacgtttaggttcaatatgtttaacaaaaagtatctaaaccactattgtatgagaatagctacttatgccacataagatgttcaaataataagtgcacctttatgtcaaatttattattctaagatcatcttttagttagctactctaaaataagcattaagaacaatcaaacgttactaaagagaatgtcaagctttccaatggtgaacttaacggcattcttaacatccgtctcctcggttacatcataacggtaaagaattgctctgtctagccctatcgaaacagcgaggttttgaccaatctcttcttgtatgtcaacgatgaccactttagctccatggtccgtgaacaacttagccgcttcagctccaatcccacaagctctgcctgttataattacgatcgtgccatccaatcttctatatatatatatatattagacaagtaaatttaaaaaaaaaaaaaaaatgaatcaacgtatgaagttgtgagagatgaaacacttcccttagccccgacattgttttgttgtattcttacttttacatgtacatcactattatttgaatgtatcctttttttagggatttcaacggatatataatgttgaagataaccaagaattgtgcatttaacatttaatttacttcaacgcgcgtttctaatgctcttactaattaaatccatcaaattaacattgttgtcgttttcttaattgaatatatataatcaaatgcaatatctcaactaattgctttgatatctagcctaaggatgtacaaatctagacttttaattatagagtataattacctccaacaaaactttatata

SEQ ID NO: 23602 - DNA, 587 bp, Arabidopsis thaliana landsberg
gacatacagacgaacaaaacacaaacaaagttgtcttgttgtctaactatgagatagaagtattgttttgtttaaccttccagaacgcctcaaagagtcttggaggattatagaggaaagctacagctagtctctcagggtagtgattttgcagaatattaatagtttctctggcagatttaataggcacactagtgctcattgaccaacccgtgaagtcaataagccaagacatctgttcttgatcctctggcagattcagaatagcattctcaatgagatacaccagatgtttcatctggttctccaacgattttgtgttctacaaaagttgtcaatgaaaatggaagtttcagcttgtgacctgaagttaactcattaactaagaaaaatgatgaatagaaacctgcaagccgggtctcagtataagaaccgttcttccatgcctgtcatggaatccagctttgtaaaccttaccagtctcaccttcacctgaaacttcattctaatagaaaccaagaattataagttctggttggataggaatttttaagatttagtagcatgatgcacttaagatacacacc

SEQ ID NO: 23603 - DNA, 547 bp, Arabidopsis thaliana landsberg
tccgctaccgcgagtttagtagtcgcgggatttgtttaggaacttatgagaacattcgctctgactaaaccaacagtcggtatggcgccaagaaagggagaaatctcgtcgatgtcagctatgtggctgattccgcagctctcactggcgggtgtagcagaggcatttgcagccattggacaaatggagttttactacaagcagtttcccgagaacatgaggagtttcgctggatccatcttttacgttggaggaggagtttcgagttaccttggtagcttcttgattgcaacagttcacaggacaacacagaactcgtcagggggtaactggttagctgaggatttgaacaaaggaagattggatctcttctatttcatgatcgctggaatcttggcagttaattttgcttatttcttggtgatgtcacgatggtataggtacaaaggaagtgatgacgaagtgaccacatatgaaaccaatgaaaatatcatcaaacagcgagacaagaacgttgcctgataatcatggatttgtcatcttctgg

SEQ ID NO: 23604 - DNA, 2365 bp, Arabidopsis thaliana landsberg
tttgcgtctttagtcgagtctaggacctgtcttgcatatattctgcattctggagttgtttcaggtgctttggagctattggtgctcagaaagaggaaaaacagaacagatagtcacatttccaacaacatactcgatcaccagtagcaaagagggaagcagtcagctcagcagtccatccagacacttatactcgatcacaaaggagaggaggtagtcccaactacaattcaactcgatcgaagaggcgaccaggcagtccactttgccagttcaccagttctacttgatcgcagaggagaagaaccagtccatcctgacagttgacacacatactcgatcacagaggccaagaagcagcccagaccattctatcaaccaacctactcgaccaccacctcgacgctttgatcaatccgcacccaaccatacaacctgagcaacggaaagagaagagaagagatggcccattcgaagcccattaggaagcctgctttaggccgacactcttgatcacatcgtccatgggccgttaagtgggctcgaagcccgctttcttatccttatcgtttttagtataaataagtctctaaggattttgccttagatatccagagacttagacataatttttagagattttctgcaacttattcaacaaccgcttttcattcctgcaactttgtatttcaatttttcttctaagttattcagaatttgcttttatttgcttgttcatctttgtttcattccctttaatcttttaagtatgcaatcttcaatcgtttttatgttgttgtctttgacaatgttgtctgagtagtgattaggatttctgaggatgggatagagtagttgtggaacccctggtcaaatctgttggtaagtgtagatttatcgaatcccttctggattagttgtgtttattgcttattcctttctgatcacctgaaatcctatcccacacgtctcaggtgtttaaaagaacgttggatctactaattccagtgataatcgtctctatcccaagggattggccgtttagagcggttattggctttaacagtcggttcttattgtctgcttagttagagatcgctaatgggaattaggtcagtgtctagctatgcttgaggatttctattacgggagttaattaatctgttgttgactttgttgtctagggataccttaattgagatttgttaaccaagtgaattgattagagagaccacactattcgattaccctatccttaggagttcctcatccatttaatttctctgtttacttacctgcttgattcacttgctattgaattttagtattttttgttttcaaccattctactcgatcacacgagtctactaacagtgagactgcgtgatagagtaaactggtccatttctgcattttcaatctctgtcatcctgttgtactcgatcacagggtcccttctggcagtcgaccctgcgatcgagtatttcggtcatttctgtgactttttactgttttctgcatcaacactaggactgttagaaaccctaaaactgttattgcttggcttgacttagcaacttctgatcacatctcatgtgtttgcatcacacccatttggattgacaccctaaaattctacaacgataggatagtgttttaggattaattgacgtaaaaacctattatcaaggatacataggaggaagactaaaccgtatgaatcaaaacattgatagaagtagaaatgtttccaaatggattgattaagagacgagatacatgtaaaatcaaagtaaaagagtagctattcttgattcaagtcaaacctgtaacgaatcatgtagaattccatagatctctttgatttgagttttgatttttgatgacttgaaattcgataccaccgaaagagtttcggccagaagagacgagataaatagagaacggcgaagaaattagggttccatccactgaacgagagaagagagcgatgtttgttttatatgcgcggaagaacggtcaaatatcgtgtgaataataagaaaccagaagttttatggaaatttttggtttcagatgacgtggattagggtaaatgacgtggattggtgacatggattatgattgtttatttatttatttttcaattaaaaacaaatttaataatatttattaataaaaattaatcaaaggtgttaattgtaattacactaatgatcaaaacatatgagtaataaaaaagatatataatattctgggaataaacatacttttctatactctctgagtaattaattcataagaaaaaccaacgcccatttaaaatacacaaaccacactccaacataaatatgcaaaaggaaag

SEQ ID NO: 23605 - DNA, 818 bp, Arabidopsis thaliana landsberg
gtccataactttttcggcataaaatcataatcacaattaattccacaactaatatttaaacttataaaaaaaaatatatatcatgaggcgaaaaatatagcgtgacggatttggattgatatgaaatatagcaggactgttttagaaacacagattaaatatttatttattattttatcatcaccaaatttttaattacaatattaatataaattatataattttaatactaaactaaaaccttaaaatttaataatattatttataaaaataaaatatttgctctgtggtataccacgggttaaatcttagttgcttaataatactctgtctaaattctaatttttgttatagcaaatggaattggagtgtttttttttttataattgcttaagttcaattcattagtaaaagataaaaaaaaattgcagcgacaacaagttaacatgtggcaaaagaagcaaacagaacaaaatcttgaggatattccatgtcttgctttttatcgtttatttacggcacaatgattaattacgaatctacaaagtttggcctacgattgttaatttattagaattatcggcacttttcgatagtcgcgaggaaggaaattaaataaattattcagacctcagaagaagcagatcttgtagattcttttgatgatgacctaattgtgacaaggaaacatcatctagtagggatattaatgagaaatattcttcaaaaagaacattaatatatgtaaagtattataggtccgattgtttacaacaaggatggtaaaaatatattcaacaggtagggaagaaagaaaa

SEQ ID NO: 23606 - DNA, 1076 bp, Arabidopsis thaliana landsberg
taattgttccccacagaaaatcttaacctatcccagccgtagacaacgagccaatgagggttgtaagtttctgacagccttgacaacattgtcttaaactctggaaagaacggtgagttactttacattgttaaatcacaaatacctgtttgctcgtagcaaaaacttataaatcagttctcattcctactatttacttgcagttctgcttgagttctatgcaccatggtgtggacattgtcaaaaacttgctccaatcttggacgaagtggctttgtcattccagaacgacccaagtgtgatcatagcaaaattggtaagcctctcttttatgttctttacatgtcaaactataacttgatatactcctcctggattgacttaaccgtgtctgtgtctgtgcaggacgcaaccgcaaatgatatcccaagtgataccttcgatgtgaaaggattcccgaccatttacttcaggtcagcgagcggaaatgttgtagtgtacgaaggagacaggacaaaggaagacttcataaacttcgttgagaagaacagtgagaagaagccaacttctcatggagaagagtctaccaagagtgaggaacctaagaagaccgaggaaacggccgcaaaggacgagctgtagaaatctcatgagttttgtttcggaatttgagtaggagcgtttctcttcttcaccatatccaacagaatcttcttttttctttagcagttttacagttttatcttttttgctctcttgttcgaacccaaaattatccccattaataaaaagttaaacctaataatcatttaatctgttttatgatttgaccatagggctggttagtttggtacgtctatcatttttggtggactgttcggtaaatcgtcctgttgattttgttcgttcaccgatagagccaaactctcaaatctcaatctctgagatagaatcaacaatgtggtcaaatatataacaagtatataaatatgaaaagttcagaaaatatacaatgttgtgattaataggaaaagttgcagtaagaatatgaaaattttagttgaatatctttaaaa

SEQ ID NO: 23607 - DNA, 617 bp, Arabidopsis thaliana landsberg
  unsure (1)..(617): unsure at all n locations
cccatcgacggttttttcaaattctcaaaactctctccagaaagccgactctcttgatttttatcagttttaatttatttttattgtcattaaacaagagagcccaacaattttttgattacatcctcccgttggagatggtcttataacctttaatcaaaattcaaaacgttcattaattaccactttaccagtgaacatttacacacaaaaaagagttgtggttggcgacaggctttgaaatttgctcgggttttggtctattattagtatatcagagaaacttgtttctttgaaatacttccacctaaaatgcaactagcaagtgttggactatgtaccaatagtgagaattgctgattcacaatatggaactgaattttatttatattttttttggattttaaatttcttattatatttgnatatatatatataccaaagtccaaagaatacttaagttgctatcaatggtgtaatcatcaatggatcgcttatatgtaattgaactaagaagatcgactttattttgtttatttgccaccgcccaaatcgtatttacacatgtaaaagaaataaaaaaggaatttttaattcccttttaaaaaactaaaaaa

SEQ ID NO: 23608 - DNA, 594 bp, Arabidopsis thaliana landsberg
gtctgttttaaaaatatgtgaatcaccatatatgcagaaaacaaagttgagatattctcaaacttatgtattatatgattattcaaagcattttaaaaaataatcaaacaaagatgaaaggagaatcataaatttaaatcagaaccaaatcttctaaatatctttattattaatctagataagtcccgcctaaataggcgggtatagatataaatagaaaaatttaccaatgaaattagaaattagaaatttgaatagtaaatagtaatgcacacacttttcttaatagttaattttgtaagttttgttttaaattgtttttcaatcttacatattctatttactatatacttttaactatctattttatcaaaataaactgaactttaattgtacatacttcattttacggataatatttgaattttaaataataaccacacacttttttatatatttaatttagtatatttcttaaaccaaatttcaatcttacatattctatttttgtaatacaatttagctacctatttcatcataatagattggattttaattatatatttcatcataatagataagtgttaacaactt

SEQ ID NO: 23609 - DNA, 530 bp, Arabidopsis thaliana landsberg
atacacggcatcttgattttatcttttttcctgttggcttctttatggttatgtttttgaaacattatacaaaaccatacagatagacaggagtcaagccgtccctaactttcatagcagcagaggaagttatgagtctcgtaacagcacaaggttacatcatatctatattcgattttgtttcttgtttatctacccgcaattcagacaatagtaatactcttttctttataaccagttgctgaaaacagcgaactgaacgaggtgtggaaggacattctagacgcagatggtgatgagatatacgtaaaggttagaaaagaaaaatactctcttccttcaaatgtattttgccagtaactttcacaaaatttaaaatgattgtggtctgagaatctcgagtttgctttgagacacacaggacgttgaactgtacatgaaagagggggagaacccttcattcactgagctctcagagcgagcttggctaaggagagaagtcgccataggctacattaaagggcggaaaa

SEQ ID NO: 23610 - DNA, 809 bp, Arabidopsis thaliana landsberg
gccatgttgatcaattacataatcttataaacgtcacattgagattgtgttctgttgaattgaatgtttttggtctaattggtgatgttaattacggacgactcgcagcgcagccgccaccgtcgtgacacagcaggtgcactcctcggtccacgcacgtgagcttacacgccctcgctgtcgggacaagaccattaattaattcaaattagcaaatgcatctcttagtttggtaacggcaattgttatagtatttaaactgaaatcataaatgaaccaaaagcttagacctctcaactaaattttgcaaagagcagaaataaactctttctaaaaagcatttgtgttttttaaccaaaagcaaaaccaccgtcgtcgatgaccaggatacggaggtctccgtgtctactactcctcattatctggttcatgtgtattgccggttcggttcaggtggttcaatctcaaaaccaaaccggagccactactcatcccgacgaaggtttgtctttaatctaacacttacaaagagttcaatcaccaataatcaattggattgtatagattatagtcttatactagttattcggatccaaattgattagaaacaaaaaatacaccatgaattgtatccacaaattccaaaataataagatacttaccggttagtttctgttaataattgaccggttatattaatttgaccgttgtgtttgactgtggatacaacagcgcgagctttgaactcaattttcgcggcttggaagatccaggcgccgagagaatggaacatcagcggcgaactttgc

SEQ ID NO: 23611 - DNA, 2319 bp, Arabidopsis thaliana landsberg
tctggtgaatatctcagctggaagcagtcgaaggaagattatcgtaggcactactgtcagcctttccattttcttgatcttggtatttgctgcaattatgttgtggagatacagagcgaaacaaaatggtaagagactgagaaacttagaagctttctctctctctctctctctgttactctcttttcctctatatcgaaactgtagtaaaagacacttctatatatacacactaattagtctataatctgtcaaatcttgacgttaagcctttggttgttaaactgctacaaatcaagcaatacaacatgcacatatcttattcgtatttctgttgtctttgatactttataagatgcatggaagaatggttttgaacgacaagatgtctccggcgtcaatttctttgagatgcatacaatacgaactgccaccaataacttcagtccttcaaataaacttggtcaaggtggatttgttccagtttacaaggtatgtgaaattatgtgttagttcctcaaatggaaagtttggtgttctctagataactttctgcaactttttccagggaaagttggtagatgggaaggaaataagtgttaaacgccttgctagtagttccggtcagggtacagaggagttcatgaatgaaataacactgatctcaaaattgcaacacagaaacttggttcggcttttgggatactgcatcgacggagaagagaagctactgatctatgagttcatggtgaacaaaagtctcgatatttttatatttggtatgtcttttattccatacatctctcgttattccttttccttccatcttatgagacatttttaatgtgtcactttcactaatctgttctactttattggctagatccatgtctaaagtttgagcttgattggccaaagagatttaatatcattcaaggtattgcgcgtggacttctctatctccaccgtgactcacgcctcagagttattcaccgagacctgaaggtcagcaatattcttctggacgacagaatgaatccaaaaatatcagattttggattggctcggatgttccagggaacccaatatcaagacaacactcgcagagttgtaggaactctgtaagaatctgtccacaacaacattcttaagaaaggatttatagtatagtcttatatattgacattttagtgaaactatttgatatttgaacagaggatatatgtctcccgagtatgcatgggcaggattgttctctgagaagtctgatatctatagcttcggagttctgatgttagaaatcatcagcggaaagagaatttcacggttcatctatggtgatgaaagcaaaggccttcttgcttatgtaagtgaaacaacttactgttttaacaatctaatatttcatcaaatgcagacacttccctgtttccttttctaaaacacttcttcacattctttagacatgggattcttggtgcgagaccgggggatcaaatctacttgacagagatcttactgatacatgccaagcattcgaagttgcgagatgtgttcagattggtctgctctgtgttcaacacgaagccgtcgacagacccaacactcttcaagtactatccatgcttacttcagcaacagatcttccagtaccaaaacagccaatatttgcagtgaacacggtagttgatgaatcaccgtctaagaggttgatcactgtcaatgagatgacccattctatgatcctagggcggtaagagattatgtgatgaaacctgtagagtgaatgtgtgtttgattgttcacgaaaggaatcagttttcgaatgtatataacttaacctttcatgctttttgtaaaagatttttcactgaagtaaatagagaaaattactatagatgagcttccaatttggttgaccaatgatttactatagagtttgcatttccaattgttctccagcagaattgtctaatcttgtgaggagcttatctgcagagccaaatgagctcataattttgggtttccattggttagatactatcatatcctcatagtataaaagtagaattagtcaatgccttaaatctaaataagggagccatgattgaatttgcacgtattaaaagtgaagaagaaactcaagtccacaggagaaaagtgtgacactccaaccaaaacaactcataattggtacaaacaaaatatttcacatagaatccaaattttgattagtgtaaagcgaaaaaggaaaaaactaagcaaaatacatatcttcagctcaattcgaaggaaactgatagatagtcattccaaggc

SEQ ID NO: 23612 - DNA, 878 bp, Arabidopsis thaliana landsberg
tgtgttcaagactggtcttgttcctacttgtttgttaccattgatctctttattcaaatttctttaacccatttcatagctgctttctaagaactctacacatggttccacatgtaaagaatcatcaaacatcacaaatgtaacgtcccggccatctctatcagcgggcttcacatcctttcacggacccatggatccatccctgccaatggtcggtccactatgtctggaaggctttaaatacttgtttaccgaccttataaattaccagatattcttttcccatgttttgtcctcattcgcacagttccgacaattacttcctagaaggtcactcattctgaaattactccacaacccaatcactcttaattgtaaagttttcttaggatgtttgaccaacaagataagtgcattttggtggcataggtgaccaaatcaattcttttaaacctctttgtatgcatcaccatattcctgaaaccggagtgttacaacaaatttgcggtcacaccattgaaatatcatgcactcatgcataccccaattttttttgttttttgaaacagtttggtgcattaatctaaaggtagcaaatagtacaagcctatgtcctagatatcatagagtagttttttataaaagtacatgatagtaggtgattacattgaagtaagcaatcaacaagagaagggaagaggagtatgtgtagatttaaagcttttttttgcctcgtccacggtccacctcttcctcgtcgccctttgttaccacgactgccttggacagtagtaaaatgcatgccttggacagtagtaaaatgccatgcctcaagagttctctggattgacactcttataccattttacatattcgta

SEQ ID NO: 23613 - DNA, 593 bp, Arabidopsis thaliana landsberg
  unsure (1)..(593): unsure at all n locations
gaaaaagggtgtctttaaaaatggccaacaaaaaagggtattattgcaaaagggtattataaaatggtactttagcaaatcacctaaaaaaatttatatcgatccaaactttataattgtattttgattgttatatctaggatttcacccgtagtataccgttccgtattattatatatttaaatatttataatatgtaaacttcttataaagtttaaatatttgtaatattttaaatttaataaaatttttataattataaatatttaaattttttataaagtttaactttctaaaaatttaaaatttctaatgtttaacttttaataaagcttaaatatttataattttttgacaattttaaaaatttaattctttaaaataaagaaccacagtaaacttgataccactttttattttggatgcctcataaatcaagtttcctgctcattcgtatttaaaatcattttgataattgctaggatatgccttccaagactactccttattaattatgccgctttctattggccttttcatttataccctcgtttaatttttaatgatcattntactcctattttgaaaacttt

SEQ ID NO: 23614 - DNA, 589 bp, Arabidopsis thaliana landsberg
ccatatggtcaaagtctgtttctgtttctctctaatctctatttctagtctatcagagctgtgttagaaacaagtgttcacgatataacattcaaccaaagataaaaggtcatgactcatgacctctgtcaatcaaaactgcatttctaagaaccaaaaagttgcagatatcttcttccaatcagtttcaccatatgattcataaaagaagatcaaaagaactgcaattcctagttaatgtaaaccattgatcactaaatcaccgagaaagaatcgagattttgatgataaaaatcagacttcataactacatgttccctatccaatgatgtaaaacaacaaacaacaaagctatctcagaaacttctaaacaagtgaaaatcgatcaaaattgctgcaatcaaacagttaagatcatgtagcagagatagcaattacctaacaccagcatcaccgacgattccaatagccataccagcagagagaccagcaagaccacaagctagcccagaagagagatgagcatagccatcgaataggtaataagacttggccttggggttaacccagtactgatgatacagcgatg

SEQ ID NO: 23615 - DNA, 738 bp, Arabidopsis thaliana landsberg
aaaattccgccaaatttttttcctgccaaaaaattcccgtaacaatttttttcagccaaaaaaatgcttttaaaaatctttgtgaaatatttttagcgggaaatatatttacaagggattttaaaagagttttaaaagatttactaaggatttaaaagagttttaaaatatctacaagggattttaaaaggattttaaaagatttacaagaaattttataattttttaaaaagatttacaatcgaaccgacccgaacctgattggacccgaaccgagattttctatttatcctattggatcctagaataatatacccgatatacccgtacccgaccgggtattacccgaatccgacctgcatacctgaatatccagccctactacaaattttgatataccgtattgctaaaactttatcatcgttttgttattaatatgacgcggttaaaaaaatatgagaagtctacaaatttttagacgtagatgagataataaaaaggaaatataacttttctctattattggtatttagtttttataaacaaaatgtttacaaaaaagaataatattttttttgtaataataaactctgtaaattgtgtacttttgtgataggcatataagcttcaactttctatatactttttaatctttgttttttttttttaattaaaaatctttatataagcaaatgtaatctatattccactccgtttaacgcactatttcttatattt

SEQ ID NO: 23616 - DNA, 2174 bp, Arabidopsis thaliana landsberg
gaatacaaagttgacgttggatatgtacttggatgaatcggcaatgaacgtaaaagggtttgagagtttagatattctctattattggaaagataacggtccactgtttggaaaattggcttccatggcttgtgatattctaagcattcctattacaactgttgcgtctgaatcatcgtttagcatcggaactcgagttctaagcaagtatagaagtcgtctttcaccgagaaatgttcaagcattaatatgcagtcgcaattggttaaaaggttttgaatcttatgaaaatggtaagtaagttgttttcataagttttatagtcacacaatcttagtctatgaattaacattgttagtttgtgtgatatttgtagaggagtatgaaaaatttgatgttgaagatgagactctacctttcttccagtcgcttgtggatgatgtagatggatgttgagttgcagattttattttaagtttgatattcatgtttggatttgagttttagttcatgtttcagttatcatgtttgcgtttaagaagttgcaggtctttctcttgacttaagttcattttctgtttcacatttgagtttaacttgttacaattatgtttcagtcctgacttttgttttagtttggttctgtttttatgatccttttgttttagagctatctcagattatcttgcttcagccaagtaggctgcagttcttcaagttcttttacctgcaaatgtacaaactgaaatcgatcagatcggagcgaaactggattcttctgtagctactatcactgagaaatcgactagtaactccaatcacataagacatttccttgattctgtgtaacaaactcctcctaacagtctatctgttacagaatctttggattttgaaaaacaaatgtataatagtcatttctgtactcgcaggagagtggcgcttatcgtagtttcaatcgtcatgcttgtggtgacttttcttggtctcggtaatgttttcatctttgactacatgtttctcaactatcaactaatgtattgaccttagtgatcttgttatcatttcttctcctgcagtttcttcgatttgtactacagacacatgtgtggcaatgagcgaatgggttgagagaccatcaagcaatacggctctggacgagatattgccttgtacagacaatgtcacagctcaagaatccttgatgcgtagcagagaaatgcccgcgggccgacccgtatatccgctgggctttgcgggccgggcttggacactgataattttgtccgcggtcctaaacaggctaacccgccgcggcccgaaaaaagaaagcccactgcggggcgggctagatgggcgcgggccggcccgtctgacacctctaaacgtgactgaaaaataaacgctaattgtgttttggccataggtaatcgtatagttgtcatttgggtcttaaaactatgggctgctcatatccatttaattatgatcagtttttagacaagcccaaaaaactgaagggtttattttggatttgtccaaaaactgaccataactaaatggatacgagcagcccatggtttttaatattaaactgaattattgaacttatatttagttaatgaaatattgaaattatatcattgtgtgaaacacttaaaacttaagtatggaattttgaataaatgtgttcatgacatcatgtattatttggatccatgaattgcccaatttattatggttctttttgagttttgtctaatttgggtctggttctatttgggcttaacccaacaatgtccaaaaaatggccctaggtaatcgtaagtaactttatagagatatattaaatctgaaattgggatgttgggcttgttgttttttaataagtagttggcctaattgttatgttagacccaaatgagtaaagtgttgtttcagttagttaagtctacgttagagtagttgcaagtgttgttagaccatcattattggtgagttcttaagaagttcttagcattaagttttacaaaaattaaataaatacttagtttaaattctaagaatcaactcttatataagagccaaaaacccagttcttacaataattcttggcagttttctattttcttacttttgaaaatgtttctgtaatacatgataatccgaaaatt

SEQ ID NO: 23617 - DNA, 571 bp, Arabidopsis thaliana landsberg
catcgactcatcttcacagcttgtgctatggccctctgatcctcctcgtcgccctcacggtggagttgctcctggtatagctcacgttgcggctttgttccgaccgcccttctcagatgggtcacgacgttctccggcagacttcaccacagcggccaaatttttatatcagctcatgaggcggacgcttctgccacggatgggttacagggaggctgccattcatatccaactctggctccttggtgtcctggtctctcactccgagtttgatgttgtggatttcctcatttgtgagatagaggacactgtgttggatggacttcgtgcccgacgtcagctgccatatgctcactatctctgccacatcttcgcacaactgattcagccaccgcagttccagggcacccttgaggcctctcgcctcctctttgggtcttatcgtccagctcctgaggatccagtgctagcacctgatccagtgattgacactcaggcagaggatacaactttccatcagtttgagactcagggcgcacgagttcctgatgatgatgatgacgactttggg

SEQ ID NO: 23618 - DNA, 663 bp, Arabidopsis thaliana landsberg
aattactgcccacaattgttgcttcacgctatttgctgattcggttcggtttgcattggttttggaataaaaactgatttcggtacggtttcatttgttttgtggaaaaaaaaaagtcacgcgatgtagattttggagagaagtgcgttgataaaaaaaggcatgaattggaaaggggtttacccacagaattgctctcactcgcgcaacgcgctctttctgcgagtgggtacgaaatagagccttctgattggcttagaaactctaagaaaagggaaatagtatacatgttgctagctcctgttgttattatttagtttttcgtttcttctatcaatctgatcaaagttcagtttttttttaacatacaattgattctgataaaggttttgggttatttttgaatcatttgtatgtcaaaaacacaaaattttgtgaatttgtatgctggcaatgtttcatcattataaacgattctgttttcatagcggtaaaaacagaggatcaaaaaacaattttttggaatcagcaccacagaggataaacgattctgttttcatagcatgtcagattctatacttgtttaccgttaaaacactttcatgagctcttcataaatttcaccttcagtggtgctgattgcagcctgcagctttaagtaat

SEQ ID NO: 23619 - DNA, 809 bp, Arabidopsis thaliana landsberg
tcccatttctttaattcataaattaaaaacaaaaacaaccaatttaaatcatacctctctttatcttcatcgagacaaaatcgatcccctttgcagccatcgtcgaatccttcgtcgtcgaatccaatcgaccaagctcatctttgttcttcgtgtattattcaaagtgagctttaccattctcttcttatactcttcacatcttaattcatctactcttgtgttgttgtgtttgtactttggagatttcagctagatttgataggtttgaaattggtgttgaaatctaaaagagaagtacttttgataaacgggtcggttaaaattgaaatttaactgaaattaaagtcaaaatgggttaattaacgggtaattttacaaatccggtcatatgatttcaaatctattaatccttctcatcttttcaattaaaaagaatttttaaataacccaaaaacaaacaaatcgtaactaatacacgattatggtatcaattaataacaatccctaccaaaatggtaactaactttatttagttacctttaacaactttattttttcatgaatattgtttgcgggatccggtaatattctctaatttacttggttaaagatactaaaatctacaaaatctccaatcatatctaacttttttttgttttcatcaaacaccatttatattaagttatcagaaagagactctccgctagagagagccattcaggaaccgatgtgcttacatgggagaaaagactattacgagcccgagctttcttagctagacaatctgctcgagtattacaacgacc

SEQ ID NO: 23620 - DNA, 914 bp, Arabidopsis thaliana landsberg
  unsure (1)..(914): unsure at all n locations
tagtgagatgggtttttagcttgtaacaaagtgatgaataaagatcacgagaaatatgagtttaccatttggtagttcatggaaattatttgcagatatgaggtgctagcaatccaacaggctcaaatcaggaggatggccatggaagacagtaaaacttctgaaagcaagggtgtatatgaagttgaaatgtcagaaacaaagcaaaggttgagtacaggacctgcaactccgtgaagattctgtggtagagttgggatggaacatgacaggtactgtaatattacagactacgtatttacttaatacaactattatcaacgagaatgaaatcactctaagcatcctatgacttgcttttgcagttttgctcacaaattaacgaaacaaaaacgctgaaccatcggagaagcagggcttgatcagtaaatattgttcatgtgttaaaaggtgacaaaaccaagaaggttttgattcttcagagatgtaaatgatcatgtgaatttagtactagtatcagacataacacagtggtcttaaacgctttgtactaataagaatagacatcattatttaatgttttgattcatccgatgagcaaatgatctaaagaggtgaaatattttacagaaaccaagaaacctaatctttagcatgaaaggtgctactaacttagacttttgaagaaataattccagaaagcaagacagtgagtgcagtgccaataaagaagagagagatgaaatctaatcgaagcattttacagcaacctgtatgacagaggaattggtacaagtacccacatgtgtgaaaagcccaatgagattagagtatcaaactatcaatagagaagatagagataaaacctgtgactaaggtttttgttcagacaagntcactacttttgctacttg

SEQ ID NO: 23621 - DNA, 196 bp, Arabidopsis thaliana landsberg
  unsure (1)..(196): unsure at all n locations
taaatctgcttgcagggcgnnnnnnnnnnnnnnnnnnnnnnnnnnnnnnnnnnnnnnnnnnnnnnnnnnnnnnnnnnnnntacatcttcactttggtactcaatcaaacgagcttcagcttacatcatcgcactctcctcttactcagcttatggtacgatctacgactcaaactcttctatttttttactctata

SEQ ID NO: 23622 - DNA, 793 bp, Arabidopsis thaliana landsberg
ctataagaagtattctaaaatcttcatggattttgggttattggattcatactcaagtcattaaaagttttgtgttattcaattaaaacaaaaaaatttctcattgttaatgatttcaattattatgttattggttcatgactttttacatttttcttcacaaaataaagtcatggaaagtcatgaaaagtattattaaaatagagagattgtttgaaaaactttacaagattatgaaaaactaatcaacaagattataaaaaactctctaacaatactttaaaatactttatagaatgtgattgaagtcatctaaattccttgtaaattaagaaccaataacaccccctaataaggtaataatattgacttgcacgtcaattcagttaaactattgtcaatatatactggtaaattgtcttaaaacaatatgtttacaatgtttttgaggactaatactctgtttatataccttttaccatttattaaagaaatggaattgacgttagcttctatcaaatcatgttccaaacttttgtatcatatcatactaatagaaatgttacaaatatggtaaatttgctttaaagaatatctactaattctgctgtttgcgtgccgttgtataattgtattacagattcttgttgttgttatcaaagttagatatgtatatataatttaaaaatttgataaagaaaaaatacacatgaaatgatcattatttttcttagtgggacaatgtcgttcacgttgagcgacccatcgcgttaaaagctataaaaaagagtga

SEQ ID NO: 23623 - DNA, 564 bp, Arabidopsis thaliana landsberg
gacattcacatgttttttcaagcagtacgatgttctatctaaaaggtaattattattcatgcatggattttgattttattctccacgaaacatgtgcaaatgcttcccgcagaaaacaacatgcgttacatccccatatatctacttatacttaaggccgttgtcaatggatttgatgactgacaaaggttacttcaactgcaaaccttgttattgttattccaatcacgagtatcacataaaaaggattggcacttccgactatgagcaatcatttattcctagctttacacccaagagaaacgccacgataccatgtctgcaaaataggtaactatcattagctactacgatcaaaatatcgaatgtcaaaatttcttaaaacacacgcaaccacaaatttgttctagatcttgcgagtataagagtcactggatatgaaacctggactatcgatgtgaagaatttccccgcttggctaggaggaagtgatatggttaggggaagaatcgagatggtaaacccccgtatactctaccgatttagctaatgtttttccgccca

SEQ ID NO: 23624 - DNA, 536 bp, Arabidopsis thaliana landsberg
  unsure (1)..(536): unsure at all n locations
cattttgcaataatggcatacttcctaagttaatataccaacacttctccgtctccttttataaccatagctgcatgagnncataatcttgtaactccattagcacgtaattaatgattatatatatgggggtataggatctagccaaatagaggtgcatgtaacgcaaagatccttagaaagtccattagccttaatattgtcttcaaatttcaagagagatgggtctcttcaagaagcttttcagttgttgcacgaagccatcttcaaagaaaggttcatgcaagggtggcgtctgtgtccttaagaagcctaaataacaaggatgagtttgctactatgcatgcagtagcaggcaaaaagttcttattatcattattattgacattccaatatttatgttgctttcttcatattatttgcacttgatatttcaattgaatttgagaaaatatccaaaaacaaaagatgctatatgctgtctcttcttagttcgattatgttggttnctgtagtcaaagcaagagatagaaatt

SEQ ID NO: 23625 - DNA, 661 bp, Arabidopsis thaliana landsberg
ttttcagcatgtatcccattgtacagttttaggaatgcaagattgcacattccttcaaaagccgtcgcgcttattcttaattcattgatctcagctacgtcaaatgataatcctataattgttccattaccctaataagtattccaaaacagagcttgttaactgccagagattctacttaaagaccaaagaatagaaatataaaaaaggttacttacttctgccatttctagcacataacgaatttcattggcatcgactaaaatctggcgtttggaacgttcttgtttggaaatgacttgtgtagccattacttgaagcaaatggtgcattaccactatactactttcacgttgtatgagatattttttcgctaggtttttcaacccaagactaacgtccaagttagtttttgccagcatggatgtcacatgatcaacatgtgcataattcaagaagactccaatgaggagaaatagaacttggtctttctcatgtaaactctcataacccatttttaatacgctctcaattctcccatcaagacaaattttcaaccttggtagttcatcaatccaatcagcctgactctttccccgcaatgacgaccccataacatgcagacccaatggaagattaccacaaatcttaacaacttcac

SEQ ID NO: 23626 - DNA, 1268 bp, Arabidopsis thaliana landsberg
attttcacacacattttttttttattaactttaagtatatatgccaaactttatgataatttacttagaatactataatcacatgactctaaaccaaatccaaaaattttgaacacaagcatacatgcatgcagcaatttattacaaaagaataaacacaacttgatgcaaaagcccccaaacatccactttgtatttgaagcttttggctccattataaagtacttaatcagatggaccaatcatcttctcgggaacaacaagagtatcaaactcttccgaagtaagaacacctaacttcatagctgcgtgctatagaataaattaaagcaaagatttagggatctcaaaggtattgtattatataattttcactggagaaggtttaaatccaaaatagaacaacaaatatattgtaacaaacatgaacatgttttctcttgctaaaaatgggtttaaattccgatttatttagtgatgaaaacgttaatagtttattgtttacctttaatgtgcatccttctttgtgagctcttttggctactgctgcagcattgtcatagccaattttctggtaaaggaggaattagcattgaggtaaattcatttgtaatcataatgagaatatggatgacttgacaaagaagtttaatatttagagacttacaggattcaatgatgtcacaagcataagagactagagagaaatacataaaacaaagacttagttcctatatataaatcatttccacacatgaataattttaaggccaatcaacgagaagaagcctacctcgagcaatagctttgagatcctttctatgtaggcctcaatgcctctaacacagactttctcaaatgaagctgaagcatctgctattagtctaacggactagtgaagacatgacatcaaatcggtaagatgaaatcttaatagtagataaatgacaaaaaaatcacaagtgaagagattaatgtacatgtaagagagcgcttgcgataaccggcttgaatacattcaattcaaaatgaccattcgacccaccaattgtcacggatacatggcttaccatagcctacaattatgtttgatgcaaccaaaagagtcatgaacaagactaccttagcaatttcaattcatatgtcagtaaaatatgtattggagaatggaacttacttgagcacataccatagtcaaagccttacactgtgtacgatttacctgttcctgacagataggataaaatgcaagtggatcaacatctatg

SEQ ID NO: 23627 - DNA, 616 bp, Arabidopsis thaliana landsberg
  unsure (1)..(616): unsure at all n locations
ctttggtgggtccctgatgcagcggctgtaaaggacgcccgcccgaagccactgatggcatagtgaatggcgatttggtcatcgatcgaaggcagttgtgacttgagagtcaggaacttgcggtagtactcccgcaaagtttctttctctagttgcttgtagagtgacaattcggccaaggcgtcggtgtctgggcggtacccttggaagttgagcagaaatttgtcccggagacttctccaggagtcgatagacagcgggggcaacctggtataccaggttagggccgagccttcgagggcgatgatgaaggacttggccatcgtggtgtcgtccctccggacgatgcgacaacgacttgatagctcatgatatactgtgctgggtcggtgctgtcgttgtacttggggtaggcccctgccnnnnnnnnnnnnnnnnnnnnnnnnnnnnnnnnnnnnnnnnnnnnnnnnnnnnnnnnntcaaggtaattgacgccttggaatgctgcggcgtgcgagatgacagattcgtgctgcggaatgaaaaggtctctgattggcgcgcgttgttggaggggcggaccgtgctgcagatcatggtggccttcggctgcatg

SEQ ID NO: 23628 - DNA, 584 bp, Arabidopsis thaliana landsberg
  unsure (1)..(584): unsure at all n locations
gccatgtttttaagactttataagattttaagaggttttaaaatgatttacaagggtttttaccaactactaaagcttttaaaaaactttacaaggttttttaaaagagtttttaaaaaatttacaaggatttttaaaagcatttttgtgtctaggaaaaaaaatttacgaaaaataattttggtgggaaactttttttttggcgggaattttttttttttggcggggaaaaaaatatggcggaaatttttttttggcgccaaaaatttggcgggaaactttcactttccaattacatgttcttattagatgagggtaatttggtcattttgttaaagggaaaggatatttttaaaaatgaacaatataaaagggtattgttgcaaaagggtagtaaaaaagtgtagttttgcaaatctccctaaactatttgaggttattttttatatttatattcgttcagttacaatcatatttttttggtttatagctgggtctttatagtagtatctactcatttaagttacgcttnttcattatattttattacatattctcgtcacaagtttttgtatgaatacatg

SEQ ID NO: 23629 - DNA, 777 bp, Arabidopsis thaliana landsberg
gaaacttaaactgaggacaacatatcagttattattttgtgtttaagagccaactcgatgtcagataggagctgggttttggttagtagcctatctagtaacttctcttcacttagcttctctttaacatgagtagcttcttgttaccattaagtagcttctctttgaaagctaaatctttctccttaattagaccaaatattttgcatctctgtcatagtcttgttttcatcaccttccaaattagttttggctttgggtttcactttgcctttggctgcctttaccccaaggggcgaggttgatcctcttcaaggccatgttgcacataggatggggaagagtgttcatcacatttttgtcgcttctctttaccgcatgtagcatattggacgcaccacttttgatcaaacctaacctccctccaaacatgttcaagagtgaacttagtcttgtaatcggtgtagaaactatggtgggcaaagttcatcacatcattatcattctccccactggttttctctttggttgtagccacatagcttcctacgaacttgcaacaaccctcatttatcttagaccatctatctttacaacattttggtaatctattttccatcccttatagcttgggacttgcagcaaagtaggcagcgatacggtacaagaatgatattgctttttgctcattggatacgacatgatctttggaggtgttgagccatgcattgatgaggaccacatcttcagttagtccccatttgcgtcttgatttct

SEQ ID NO: 23630 - DNA, 593 bp, Arabidopsis thaliana landsberg
  unsure (1)..(593): unsure at all n locations
aggaacaagttcttcttgagatcccactaaagagtactcttcttccaaagcctgcataacatttcctagcataagactttcacgtctcctgacagagaaggaacacacgcaaacgcaccagaaaccagaacactctgcgctactaaggctggttggagattacgcctgnnnnnnnnnnnnnnnnnnnnnnnnnnnnnnnnnnnnncaacaagtgcttgagacggtcgaaatgctttcctaatccacacatagagtagtctgagaacaagtgtgtaagactcagacggaagagatacatcttgaaaagctagtatagaaataagtagctttgcttggggatctgcaacatggatagtggactcagagctaaccaaagctctcaaagcttgaaggtaacgtgaatcaaagttttggttttgaagagattcacgaatctcagaccatgcttgaataatcgacctagcagatggagcagaattttgcttcactagatcaccagagacactacttccactcacagtccttaaccattcttcaaggaaaaaactattggtagcttttctcgccatctttaatacaactaattcagtaaa

SEQ ID NO: 23631 - DNA, 847 bp, Arabidopsis thaliana landsberg
acttgaaggtgggaatattcttgctatacaatagtatctcaatattctcggtagaaaaaaattcagatttgtctttcaaggttaaagagaaagataattgttaatgtatccatatgaatccatccacaatataactgtattaattcgtttgtatgattggataaattattatcattggatgacatttatattaattttttcacgtatttgtaaatataattagttcgaatgatttaccaaatcaacaatagttcaaaatactctaaagtattttttttgttcgcattgttaaccgatatcaactgttagatgcctttaaaaaattggggttatggatggaacaaacaaataatatgatacagaccactaaaacattcaacagtaataaaaagataagattatgaatatggttaagaaaagcaaaaatcatatttatagaatccagagttataagtattcaaagaaggaagaatcaatgtatatattacaacatgaatgtagggtgacattccataactagtcagaaacatgagatgagtagagtgggtagacacatagtttatatatgtccatggcatattgacgcctaaacgcgtcgacgtgtttgttagtaatttcagccattttatctgggagtttatcacttgcctggatctcgaggaacttcatagcaaccgggccacagtcaccactccgcaaattcttgtatataccatcaattcgtctccataaaaacggttgaagaccgtgattctgagaacactcaagcgtacagtacctttggatgaggtggggcaaaagattgacaacccgctcatgaatctaaatcttatgtgtgtagaggtct

SEQ ID NO: 23632 - DNA, 1336 bp, Arabidopsis thaliana landsberg
  unsure (1)..(1336): unsure at all n locations
gatcataatattatccaatttctgtgttaagttgtgatctttgttttagaaaatgtgtttttgaagagatgtgcatcttctcagtgttttgttatgtgtattgatatgataacaggcaaacgcggcatcgggaatggctgtgcatgatgattgcaagctgaaatttatggaactgaaggcgaaaagaacattccgtaccatagtctacaagattgaggataagcaagtgattgtagagaaactcggtgaacctgaacaatcatatgatgactttgcagctagtcttccagctgatgattgccgatattgcatttacgatttcgactttgtcactgcggagaactgccagaagagcaagatcttcttcattgcatggtaaaagcaagatattgtcactcatgtcttttgatctgtttagattatggtcatcaatgtgtgtttgttgttgtgccaaaggtctccatccagtgccaagatgagaaagaagatgatttactcgagcactaaggataggttcaagagagaactagatggaattcaagtggagtttcacgcaactgatctaaccgatataagtcttgatgctatcagacgccgcatcaactaagaaataaaacccttgcaagagacttgaataaacttgttttctcgagtaatatgtttcctttgactattatgaaaacttttaacaccttaaatttaatttattctacagtatttggtattattgtatgtcttgatatgttttaatctatgagaactaaatgttagtgtgcgtcaacaatanccgtgagatatcggatctaagattccgttatataatggaagcattagctactgtgatggctcctacacgtatttcatgtcttacatcatctttatttattactacagagtcatgagagctatagttcaccacacatgatctgcgaagagatgtaaacgctttatggcttcttgactttggtcttctttgtgatgaacatgtacgggttcttcttgggatctgtttgtgtgttcggttatgatccctctttcacgtctttcaaatcgagatcgccttatcctgactctgtctctaaaggattcataatgtcattcagccacatgtgctactaactatagcaaaaaatggattcatgaacacatcttctttattgatttagaaactactcaaaactgaagctctctctctctactctctattatatctctctctttcaatatctctctctagggcttatggaaaaactctcctaaaccttttatttttatctcttaggtcttagagagcaactttccatagcctgttatttatagtaacttttgcgaattc

SEQ ID NO: 23633 - DNA, 1125 bp, Arabidopsis thaliana landsberg
  unsure (1)..(1125): unsure at all n locations
cggaagacactcagctgcttgtgtgctatgtaacaatgcattagaaacccgggatcacttatttttctcctgcgattttgcttcggaaatctggagtaacttagcaacggaaatctatggagacagatattccacgagttggcaagacctgatacaagccatttccggctgttggaggactcggcttgatggtttctttgcgcgatatatttttcaagtctcggttcacacaatttggcttgaaaggaacggaaggaaacatggagagaaaccacactcagcagctcttttaaccaaatggatagacaagcaaacccggaatcaactatcttcgatcagagcaagtggggataagagatatgacatgggcttgcaagtctggtttgcgatgagacaaggagccacaaattcttgattttgttctactttgtttcaaaattattcaaaaaacgttgcacttgatgtaaaaacgctattttcttttgaatctaatttaacattactttccaaaaaaaaaaaaaaaaaaaaaaaaaatgtcttaaacaattgaattgcataaaaaagtgatttccttgtatgtatgaagtgggctaccttaccgtacgagctaggtataagcatgacaaacactttctcaaaattttatgtggagaagaagtatatgagaaaattgatggtgcgaggtgtgtgaacataacttaaaagagacagaaacaaaagtgttctattggtgcaatgactgttaattgtactacttttcatattgaatgtttattgggtgaagacccataagtgaagccttctcaaattttcaaagtaaatgggaaagaggttcaaattctttgcatagataatgtttctcgaccaatctgcgataattgcatgaacccttgtcaaggcaaaatattgaagagaggtaggcaacctgacaacatgttctctatgatgtgggtatgagatttttacgtgagtcccagtgtgttatcagttcttctatttacatgttatttatgcttttatgttggatttattcatctttgacattgatgtttaattagataacgtctctttattaatcaccaaanaaagatanggtctctttattaattactttgttggttttac

SEQ ID NO: 23634 - DNA, 1265 bp, Arabidopsis thaliana landsberg
ccagctattcgaccttgaagcaatagctattccccgtccatgattgctattggagccaatgggtagctgaaagaaaagaaccaagagatatttactgtgagatctatggaacacaatttcttccatgtcttgttgccgcctgaagaatccaaggaccatatcagttgggcaggaccgtttatctcagaaacgcacaagcgattatcgaggatgcacatggagtcgccaacagggtcacgttcacggaggaagggagcttcacataagacttgaaaagtttcagtgtgaagatggaaagataaaatcttggattctttaccctcggtgagccaatgaactgatccatcagaatacacgggatcttggtaatcatttatccgataaggagaagcagggtgaacgtacctccaagcattgttgctaaaatcgaaaacttcacaagttgtaacgtcgtcgaggcgaaactcggatgaattatataaccaaacctgcttatatgtgccattgagtttgtctttaccgaatgcaagtttaggagttgggaagtcatactctttcttttcaaattggtcgtcgaggaactgttgcaagttgaaaagaggacaacttcgatgccatttagtggcgggattcaccacgatattcggtgagtaaacacagtagatgcatatcagaccttcacaactaccatagcagatcaaggtgtgcagagtagggaatctgaacgtagaaactatggacgaaccaaacacagcttttctcccatacttatcttcatcatcagcaaaggacactacaagaacatcaggacctcgggactccatacgacggatcaactgtcgttcttgaaaacactgggactcgattgtggatttccactggttggatacgcacttgaatctcagcagagactccacaggaagtctctcgaggatgagcccaacaacatcgtgtggtagcagcaatttcaccacactagagcaatgtcttttcaaagccaaactggagccatctctctctctttccgatccaacaacactcgagcaatctcttttcaacattgtcttcttgtctctatctctctaattgattgatcaacagacaatttatatatatatatatacacaaacacgagttgagcttaaggaaatcaaaaaacacaatcacagaaaataattataaataaataatttacagggtgaagtacctcacgaaatgatgaaatcaaatactcaggagtccgatttctaagtctctaccttaga

SEQ ID NO: 23635 - DNA, 929 bp, Arabidopsis thaliana landsberg
ttgtttctaaaacttcaatttttatagcaaacactttgataaatagaacgttctttatattaatatattttttgttttagaattactaatttgaataatttccttacaatattagttatcaattgtatttcggtaactatgaagtatatgttttttaagaaaaatgattatattcttacaagttataataatatatttacaaaattcgtaattaattgtataatttttttgtcagagaaatatatatttattttctaaaatcactcttttgcacttttatttcacttattcaacaactcatcacggcgcaattatacacgaaattaaccgactgtttcttgcctagtaaatgccattccggtgttgtaacacttggtacccatgggttaagctcaatgaatccctcacatgattttctttggtccaccaattactataacctgatccccacaagctctaaacgctaaacctaaaccgttcatcgaacccgcttgctaagacaagttcccaactttactccaaacccgtttttctttgtaaaccttctcaccgctatacaattattacaatttcagaatacataaatttaaattatgtaatatccagcgataattataagtatatatcatatattttcaaaaacatcaaaattaattaaaaagattactagattatttttgagaacaactattataattattgaaaagtatagacaaaaacaaaaaaaactatattgaaaaaaacaatcatgtgaatattagcaaaacatatgttaaaacttaaaaaaagaaataagtattacatatgaaatctatatatatatatatatataatatagataattggatactcataaattataactaaaatgacgtgtgaatttgtttgttctaaaacttcaatttatagcaacactttgataaatagac

SEQ ID NO: 23636 - DNA, 421 bp, Arabidopsis thaliana landsberg
  unsure (1)..(421): unsure at all n locations
caacaggtctaacacagccgaagatgatttgccttcatgaagttggaaaaaacaaaacaccagaaggtaatctctaagaaaaagcagatttcgatgggttatgaatggtttgtaacatttacgggttttccataacaggaaaaagaagactgaagttgcttctgacgctgtgggcaacgaacggatcaagggaatgagatcactaatggtttcatctgaacctgaagataattctgctgtaaacaaagaagaagaagaaagcaacttaccctcagatgaaaacaacaggtcgaacacagccgaagatgttttgcctttatcaagctcggaaaaacaaaccagcataaggtaatcttcaaagtaaatcatattcagaatggatactaatgggttctaacattcaaagtcttncatgacagga

SEQ ID NO: 23637 - DNA, 570 bp, Arabidopsis thaliana landsberg
gctggtcgggtggttaaaaccggcccaacttttgatcaattactgtctaaatacgttaaaaagaaggccggccctagtgaccggccaccaaagcgaccccgctcacccattcatgagcaacgtcaggtcaggccgattggatcacctcaccaatcggatgaaatgaaaggtcataatgtccaattgagacctaacgtacatgcatggacacctccactcccatacacacctatgtcatatcatatacatacataccaccaccaccatatatcccgaatcagatgtggagtatgccaccatatcctttcgggacaccacaatactccatttggggggcaccccagtcatctgtctttgccaggttgacgcctccagtacaagaccgattgagagcccctcaatctggtccacgagcacaggcccagcaggattgccgaaccactcggccccaaaggctgactaatccgacaggggggcatatagctacggcctccaacagtacgataaaaggggacgtcattgaaataggaacaacagatgtcatcgtacaaccaaataacaaagggccga

SEQ ID NO: 23638 - DNA, 784 bp, Arabidopsis thaliana landsberg
tctaaggacctatgaaaatcccttttccccctgaaaacacgaagagttttctatggtttcaaaatagtttccacgagcttttgaataggaaccatttcttctttatcaaccaactggaactcctgcatgttgccaaaatcgtgcatcatcgttaaatatacaaacttttaccatcagctatatgagaacagtcctaagtactcatcatgatttagagaaagattaatcaactcacagatacgaagagaaggtaacggtggaagcaagtgttgagatgagcttgttcattgagagtgacaatcttaggaaagtgagaatgatagatgtgtgcatagacacgaaacaactttctcaaaatccgcttcacgaaatcctcaaagtttggagggaatggttctcctgaatgggaaagaaagaaacaagtgttacaaactaaaaaccaacttcatgatcatgtttaaaactatgaattatcttcacaaataccagtctttttcggaaagatgtgttcgttatctatctgagtttcaatccaattcatgagacgctcaacatattcaggggctgaaaccatagtagttccatctgcccatctatactcatatctgcaaacaataagaccgagaaagatcgatactgtgctatacaactatatattgttttacgatcaagaagctttggatttgaattgatgcgatgagaatatcaaaagtgagaaagttaccttccagcattcataactgggcaagtggtgggtgtgcagaactctttaagatagcataaa

SEQ ID NO: 23639 - DNA, 620 bp, Arabidopsis thaliana landsberg
aaagggagaacacatgtctgcaccaccaccatatgtcttctactctccaccaccaccttattactctgttgctcctaaagtagactacaagtctccaccaccaccatacgtctacaactctccaccaccaccttattactctccttctccaaaggtagactacaagttttcaccaccaccatacgtctacaactctccatcaccaccatattactctccttctcctaaagtagactacaagtctccaccaccaccatacgtatacaactctccaccaccaccttatttctctccttctccaaaggtagactataaatctcctgcaccaccatatgtatacagctccccaccacctccaccatactattctccttctccagaagtcagctacaagtctccaccacctccaccatactattctccttctctagaagtcagctacaagtctccaccaccacttttcgtctacaactttccaccacctccaccattctattctccttctccaaaagtcagctacaagtctccaccagcaccttatgtctcaaagacacccaactattgagtttgaattgtttcataaaccataagaatgattgaaataatttggttttaagaat

SEQ ID NO: 23640 - DNA, 700 bp, Arabidopsis thaliana landsberg
aaaatagtttaattggactaaaactatatttatcattgtataatgtttttattcgttaaatgaaaacacaaaattattgacgaagttgcagtaaaaaaaaagaaaagaaaaattattgaagaagttatgagcttctaagaaagaatttttgaatatttaaagagaatattagtatagttatacttatgtcttcttctaagaattttaacgcgtatattcataagtgaaaacacaaactttagggaaaatagctttaggatttgactttcacttacttaatgagaagttattatttttatttattattttaaactcatttacaattaatttgcatgacagaaaatcaacttttgagattacgccatatagatttgatctaatataaaaaaatattatgttgatatgaaatggttatcacttaagatgatgtgtgtagaattaaaataagattattatgatgaaataaatagttaaactatattgcaaaaatgcatgtgtaagataaaaatttgtattacatttaatctaataattttaggtaaaaaacacacatgtcaagcgcatgattaaaacaaaccaattaaatactatataggtgtcaaattttagttagaaaaaagttatttattaatttgatctgtataaagcccaaatagcgcaaagtgtactagactatagaattcatagaaaaataaaaggt

SEQ ID NO: 23641 - DNA, 591 bp, Arabidopsis thaliana landsberg
  unsure (1)..(591): unsure at all n locations
tgcggcgcacatgacaacgacgacgacgacgccgccgctcagcaggacgtctcaggttctggctcctcaggtttgaggagtatctacctgcgaggtcccgcgagtctccctaagcgacccatacttcgtgacagacgtccgctgatacgacccgatggagagaggtaggtaactttagatgttgttgctgctttttcatattatatgttcaaattaataatagaaactaatannnnnnnnnnnnnnnnnnnnnnngtcttggatgattttggagactgcagggggtcacggccgcaaccccaatggcatcctcggccttctatgcagggaacacttccctggacttgtcgagtacgccggagtgacgagcccagcatacaccttcgaccactacgccgtcgcccccgatgcagtagatcgggacggcagacaattcaacaacaaggtggagcgggtgaagcaagagctgtgggtaagtcgttcctcgcactatattgtttaataagtcgcatatgttgcatattcttgagataatgtatggatacatcgtctttgtatgtaggatttcttcagatgcgatgctggatacga

SEQ ID NO: 23642 - DNA, 559 bp, Arabidopsis thaliana landsberg
  unsure (1)..(559): unsure at all n locations
tttattactatacaataacgcttcttttcatgacttttatgatattatagaaagtaaataaatgaaagattttaaactattgataaaagtttgttataattttgttggttaatttttcacaatcttgtataggtttccaaaaaatctttctattttgatgacatttttcatgactttattttgtgattttttttttagaaagtcataaactaataacacaataatttaattcattaacaatcatagattttttgttttaattgaataacacaaaaaaaaaataacttgataaagtatgaatccaataactctatatttattgaagattttaaattacttttacaaatcttaaactaataacatcaaattttaacaaaccttttaaaaatcttgaacattataagtcatcacggaacttccaatttaacattatctcttttttagatatgtgtatgttttttatttaattttatcccatacattaaatatatatttggaatcattggtttcttcacaatcgaagattggtttancaacanaacgcgtcattatctatccc

SEQ ID NO: 23643 - DNA, 535 bp, Arabidopsis thaliana landsberg
gacttcatcgctattcacccgtactccgattccaaacacatcaacaagcaatctcgcgtcaagcggctgatcaaaccaagtcggatacgccaccaccggaacaccagtcaccaccgtctcgatcgtcgagttccatccacaatgagtgacaaaacaagagatcgccatatggcgtagtatcttctcttgttgaccccattcaataacaactccttgactttcttcaaccatatctttcaaaacgtcaacgttttcggccttctccttgggccgtatcacccatagaaatggaactcctctgttttttaatgccgtcgctatggtctccacttgattctctgatgatttgagtatgcttccgaaagatatgtaaacaaccgaagacctagcttgcttgtcaagccactccatacaataatcatcagctttccacatatctaggtttttcccatctaagggttttgtcctcatcatgtcccaaaagaaatggagaaacaagaggaccaattggggtaataggttttaaatcaaacat

SEQ ID NO: 23644 - DNA, 652 bp, Arabidopsis thaliana landsberg
  unsure (1)..(652): unsure at all n locations
tactacgagattgagcattgatggtagaggtggaagtagggtctttgattatttgtaggaagttctcttctttcgcgttagataaacatacttctctcatcatgtcgtgcatttgacaatttttagagtgcgaactcaaatacctgttgtctgcaataaccaaatttctcctcacaagctcttctaggtagtattctccactatcttggatggttgatccatcgtaaatcccttctactgcccagtaattgaacaaatcatacgcagatatcttggaatattcggggaaatgggctaggaaaaggaagcgatgctttaaatgcgttggcaaatcttcataactcagagacaatattcggtaaaccgaattgagactgttgtcatctaagcacgatcctcctactatttgagatccaatattgtcagaaactcttttccactcaggaactgtatgtttattagctaacaagcctcccaacactttaacagctaatggtagtcctcccaatgtgtgaccatttcctttcccatggcttccatttcttcatcaagccttacttctgcacaatatcacaagctaatacatttcaacatgtgagctgccaaattaaaataatacactagattctnggtcttagtattctatttgaac

SEQ ID NO: 23645 - DNA, 1345 bp, Arabidopsis thaliana landsberg
  unsure (1)..(1345): unsure at all n locations
tttaaccttagtcaaatagtgcaactatttttcgtcttatgatttagcttttggccaaaacaataattaaatccgaaccttaaagttttctgtagtacataggggttttatatttttcctaagtagtttacattatttaagatctgacaaaattggtttgactaaatttggatgaataaaacagaagttatgaattattcaagttctattcaaattttaaatcagatttaataaaaggtttcctggaaaaccactttgcaccgaggtccctgggttatttctaaactaactctctcagttatacccccgcgctactattcatccgagtcactgacattgcgcaaaaaccccctggctttctctttttctcccccgcggtcccttcctaggtttaaacagtacccgcgagaaagaaaagggcggcacggcttaccggcggcgagagagatccggcgaggggcggggttggctccgggaggtcctggcggtcacaacggtgtacggctcgacggcgggggtggccggaatcgtccggtccacgtgcgcaggcgggtgctctcgtcggcggcgggtgttccggctgaaccacggcgatctggttcaattaaacgacacgatgagctccacgggatgacatagagactatgtgcgcaaggaatcgaagaatggggcagagatttacccggtctacgttcaccggcgatcaggtgaagtccggcgaccgtggactggcttctccggcgaacaaagtccgattccttgctcggggagcttcaccgaggcatgcacggtctcttccgagggtcgggcgtggctgggaagggctctgttggccgttctacggtggcaggggctcgggtggccgcgggcacgccacgcacgggcaaacgacggtggtttcgggctccggtgaggcttgagcgtgcgcggaggagtgtaaccgacgcctgagggggctttataggcgcgggcgcgggacacgggcgccggctcagcgcggcgcgacgcagggcgcgcgcgggcgtgctctggcaagctcagggcgtgtcgaacacgtggagctttcaatctgcccgtgttccacagctcacccaagtcgcaaacgtgcgaatcttggcaaaaatccggcgcgagtcttttcctggcacctagnnnnnnnnnnnnnnnnnnnnnngccatggcagatatggcctaggtagggagatctctggtcgccaaatcgggtgtgtcacactgcctacctcgcgacaaaaaccatgcaaggcatgtcaaacgtccaagtctcgggctcagctttttccagtgggtgccttgggtggtatgcacacatttttggtataggaca

SEQ ID NO: 23646 - DNA, 626 bp, Arabidopsis thaliana landsberg
  unsure (1)..(626): unsure at all n locations
tccgttagtagggtatagtggtcaccccgagttaagtaagcgtgacgatgtcacaccgctttaagccgttgtcgacttaagccaattgctccgttagtagggtatagtggtcaccccgagttaagtaagcgtgacgatgtcgcaccgccttaagtcgttgccgacttaagccgaattgctccgttagtagggtatagtggtcaccccaagttaagtaagcatgagcatgtcgcaccgccttaagtcgttgccgacttaagccgattgctccgttagtagggtatagtggtcaccccgagttaagtaagcgtgcaggttgacagcgaacaatttgagtgcctttgaagtctttttattgatgataaatttcccagtttacagaatacattgtcgtcccaatagcttttgagatatagctaggggtaaaacttcctgagatgttctatgttccatgagtcccaatttctgtgtcgtccatttgagtgagactatatgatccaggccgagtgactttagctactatgaatggtcatcccatagtggtgacagtttgtgccgctctccncgtaagaatcgccggagacgaggtctccactgcgaagatcgatgtcgatggccttgcgtga

SEQ ID NO: 23647 - DNA, 646 bp, Arabidopsis thaliana landsberg
tctctccgtgtttccttttgcttcaggttcgcgtttctctcaatgtctcttttaaagtttcttaaaatctgtctgaaaattacctgtgaatcttaaaaacatgtgttcttgtctttgattcatgccattatctccaatgcttgatcttacatttcgtctaatctttagttagatcttagattcgttctccagctaattctgggtattgatggatccaatttgattttataaaaaaacttgatgaaatttgtttcctttgttcattgttcttcttacatcggatctgattatggatttttgatctacatgtttagcatttagatctgcaattgattttggtcgaatttggtaaagatcacatttttacgatttgaattgttccaaagttttcgttttttttttgtcggatctgatctatatacgttttgttactgttgttatatatgcttagcatttttagatctgtgcttgatgttaatgaaatgtttctgttgagaatggttgagaagttagagcaaagatcatgttcttatactcaatgtatagtttttacactaagatcattgccttaactaattggttaattgattcttcttcataggtgatattttaacaaagttcttagtacaatgggatcctgagagca

SEQ ID NO: 23648 - DNA, 639 bp, Arabidopsis thaliana landsberg
caactctctcgtcattaccaggcacttcacacggatccaactcaccatgttctgaccatatcgtgtaattgtttttaaaccctctttttagcagatgtgattggattactcctatatctctccaagctatcttattatcacaatcgatgcacggacataatatctccttgctctttcgcaaattcgcgtgcttgttggccgcttcaataaagcttctcaaatttcgaatgtacgacggatgtggtcttggcacattgtacatccaacctcggtccattacctatccctatattgattaacgtcaatatcgagatgtaacatgaaaaaataaatgttcatgaaagtgaaacaagatcatatcgagatgtacctagtacatgagacaaattttttttaaaatatccctaattaattgaatttaatccctaaatcatgaacgaattaatgtgcatgaaaatgaaacaagattgcaacaatataggtaccttgaggtgagacaactcttcaaaaaaaatctttaaattagatcaactacaagtccaaatcttggaattcctgagttttcttcaattccggctatattcaaaattgaggaaaaaatcgtacaaaatgagaaagaaacaaacggagacatatata

SEQ ID NO: 23649 - DNA, 322 bp, Arabidopsis thaliana landsberg
  unsure (1)..(322): unsure at all n locations
agctgaaggtcttcctgagagaatgtgattggtacatgataccatttggatttgatgaagggtccctgcactccaacatgctatacccttctctatgcttccttcttctgcttcttgttggctggttcagaacttgagcctcctgtgattgggagcacannnnnnnnnnnnnnnnnnnnnnnnnnnnnnnnnccttgcgaagtcattgtcgtggtcgtggaagtgagttcttcgaaggtgggcgccaatgttggtcacttgttctaaaatgctgtgaatcaagaacaaggcaacacaattgttaaggaataaggaccttcgt

SEQ ID NO: 23650 - DNA, 694 bp, Arabidopsis thaliana landsberg
taatttttttgccaaaaaagtaatcccttaattttcccgccaaaaaaaggaaacccgtaattttgccgctaaaaacgtaaacccaaaattttcctgccaaaaaacctaaacctttaattttcccgtcaaaaaacgtaaatccgtaatttttccacaaaaaaaatggaaacccgtaatttttttgcccaaaacgtaaacccgtaattagcttgccaaaaacataaacccgtaattttcctatcataaacgtaaatcctttaaccagtcataaaactttcgaaaacgcactaatttttaaccgctaaaccagtcgttcaaaaagttttataacgcttgaaaccgtaaccgtctgattccgtaaactcatgcagtcacaaatgtaggcactccgtttcaaccagtcaagcctttagataagttttcttagtcatgggcattcgattatccattcagtatcggttcgtatccattcagttattggttctttcggttataaagtttagtatccattcggttattttaaaattttggttcggcttcagttcggatttgtttcaattccggttctttcgattttaaaaattaatatctattctgttatttttctttaaatatttttggatattttggttatttttgatattttcatataattttggttactttcgagtatttttaatattatatatctatt

SEQ ID NO: 23651 - DNA, 557 bp, Arabidopsis thaliana landsberg
ggattttgtcctgtcactatacttgttactggaaataaccattcccttggaacatgtatgcctcttttattctaatttatttacatacacattgttacacaatttgaatttggtgtaaggcaagccaatggaccgccgaccttaaattttgaacttcttggaacataggaaagagtaatattactaatgagaggacgtaagctgagtatatttagctaagaccatctccaacgtattcctccattatttactctaaaattgaccactcatgtcggtgatcaataatatgcacaatgtccattattgttgttttctctcgattgaactaatcttcactattttttagctatatctcggaatcttctcagtacatctttcgcgatgaactcctctgatcttttcttgcgtaatctagcctataatgtcttggcaagtatccaatatctaattgtttccattatcatttaagtctttatctctcaggactgatcatgaataaatatgtattcagggtactacatcaaaggcagactacaccaattatcttgatccaggga

SEQ ID NO: 23652 - DNA, 592 bp, Arabidopsis thaliana landsberg
caattatttttttattttacaaaaaacgtatatacatatatataatttatattcaatattaaagacatcttagcatgatgttctaatggttagacaacttcacccagtgtctcccgcccttcttccatcaaggaatgggttcgaaccccacctcctgcaccgtttttaacattttacgctaatttaattaaatgggctgacgggctggcccggcacagtcagcaggcacgtatgacgtggctgggccatagttgtggcccgcgtgcgtctggcctgtgccgagcaccgtttagccatatataggcgtgcagcagattaatttgaaatagctgtcaggggttatttgtaaaaaaagatgacgcgggacgaccgttaaaactggtgttttaagtataaaaaaatataaattacaatagtccattgattgactttggtgttatttggttgcacatcttgtaaaaatagttttacgtaaagctaagtggctagttgtatgtatattgcaagaataataaggtgatttatacaatgcgcatgtcttggtatttggtgttattttttttcttgctggatctcatggtgtagtgggagt

SEQ ID NO: 23653 - DNA, 583 bp, Arabidopsis thaliana landsberg
agcattggttcttattggtaacacgcataatgacataatgacataatgcgattatctagtaaatttttctatcaggaaaatttacataattgcattagaaaacgcaaaaactcagaattcgcattttcgcctaaaattacaattaaaaatttattatgcaaaaaaatagttatataattgcttatttgtataataaattgttaatattctacacatactaaatattagcaattataaaagaaaacaattataaatgttaacatagaaattatatcattaataatatatataagaaaacattttcacaactttttaataaattttaataatcttatattttatcatcaaatattacttagactttattaaaattgattaaaaacattattttctttattaagtataataaaaaaaatataacttaatatattttattctgtcattctggaaaatgtatctaatcaatatactttaaaaataattgtattttataattttttattctgcaagttttcattcaacaacttttatcctaaaagttatactattatgcaatgttgcaatcagagcctatatagttatt

SEQ ID NO: 23654 - DNA, 704 bp, Arabidopsis thaliana landsberg
acgtttcggaaacactaccccacatttcattcgctgtatcaagccaaataacatccagtcttccggggtgtatgagcaagggcttgttttacagcagctaagatgttgtggggtcctagaagtggttcgaatttcacggtctggatttcctacaagaatgtctcatcagaaattttcccgaaggtgacaatgccattcatcattagtagttgtgcaagggaccgtacaagcgtttcttcataagttttaatcacattgatcatattgcagatatggttttcttctggtggagaacattgctgatagagatcctctaagtgtttcagttgcgattctccatcagtttaatatcttgccggagatgtatcaagttggctacacaaagttgtttttcagaactggccaggtataatagcttgtcggctggtgtcaaagacttttattttataaggggcaggaataagagtctcatgtgcattgcagattggggttcttgaggacacaaggaaccgtactctccacggcattttacgtgttcaaagttcttttagaggataccaagcacgctgtctcctgaaggaacttaaaaggggaatttctattctccaatcatgtataacacttttgtctcaagtcattacccctgttttgcatcttaatctcattgtaatggagatactttgagcttacctgagatatggctc

SEQ ID NO: 23655 - DNA, 613 bp, Arabidopsis thaliana landsberg
taagtaataaatgagtagatgtaaaactcacctgattaaaaaagactgaaatgaccatagttttgataacggttaagagcaacgagagaaagaaaattaggattaaacaccatgagattgaatactcaatgtctcatgtaatgtttaaaaaaaaaaagaaattattagtttgttactcatgtaacattcgtataaatagcaaatatttacacagacacaacacacacatatttacaagtgcttttgtttcctttgacaattgaagttactcaattactgaaagaaaaatggaagatggtttgctgtatcaccaacatttacggtatctctaacgtttacggcaagagtcctaaccttatcaatttgtctctttcatttaaggtttagactcatattacctttcagttttttttttctttttcttttagtttttgtgaatgatttcatattgtttaatgtttctaaaatggttatattgagtcttacatacatgtttttgttttgttctaaatgtaaatcgagaaatttttgcatcttttttttttttggaaatagccatcaaatgcactttaaaccataaatgaatatgaaagaggaagcaaaacatgcaaga

SEQ ID NO: 23656 - DNA, 520 bp, Arabidopsis thaliana landsberg
ccctgtcagttccttggttcgatgtgttccccaggcaagtaatctttttcataatttcttttagcttttgtgaagaacagacctgatgatgaattagaaatgaggagacaaattctaagaaacagatatggactacacaaaaaacttgaggtgattgatgtaacatcttacctcctcacacgcagaattgaccacgtttaacctttttttgaattgtgttatctgcacagcagtcattattaacaacagaaccaagaatatacagttacgtagacgctgctgtgaaacataatctcgttttcctgcaaagaatcagatagaataagttatacagccggaccttagtgctaaattgaatcttgaagtaaaatactctcagctttgattctactcgtagcaccttccttagctcttggaagtactgtgatagtaaaattgatgacagaagaaaatgacttaaacgaagtaaccatattatatagtaggaaccaaaaaaccgtgcaagatttgattgataata

SEQ ID NO: 23657 - DNA, 431 bp, Arabidopsis thaliana landsberg
cagcccggcacgagagtcgtgtcgtgcttgggtcatagcctcggcccgtagtgctagccaggcccgacacgattatatttttttattttacaaaaaatcatatatacatatgtacaatttatattcaatattaaaacacctaagtgtgatgttctactggttagatggcttcacctagtgtctcccgtccttcttccatcagggcgcaggttcaaaccccaccttctgcaccactttttaacattttacgctgatttaaccaaatgtcttgataggatgtgtcgtgcctaggttggagttgcggcccacagggcgtcgggccgcccgtttggccgtctatatgctgaggtgtggtttgggacgtggaggttagttgcgcggatgggacaggcgcgagttatttgaaatagatgtgaatgtgtaattgtaaa

SEQ ID NO: 23658 - DNA, 562 bp, Arabidopsis thaliana landsberg
  unsure (1)..(562): unsure at all n locations
atagtgttgtctcggatctccacctgctgctccaaggtggtaatgcgctggctcagcctttccacctgcaaatccttctctaccaactcggaggaaaagtcgaccacaaaatcttctcgactgtcgagggtgagcttggtggtttgagcgatgttagcaagatgtgccatagcgtcgctctataggacctgaaggcggtacaacgcactcatgcactaaacagtgaccctcccaaccaagttaggatacattgcccacacatctttcacgtggctcacacggttacaccacatggggtcatccttcttctcagcagggaagagtcctaagggggtgcatcaccatttccaggggatggtaccacagaaagttgtcagagccctcatggctgccgctttagtggtgtagtcgtcctgaatccaaccgtctcggagtcaaagagaacgccaacccggctanaggggatgagcctccanagtcagccagactcgacaacgagggtaccgatgctcgtcgtacaactgcatcgtgtacaaagggggcgtagggtaacgggcgagtt

SEQ ID NO: 23659 - DNA, 590 bp, Arabidopsis thaliana landsberg
  unsure (1)..(590): unsure at all n locations
tacaatataattgtcccttcttcacaaccattgaaggacattatgagaaatagagaagctactggaaggattggaaagtgggctgcggaactcaatgaattctgtattgattatgtgcacagannnnnnnnnnnnnnnnnnnnnnnnnnnnnnnnnnnnnnnnnnnnnnnnnnnnnnnnnnnnnnnnnnnnnnnnnnnnnnnnnnnnnnnnnnnnnnnnnnnnnnnnnnnnnnnnnnnnnnnnnnnnnnnnnnnnnnnnnnnnnnnnnnnnnnnnnnnnnnnnnnnnnnnnnnnnnnnnnnnnnnnnnnnnnnnnnnnnnnnnnnnnnnnnnnnnnnnnnnnnnnnnnnnnnnnnnnnnnnnnnnnnnnnnnnnnnnnnnnnnnnnnnnnnnnnnnnnnnnnnnnnnnnnnnnnnnnnnnnnnnnnnnnnnnnnnnnnnnnnnnnnnnnnnnnnnnnnnnnnnnnnnnnnnnnnnnnnnnnnnnnnnnnnnnnnnnnnnnnnnnnnnnnnnnnnnnnnnnnnnnnnnnnnnnnnnnnnnnnnnnnnnnnnnnnnnnnnnnnnnnnnnnnnnnnnnnnnnnnnnnnnnnac

SEQ ID NO: 23660 - DNA, 2321 bp, Arabidopsis thaliana landsberg
tgagcgcttcctcttggctttggtcttgcttggctgtcccttgcgacccttaagcgccgtcttgaagcgcttgatgatgagggccatttcttcatcatttagccctgccgcctcaacttgcgctaccttgctaggtaacgcctccttgctccttgttgccttgagagcaatgggttgaggctcatggatttggaccgttcaacgcgtcgtccacgtacctcgcttccttgatcatcattcgcccgcttacgaattttccaaggacttcttcgggcgacattttggtgtacctgggattctcacgaatattattcaccaaatgaggatcaagaacggtaaaggaccttagcatcaatcggacgacgtcgtggtccgtccatcgcgtgcttccgtagctccttattttgctgataagggtcttgagccggttgtatgtttgtgttggctcctcgccccttatcatcgcgaatcgtccaagctcgccctccaccaactccatcttggtgagcaaggtgacgtcgttcccctcatgtgaaatcttgagggtgtcccagatctgcttggcgttatccaagccactcactttgtgatattcatccctgcacaatgaagctagaagaacagtagtagcttgtgcattcttatgaatttgctcattaatgaacatgggactatccgaactatcaaagtgcattccactctctacaatctcccatatactaggatggagagagaacaagtgactacgcattttgtgactccaaaatccgtagtcctctccatcaaaatgaggaggtttaccaagtggaatagataataaatgagcatttgcactttgaggaatacgagagtagtcaaaagaaaagttcgaattgaccggtttctttttctcatagtcgttgtcgtcgttgtccttttgggaggaagaggactcgtcgctgtcgtcgtagtagacgatctccttgatgtgccttgtcttcttcttcttcccatcttttcgtttgtagcccgagcccgagtcggtaggtgtcgggaccataattaggggtaccctcaagactcctaattctcagctgtaacccccatcagcacaaagctgcaaaggcctgatgggtgcgactaagtcagggaccggtccattcaacggactcgatcacgcctcgcccgagcctagcctcgggcaagggaagccgaccccggaggatctccgtctcgcccgaggcccccctccagcgacgaacatacttctggctcgcccgaggcccagtcttcgccaagaagcaaccctggccagatcgccacgccaactgaccaaatcgcaggggcatttaatgcaaaggtggcctgacacctttatcctgacgcgcgcccttcagtcaacagagccgaagtgaccacagtcacttcgccgctccattgaccggcctgacagaaggacacggctgcctgcgccgctccgactgctgtgccacccaccagggtgaggctgacagcagccaagtccagcctcaggcgccatagggagctccacctcgcccgaccccagggctcgacccccgcctcggcctcgggagaaggactttgcctcgcccgaccccagggctcggactcaacctcgaccccgggagaaggtatccgcctcgcccgaccccagggctcggactcaacctcgaccccggaagacggtctccgcctcgcccgacctcagagctcagactcaatctcgacctcggaggagtcaccgcctcgcccgaccttgggctcagaccgaccacgttacagggggatacatcattaccctacccctagctagctcaggctacggggaacaagaccggcgtcccatctggctcgccccggtaaacaagtaatgacggcaccccatgtgctcccatgatgatggcggttctcagccccttacggaagcaaggagacgtcagcaaggacccgacagccccgacagctgtgcttctacagggctcaagcgctcctccgacggccacgacatcacataaacagggcgctaacacctctccgacagccacatcggcatgtacatagggctctggctcccctctgctagacacgttagcacattgctacaccccccgttgtacacctgggccttctccttacatctataaaaggaaggtccagggccctcgtacgagaaggtggccgcgtgggaggacgggctgacggacaggctctctctctctctccgtcgcgaacgcttgttatcccctactgcaagcgatccgccctgggcgcaggataacatgagccacggttttccccttgtgtttcatctcgcgccgacc

SEQ ID NO: 23661 - DNA, 558 bp, Arabidopsis thaliana landsberg
tctatttttcgctaatctcgaaagaaaactcgttctcaagtttcatttccactcacctgaatcccacatatgtcattgacgaggctgaaacattaatgaatgtatcttatcttcgacttggtttcaatacacataggaaaatacttacaactttgataagtcttcaaagaggaattggtagtatgaattacggaatgaataaagaaggttagaatacaacatggttataagttttacgagtttacctttgttcagtcctttagtccatgactcatgagattgtgaactataaaatatgcaacatggctataatgtggcaatcaatacttgcgaattttgatactgtctaaaatattttcctatagaatattaataaactaaatttaattggaaaagtgattacattcaaaatctattagttttgattaaacgataaattatgtggtgaatttgctatacaactaaattggtgaataaaacttgcagaacagacatggtgacatttttggtttcaggaagtcacaaaacaaccattcttgctactctcataagaattta

SEQ ID NO: 23662 - DNA, 774 bp, Arabidopsis thaliana landsberg
  unsure (1)..(774): unsure at all n locations
gaaattttggaccatggatcgttagtcaatgaacttttctgttttatattaatcgaatgcaaagaggacaaggggttatatcagcttgcaaactttagcgtagttcaccattttgtttagaaatggaatgtaaagtgtaacatttatttctcaacaatgataatatgttcctgttacagatgagaactactcggcacatcactgaatatatcattctcttaatgacacatatgtcacttaacaacaacaagctaattacacgtctacgttcactatttatagacaaatgcatcttgattagtcttctttcttctcttcattcacgtgctcttcctcannnnnnnnnnnnnnnnnnnnnntcacatatacttgagtcagcttttcatatcagtgaatccatatgtttttatgagcaaatccgtctgggtcaagtagtggatcagctatatctgtaacagccaatcttgtggcagtgtcactagggactgaaactgatggttccattctgtctccagcaagtcagaactctgtggtcgggattaaactgagtgtcggactcacgagccgagccggggtagttcctatctccttgagacaggacagtattgggtgagagactaagactctaaaagcacccaaccactactaactgtttgatttgtgtaccattttaccgagtgtttctctatgttttgctgttaggccgatttgtaggacagtgtcggatgctgttcatctccttgatgctattgtgggttatgatccattgatcga

SEQ ID NO: 23663 - DNA, 506 bp, Arabidopsis thaliana landsberg
aatgcaagaacacaaactgtctgcagaataaaacttagtctcgagaataaaagatacatcctacatattgcattatattctaaaaccctaatattcaaaacggcacagtattgggatggattaagaacagtactcgaccctagtacttgagtgatgggtcgagtgatgagctggagccttcatctcttccttatgctcgaatgtctgggttagtgcggaatagagaagactctaaagctggcagtcgagtatcaagtcgagtggtggaagatggtagaactcgacttggtggtagagtgagaaagagagtgagagtgaatggtggtactcgaccctggggtcgagtggcagtgatcgagtgaatggcgaaaagtggagatggtgttactcgaccaggcggtcgagtggtggtgaaaaattgtgatgactgctactcgaccaaggggtcgtggtgggtaagaatgtaatggtcgagtggatagctgcgaaggtcgtgaccgagtact

SEQ ID NO: 23664 - DNA, 554 bp, Arabidopsis thaliana landsberg
  unsure (1)..(554): unsure at all n locations
caaacaaacaaggatttctgtctccttatagatcatcacgaaaccgcgttgtgagatatcatatgtctcaattatattctggtcatcctcctaggaataaacatgaattgttcaaccaatgtcacgcatctttacgttctgttatcgagagaacttttggagtttggaagaaaaaatggagaagtatttctgatttttccaagatataatgttcacattcaaaaaannnnnnnnnnnnnnnnnnnnggattacataattttatcagaatttcaaatttttcagattcagatttgtctgatgttatgacagaaacaaatgtaaacaacaaatattttgaacatgatgttagcgacatggatagagcagatttagcagatggagaacatatgacgcaaataagagacaatattgcaaatatgttataggaaaatcaaagtagtcgataatatcttatgaaaagtgatgtaattgcnttcttattcaactcttatgtaaccatatgcatgttaaaaagtatatctttctattggattttggaataatatgaatttta

SEQ ID NO: 23665 - DNA, 541 bp, Arabidopsis thaliana landsberg
  unsure (1)..(541): unsure at all n locations
gagtactgacaggttttgggacatccaaagttgtatcaacctccgggaggggcaccactgccaacgtaccatcaggagcagcatcggatgaattctcagctaacagatcaagcatgtcatttatgtcggcatcactagggttcagaggcacttcaaaataaacctgccgttcatcatcaggaatctccccgagcgaactaccaaagtactgacttcttcatcagagggtcgcactctaagacccaaattgctatcagtcacgggtggattggacacaaaaagggtgaaagctttgggagaaggaaggttccaagccgagtatgccactggagcaccaacatttgaaactttacccctgaggatcatttcaagtcggcttaccaagtcaacagaaggaattcnnnnnnnnnnnnnnnnnnnnnnnnnnnnnnnnnnnnnnnnnnnnnnnnnnnnnnnnnnnnnnnnnnnnnnnnnnnnnnnggtcttgaaaacaaaatccgtgaccacagcttcagcagtcagacctctctctttcagtaat

SEQ ID NO: 23666 - DNA, 604 bp, Arabidopsis thaliana landsberg
cacatcacctcaacagtgtctaaccattctttgcagggttttttgaagaacttcttgaacttgaagtaatagggaagccggacaagctcccccttcttcttctctccctccagcttcggcatctcccactcttttagagtagggaaaactctgaatgccaagaactcttgaactagatccctggtgccaatatgttctgagataatttcaaattcacccagagcagcccaggtgggaccttttaggtcgccaatgcggcattgtggccttgtctctccgaagattaactccagagggctttgtaccaatttttctttgtcttcatcgacttttacataaaaccactcagatttccaacctgctggccatttgcttcggtagctgatgacaggacactttgttgtcttccggtagcaaaattatagcaaccgaaattatcatgtagcccatcttttctggcctttgtttggtaatgtaattcgtgagctcggcagaagctgtcagcaaatggcttcacagcttggcttcggagggccagatataacattgagcctacgatggcgttaggagcaattgatgaaagtagatacaaacctcgttagta

SEQ ID NO: 23667 - DNA, 443 bp, Arabidopsis thaliana landsberg
catacacctgcagcttaaattggcaacaccagctttgtaagaacccattgcctaatcctgatattaagactctggttggggatcattcctgccgcctaccaaatgatgcacgagcaccatcccctgtcaacaatccgcttcttggatcattaccaaaagccgagggatttcctcctctaggcgcacacggcgtaggtcaatttgcacctgatttttcgtattttctataagtgccatttctactgcttttggttctagctctatagttacctttacatgccgcgcttgacttacctttatgtctttagccttttcaaccaacaccttctacgggtccgacacctcttgctggttggatgtctagtccttactctgtcccacatacagctgtgtctggaggacccattgctcttggtgctccatccatacaaggttatttgctt

SEQ ID NO: 23668 - DNA, 930 bp, Arabidopsis thaliana landsberg
gctccgctcgcagccgaggtctctctacggccaggtcgacagttgcctttgtgatttgatcaatcaaggccaagggcgatgccacctcggccgcttgactttccagcacggtgaattcctacttggcgacccacttcttcttgatctcatctagcaactttgaatacgaagcagccagatcaaccttagcattgtgaaccgccttgttagctccctgcacaatcgaagtgagatgcagcactcttttagagagctcgtccttcttttcgttcaagcgatgaatctggttcctcgctgtctgcttatctgcctccaaccccacgatcttctgttccatgatcccgatcttggaagcataacctttctcgagatctttcgatgtggacagctccattttcaacctctcgatctccgcctgaaaccatagtcaggtcagaatcatcatatcatcgataaaatatatacaaacaagtcacactcgctgtcagctcctggatgagggtcttcccttcttagagctcgctcgccgaaggaaccttgctcaaacgttgctcatagagagcgaccagcttgtttgtggcagctatcgcctgccataggcaaaacaaaagttagaattaacataagaatagaattggaaggaggcagttatcgattattacctggccctccttcgccatcatgtcagcataagccgccgcctcggccatgttcttcaatccgggaattaggcagttcctccctttgatgtggcgaagcaggttcgccaacccagcctcgtcctcactgattggatgatcacggtcgtgagtgtcaaaccagtggagggcctacttcccgcagaccccccaccagaattggacgactgtctcactttctgagaccgagtcggaccttggaaggaggacctgccccaacctgaccccccac

SEQ ID NO: 23669 - DNA, 648 bp, Arabidopsis thaliana landsberg
gcggaatttccggaaaaatcatgtgtttttgtcgttcattcgcttaacttgtatatattactgtctattatcatgttctgtagggatgggattcccggggtgaggccaccgttgatcgtcgccttgctccattttacgaagaccgattcgttgaaaatgagtggaagacgatcacctctttcttggtccgtaaggcaactgactcagtcagagcaacaaagcatgaatacggcatattgtttatggatcggaccgtcgtcgttgaggccccaccgagatcaccaccagttccagatttcgatttcactcccttcgactacattttggaaaaatctgcttacaagaacgttttagtcggtgaggaggaatactcccgatgcttcatttattacatttttgaaattttttgattattatctttgtttctccatcatctagatgtcgctggagcgatggttgatgttggcggattaactacagactattacggtctcaaaatgagtttcaagataaaagatagatagtaagtgttcttttcatttgttttatttacaatgtccctctaaacgctctgtccttatttctaacgtagcaatgaagtcttggagtgcgaagccccgcataaacaagcggagtacttggatggta

SEQ ID NO: 23670 - DNA, 827 bp, Arabidopsis thaliana landsberg
agggcccataaacccacatatgtcggaatgttagtccgctatttcaggaaaacttgaaaaaagtattaaccaatcctacaaatcaccacatgatctttccttatgttttgttttcactcacacagttccgacaatcactttccagaaggttactcatcctgaaacctttctagctcaagcatgcttaactgtagagttctctcaagatgtttgacccaaaagcataaacatgcactttaggtgacataagtggccaaatcaattcttttaaaacacattatgcatgcaccaccatattcctgaaactggagtgttacagtaatcgtttaattttgtcaacaaaattagtgaagaagaagatgaagaaattggaaataatggtgaaagtgaccgatttaatacatgtttgaagatcaaacgacgaaaacttcgtcgtaaatgaagattggagctcggaagttcttgccgaagcttcacgaagctctcgccggatatgacgatcggagatcagatctctcgctgatgatgcgttttctacgatttcttatattcgatcaaagattttaattatattattatttaaattatttaaaaaatataaataaagaatgctatttgtgtcccaattgaaatacttttcgaagcaatttctctctagtatttattttttatacatgcatagaatgtatgtaaatatttttttttaactaaaactactatttactttttctaaataacaatttatggtgagaaatgtttagtttattttaattgaaatttaatatacaataaaaaaaaaacctcgcatgttagacaagtataatcta

SEQ ID NO: 23671 - DNA, 837 bp, Arabidopsis thaliana landsberg
ttggttgtgctatatgtacaaatagttgtatcgtggcatgaacttggtgctcccgttccaaatatatgtgaataatatgttcaaataacatattgccatgatgttcaatgatgcaatatcgggtcgattccaatacattctctataactcaagctttacttttaagcatacatgagtcccatcattagctccaacgaacccactaaaatatagccaatatcttcggaactcgataaaattcttgtcttttcaaagttctaatatattcacatgctaataattcagttgccgtaagaacttctctaaactttctctgcacaatctctttatttcgtccaaatcttaaaccatcatctctttgaacttcattgtgtccacatattcatagaaacatcgcaactctttcttcaatacttatattcaatgttggctgaagaccataatttgtttgcaacatattacacaatgttgtgaaacatggaagtgacattagtaataactgaagtcaagcagcatcatcttgctgtagtcgacgccatatatttctccatcccaaacatctatcagtttggactggactttttgaaaataccgttcataataattcaaagctggttgaactactaacttttcaaattgttcgttttccaaattccacaactcaattctttcttcgtaaactagattattaaggtcttgtgatcgcaactgacatatacgaaatacctgaaattcaatacaaacgatatatgtcattagacataaattattttgcaaacataaattaaataaaattcaacatttaacttaataaaaacattaatcatttcaaaatat

SEQ ID NO: 23672 - DNA, 1486 bp, Arabidopsis thaliana landsberg
  unsure (1)..(1486): unsure at all n locations
tcatcgctcgaacttgggttggaggtgccggttgtgcttcttcctccatcacatgatcatcttgtgctcccccttgatcacacgcctcctgttgatgaacctgctcatcgtcttgagttggggaatgcaccgttgttgaggaagaaggttgatcttgctccaagtgctcctgtggtcgcacatcaccaatcgccatggtgcgcatagcggccgttggaacatcttcttcatctacatcatcaagatcaacaacttgctctcttggagagccattagtctcatcaaatacaacgtcgctagagacttcaaccaaacccgatgatttgttgaagactttatacgcctttgtatttgagtcataacctaataaaaacccttctacagctttgggagcaaatttagattttttacctttcttcacaagaatataacacttgctcccaaatacacgaaaatatgaaacattgggctttttaccagtgaggagttcatatgatgttttcttgaggaggcagtgaagatagaccctgttgatggagtagcaagcagtgttgattgcttccgacaaaaactggtccggtgtcttgaactctccaagcatggttcttgccatatcaatgagcgtcctgttcttcctctctaccacaccattttgttgaggtgtgtaaggagcggagaactcgtgcttgatcccctcctcctcaaggaactccaccacttgaagattcttgaattcggaccctattgtcgcttcttatctttttgatccttaagccgaactcattttgagcccgtctcaagaatcccttgaaggtttcttgggtatgagatttttcctgtaaaaagaatacccaagtgaagcgagaataatcatccacaataactagacagtacttactctccgccgatgcttatgtaagcgatcgggccgaatagatccatgtgtaggagctccagtggcctgtcagtcgtcattatgttcttgtgtggatgatgagtgccaacttgcttccctgcttggcatgcgctacaaatcctgtctttctcaaaatgaacatttgttagtcctaaaatgtgctctccctttagaagcttatgaagattcttcatcccaacatgggctagtcggcgatgccagagccaacccatgttagtcttagcaattaagcaagtatcgagttcagctctatcaaaatctactaagtatagctgaccctctaatactcccttaaatgctattgaatcatcacttcttctaaagacagtaacacctacatctgtaaatagacagttgtagcccattttacataattaagaaactgaaagcaaattgtaatctaaagaatctacaaggaaaacactggaaatggaatggtcaggtgatatagtaattttaccaagtccttggaccaaaccttgatttccatccccgaatgtgatagctccttggccatcttcatttttctcgtaggaggagaacnataaa

SEQ ID NO: 23673 - DNA, 858 bp, Arabidopsis thaliana landsberg
ttaaacttaaaaaaacttttaatatcgaaaatgacaaaatgatgtttaattttacgagacggagttatatggtgggatgagtttgggtcaatattaagacatgatgatatatactatgggtgaaatactagaattaaaaaccaagatacaattatacaattttaaaaactaaccaaaactaacaatattaacagaataaatataacactaaatttcaaatcttttagttataaaaatcattccgagttctatcatacataaaacaaacaatagcatatatctatacatcatcttaaaaacaaaaatttatttttgataaaaaatatagacctgtgatatacttcttaatatattattcatatataaatatattaactgaaataatttttttaactttctaacaaaaatatcaagtcgcagtgtaccacgtgtcagtctctggtaggggcagaaaatacacttcgatttctcctttttctaattaaaccaaatataacaaatttattttacaatattaatttccacgttacacattcattagataatacaagttttaaatattttttacctctaaaaaaaacaaaaccacaaaaaaagtaccgaactttaataataaattaatatacaacaaatatgagaacataaaacataaattatccaagctttagataaataaaaaatttaagaatatattattcatataccaataataattcctataaaaaaatatctataacttttcagtgaatatatacacccgcaccgcgggtcaatatctagtgaataagtaaataggagaaataaatggcaatggaatataaaagtcttaagaaaaatatcacaagaactgactttatc

SEQ ID NO: 23674 - DNA, 697 bp, Arabidopsis thaliana landsberg
aatctgtgtttaaccactagactaaggtaacatatttacaaaatatagaaaatagattgtatatatatttgttattaccatgagttaaattttaactatagttagaacgtccgttaaaaggttaacatccgttaagtcggatgtctgattttaccaaattaaaaaaatgaaggtttttaaagagaaaaacaattaacctatatattgtttgggcaaattatataatgcaggtattaaacaggcaaataaaaaataaatgaaagtttttttgggttttttctccaaaaaaaaatggagaggatgatttattttctttagttttgctcgtaatataacatataatatatatttaacattaaaaaattagattttggaaaaaaaaattacttgttgcgtttttcgacaaattcgctctgtgttctcatttctcatttctcatttttatgtaataatattaatatatgaaatacactttttagatttagtttttttgttaaacacttaatttaatactagttttttattgtgttgtgtttttttatgaatttgaaaatgttaatttttttaccaataattatgtctagaaaaattgttattttatatcaatttagatatttaagaattataaacatatgaaaattttctttattaccctaagaaacattattcataattcaaacattttattgtatactac

SEQ ID NO: 23675 - DNA, 542 bp, Arabidopsis thaliana landsberg
gatcccccaagaggttcgtgcggctgatgatgtgaaagctaagctagagactgcttctgctcttcagcatgatttgaagaccgaattagcggctttcacggatatatcaagcggtaatctgttgttggaaaagaatgacattcatgctgcggttgagtctgcgaggagagaactcgaagaagtaaaagccaacatagagaaagcagcttcagaggtgaaaaaattgaagataatagctggttcattacagtctgagcttggaagagagagacaggatctagaagaaactaagcaaaaagaaagtacgggtttggcccggacaaacgataaagacgcaggagaggagttggttgaaacagccaagaagttggagcaggcgacgaaagaggcagaggatgcaaaggcattggctacagcttctagagacgagcttagaatggcgaaggaattgtctgagcaagcgaaaagaggaatgtctacgatagagagtcggttagtagaggcgaaaaaggaaattgaggctgctcgggcgtcagagaagt

SEQ ID NO: 23676 - DNA, 532 bp, Arabidopsis thaliana landsberg
tgtatattccttgcgatacgattcccacattttctgataacatgtcaccattatgcaaatcacaaatatgaacctttccttctatgtgctagatgttgttcgagaaatgtttttatgcagtttcacgaattagacatacatttactttttacatacacaacttcattatttagtttatttgttgcaaccttttttatagaaccaacattaggttattctagttaatttactgctataaaggtcactaattacaaaatgtcaacgtatttctctactatacttaaagcaccagtttcaacggtcgtcatgcgttatgtttttataaaaagacccctatacttctttcaatcccgattccccagcccgaccccgaccccgccatccccgtccccgcgcccagaaatccgccgcgacatcccgtccccgagcgccgacgcccatcccgagcccgacaccgccgtcgcaaagtcggactgggcgcgacatgcgtcggcctgtccggaacacacgaccgttggcatcccgacgcgcg

SEQ ID NO: 23677 - DNA, 621 bp, Arabidopsis thaliana landsberg
  unsure (1)..(621): unsure at all n locations
aagggctgttcagagttcatgaattcattaattacatttacattacattttcggnnnnnnnnnnnnnnnnncatttcgcaaattcacctatactaaaacggtgtgaaaggaagaacgaaaaatacaaaggcacaatcttttttaaaaatagatagatatataattatcttcatcacacgtaacgtaatggacctagtaacctatacagcttccatacattgggaaagtaagaagaaaaaacaaataagggacaaagagttacttgaaaagaatttatagttcattttctacacattcaaagatgataaataactccacagcttaaagggaagctttactttacttttagctttctttttttgattttgttttcttctgtaccggaagaattgaaacgatgtgtatgatagatacattggtcttcctcccttcacaaaatggtgcatgtgcagattactgcctttggtgctttatcaaccttcttctctgtttaatcaaaaaccagtattcaactgttagttagctgtcatcaacaaacgtcttagtaatcacaaactcactttccacgactttctcaagtttgtgaaaaaaacaaatatgcagacaaatcttaaagactgg

SEQ ID NO: 23678 - DNA, 588 bp, Arabidopsis thaliana landsberg
tgatcccctcttcaaaacctgtcgacctaatggacaaagtggcgccaaatgaaccctagaatgccctggaaaagtttgaacccaagacaaaaccatttgacacgagttggcactggttttgtctcggtttgcacagggcagacagacaagacttggcgctaccatatctcctcaaccagaccacatctactcttggaactcacatgaactaggtagctctaggtgcagggaagagatctctcacaggcggtagggcaagattcgtacgcctggccgctcagcagagcgaagaacacgggcagaagcaacgcgccacgtgttcgacgcgctctgagctcgccagggcacgcccgcgcgcgccccgcgtgcccacgtcgcgccaaacggtcgaaccgacgccccggccgcgaccgcgcctataaaaccgccccagcgctcggttgccttcccattgcctcctcgtacctcgctgttttgccaagccagcattgcctcggcgactcccgcagccgccagtgcgccgagacaccacttggcagccctctccgtctcttcgtcgatcaagcttcaagacttctggtgaacgtg

SEQ ID NO: 23679 - DNA, 821 bp, Arabidopsis thaliana landsberg
gcatagatagaatatatgagagtagtaagagagaaagatgaagaagcaaagaaagatggtttgaaagagacgacgacgtccctccatgtcatgattacgatttttcacaggaaagatcagttccaagttggttggcaccgctacagaagcatggcttcttcagactctcagagataataaaacaaaaaacagagctcaatacttacacttatataataactttttatttacttatatatattatatttctataattagatcagatttaacctaataaatcaaactacccataattatgatgtcccaaatttggtaactattttatgattatttctaaactgtaggagcaaccccaactttgtatcttagctaatttttaggtataaaagtgattaaatttaatgaaaccaataaactttagctaagataaacatctttattaagcctcttcgtcactcaccaaaaaaaaaaatatctttattttattttttttgttaaacaaaaacatctttattaagatattttcttaaaactaagaagagcatatgtgttgtgttttgagtggatagacattgtgttgaaatagtttgttgtttcttaaaattctaatcgttcttaaccattgaagtagaaattggttaaacttcttcctaacttttcttaacttagtaaaaacaatattttaatttaaaataagcttaagatccaaaattaaaaattaattgattctaaaccattgggattgctctgagctcctttagtgaattatgtgttgaattttttaaatgtgttttggtcaaaattaagttatatatgaaatt

SEQ ID NO: 23680 - DNA, 933 bp, Arabidopsis thaliana landsberg
ttttctcgttattcacatcccatatcactaagtaaaaacaatattcatcatatacacttttatttcaagttgaaaaattgtagttaacctatgtgaaccagatcatagaactctaatgctcaccagtagtaccgttgtgtgaggtagatgctaaaacatgttgaaaccctttattccatgataaagaagagatttcactttgcatataagaaccagtaccctgcaacaagacattgtatatatcttttagatatatactccaaaaaggataaaattgcagagattttgaacttgtatagtacctttagataatgagaaggctttgaaggatttgctaaatcccaaatacaaactgtaccatcatcagccccagaagcaagttgatttggagacttatcattaaattcaagaccacgaacctatatcacaaaacaatgcatgtacacatcaaataacgatgtatatatatcggggaaaaaaaacaaaacagaagatacaaactcacaggtcctttgtgttttaacaactctctaacgtgcgcaatttcgccagactcactactaataaatacgttcaaaatccaatagtttacataatcagtattaattaaacacaggataatagatttcacttagggtttagggaaaatccccgaattggattccataaacagatgttcccgtagactagaccaccggttatgagtccatcggatccagagccatagcttccccaagcgagtcgattaaaccgctcggaactttggcattgacctactagttttagctcacgatcgttggactgaaaatcgagtccaaggatctcgagattgccggatgatctaaacgaaagatctactgctccggccattgttccggctgctatgaacggagattccggcgcaatggcaacgacagcggatctaccaatact

SEQ ID NO: 23681 - DNA, 895 bp, Arabidopsis thaliana landsberg
  unsure (1)..(895): unsure at all n locations
attactatcagattagcgggaaactctatcccccttatttgaactcttgcactggggcaaaatttatttgtttgggtcctctcaccaatttaactaaccctcataggcaggtacatgggtgctactggtatgttgtgtgtttctacccatgatgcagtcacaaaataatgcattgctccagtatcaaataacacatttgcggaatgagattcgactgagaacgtacctagtgccactcctagggtctcctgaactgtgtcggtctctaggtggttcacctttccatactgggcatgnggttgtctatgattgtttgctacttgctgaggtgcattctgtcttgctggggcattgggagctaactactgctgagctactttctttgagcaatgcgacgcccagtggccttgttccccacagtggaaacacgcacggcctcctccttgcgctggagctgcttggttgttctggttggttgctggggcaggaaggcgaggtgcctggttgctctaacgctgataatgatttccaccctactggttgttctaacggtactgctgctgctactgaggaaactgtctctggtactgctgttgctggttctgacgttgatgctggtgctagtgctggtgctagcactactacatgatacctctgtacaggcggtctggttcgccactacacaggcggttccaggaaccgcttgtggtgcaccgcctgtgatgtaaaacaacatcacaggcggtcaatcaaaaaccgcctgtgaaaaaaacagattacaggcgnnnnnnnnnnnnnnnnnnnnnngtgatagacacacatcacaggcggtccagttcaaaggaaccgactgcatacactataaatcacagacggttttcattatacagattca

SEQ ID NO: 23682 - DNA, 363 bp, Arabidopsis thaliana landsberg
ataaatcccggaccgtccgcgacctgagacagtactgtccggactggtcccccggaccgtccgtagtacaaatcaataaaaacacacagtccctgtccaaaaagagttatacacatgcggaccgtccgcgcctcacaggcggaccgtccggctataattcagggactgacccgaagccaccttcctctggtcaggactacggacggtccggccctaaggcacggacggtccgcagtgcaaaaagaacacagagacaacacaaatggtcaaacctcggaccctctggagaaacccgacaggtcggccccaaaggactggccagtccgcgtaaccaaaacttctcaaatctcaaacatcttttga

SEQ ID NO: 23683 - DNA, 598 bp, Arabidopsis thaliana landsberg
  unsure (1)..(598): unsure at all n locations
gttcttaccaatcacttgaccccctggtcgagtaacattgaagccgttcttaccaatnnnnnnnnnnnnnnnnnnnnnnnnnnnnnnnnnnntcactcgatgacaccactcgatgacaccactcgacccatggtcgagtaacactttgtcacaccacctgaccaccactcggacattcactctatcaccacactcgaccccctggtcgagtatcatcactcaccacccagcggcatcactcgaccaagcactcgatcacatcttcagagcctgttcaaatccgcactcaaccagagaagctgagcataaggaatagaagagaagaagaagaagtgtttggaagctgtccggagcttcatctgatcacgagacctgcttggcccattatcactctatgggctggtcagttgggttccggcccatctactatcattttatttcgttttgtataaataggtgtttgagggttttgtcctcagacatctagtcgacattcagctttttgctttagttttttatttctgtttacgtagtttactctggcggcaccactttgcttctgtaccgtgtaattcgagattttcccaaagttatcgga

SEQ ID NO: 23684 - DNA, 549 bp, Arabidopsis thaliana landsberg
tctctgcaccaaacaaaacttgtggtgtttgcaaaacttacggtgtttgcaaaacttgtagtatcttcatgtacaagagatgtcaccaccattcaaatcctctagatcctacaactcaaaactcatttcataagaccaaacacaagtaagagaacttaaacacaagaatagaacataatacttaaagcatataacacaactgaacacttaaagtacataatacacaacgtaataaactcatttcattcatgatcagaacttaaatacaaccaaacacaacttaaacacatgaacataacacaatgcttaaagcatagaacacaacttaaagcttagaacacaactgaaacacataaattatataacagaacttaaacaagaacataaactcaaaagcatatactaaggacaacatgtcagtaatgaacttgtgcttaagagccaactcgtagaaagactcattttttgctaggacactctctagtaatctgtccttacttagcttcttttttttgaaacagaagcttctctttaccattaagtagctta

SEQ ID NO: 23685 - DNA, 576 bp, Arabidopsis thaliana landsberg
  unsure (1)..(576): unsure at all n locations
acccaacaccggacaaaagccgggacataagccatccgaatctctttaagtctaatcgatggagacgaagccagccacggttggggaagaagccaatcgatgctggaagtttgccggccaacggtgcataacagagccactgatgccagaagaaaaagttttgactgcttaataagccagtgaaacgcccaatgaaattgcaacaaaagtttttataaaaattcttgccgacgaaatcatatcgaaaacttttctttctctctgaaaggagagagaagatagagagaaaagttccttataattttatttatctttttctttttcaatcaaaaaattgtggaaatattcaaataacctttaaaaacattagaaactatatatctaaccaaaataatccgattcaaacccaataaaacaaataatccggcccaaaaaacaaataatactacatttttaatatataaataacagttttatccaaactaaaaaactgtatctttaataaatnnaaacaaaattanaatttagaaaaaaaagtaaaaaaaaaaatcgaatatgattaataaattctaaaaa

SEQ ID NO: 23686 - DNA, 785 bp, Arabidopsis thaliana landsberg
caacagaggattcgtatttagggatcacatatcaaatttcagatgattcacgtttaagtatcacagatcaggattgggtgtaacggtgcaaaagaagaaccaggccaacccgcaaatccacggtgaaaaacatttctctaaactttgattttactgttatgttctgtgattcaactaacttttcaacataatccaaataactttttttttttttttagtttataattttatttagttttcaaatttcattttattttagaccatgggttaaatcttatacaacattttttgtttacacactttaagttattttacaatttaattaaatttacttaattttgaactttatgataataacttaataacatgaatcttattcatataaatatttagttatatagtaaatgccaaataatactacaatataactataagagttacatcttattaaatatagatatactttatagtttacaaaatcataaatttataaataataaaataaaaggaaaagaatcaacccgtagtgtaccgcttaataagttggtatctataatatttagattctataaaaagtttatgatattaataatagggtttgttacacaatgaagcactttcggagaaacttaattcactttagacactttaaaaactagaggcactttgtcttgcttttggagtgaaataagacatatatacccccactaattcgtttgagatatcactacaaaccggtttatggtttcgtttggtattggtttaaaatatacgattataaggta

SEQ ID NO: 23687 - DNA, 791 bp, Arabidopsis thaliana landsberg
ggtcctaaatatttatttgcctcatttaacaacaacttattgacaataatgcttagctaaagaacaaatattcgagatttaccgttctcaaaaagaaggccaccgagagaagaacatccaggtcctccatctaaccatagaagaagagggtcttcttttggattgttctcagatttgatgaaatagtagaacaattgtatgtcctcttcctctccaataccaatgtaccttcattcataagaatggcttatcactaaactcggacctcacaacacatagtttcattggtaaaaaggacgagacattttacaaacccggtttcgagttcgaaaggaagacggccttctaaaccaggaagagacttgactatagcagcagaatcaacatgacgaatcaaaacaagtagaagcaaaagcagatgctttagtgtcgaacccattttcttttaatttctttttacggaaaaaggatatttataatcattagaaaaggaaagttagactgcccttttgttatttttacaagtcgcttaacgtctctcttcaaatttgcttgtgtggaacaaccatttcggggagtcacgtggttggtgcagcaaccatcacatcaagtatttaatcgtttgtttttacattggtttataattttatatgatatatctatcattacacttgccacaaatttagtaatgtagggacattgcttttgtggctaaaattagagcgaatcaccaacaccattgatcaatcatggacaagctaacgctctcgtttttcttttgttgttaaccc

SEQ ID NO: 23688 - DNA, 622 bp, Arabidopsis thaliana landsberg
cagaggatcccccgatggcccagcagtgtgcacttccttccagggcctcttgtcccagcgcttgtccgactgcttgttcatgtccttccgaggtgccgagagtgcggggtttcatacctccggtggggtcttgagcccgctcgtccgcagtgatgtagatgtcggcctccctgaatagttgttgagaggtcgtgggcaccttctgaaggatggcggacgaaaacctaatcattggatccccgatagaaatcctcgatcacggatgcctccacgacctcaggaatgtggttcctcacgtttgaaatcttttgaggaacgagtgaagagtctcgtcgctttggtgtttgatgcagttgagatcccatggctgcgtcagttcgtcggagagggaatggaagttcgtgacaaaccggtggctgaaatcttcccaatcgtcgatgcagtgttgcaatagatgtcaaagccattgcagcatgtcctgccctaggacaaagggctggtacgctatcttgacgtcctctgttgcccagcagcctgggcggcggtcgtgtagactacaacagccctaggcttgcttggggcgtacttgcgacgtttgaactttgaagtaggagcccatgga

SEQ ID NO: 23689 - DNA, 546 bp, Arabidopsis thaliana landsberg
gaatatctttgtttttatatatcaaattaggaaaatctcagtattttatattaggaacaatgtcccacatcggtagttgagtaggattttatatttaaagattataaacgcttggattcttggttttgttttgggcttgaacgaacaacacaccctaatgacatcaccgctttactaattgacgtttccttgtgaggcaagcttaaaattaaagaaatggtatttttcatgtgagtctatataaaaagttctaaaaccccaattttaactcatcccatcacctctaaccctagctaggtcaaaggaaattccgcaagataattgtggatttcgattaacagagatgtttccttcaatatccaatatctctttatcaccatcgtcgctgttctcagcgtacgcgtccttaaccggattcttgatgctctttagatcgttgttcaatgatatcgtaccggagaggctccgatcatacatcaccgacttactcaaccggtttttcactccgaaatcaaagaatttgactatggttatcgacgagatcat

SEQ ID NO: 23690 - DNA, 494 bp, Arabidopsis thaliana landsberg
agcgtgaagcgtgttgacaggaacatccatcgtcctcaagattttccaaacatcattcccttcaacagtggcagggggattccacttcaccaaactaccaactccaccatctaatccttcaaacactggatcaacctgaacaacaggaatctccgatcttgtcccgggtgattgatctttcctctgaccagtgatccaagcacgtaaacccttcaacgcacgcctcaaaggtctcacctttctaatacggcaacactcctggtgaccatcttcatagaaagagaacaaacccttgttcctaactaaagcttgaacctcaacagcatcaggaaacatatactcaatccgaataccgtaatgtttctccacggtatcgaagagtctatatgttttctggattcaatctccctgtatccaaactgaatccccctataggtctttcagttaaatgagcatactcaatcagagcaacatctttagcttccactgaacca

SEQ ID NO: 23691 - DNA, 2945 bp, Arabidopsis thaliana landsberg
gacaggcatattcgtaactaataaaaataaaatacatatccacgtttttggtgttacaaatactgtaatttagaaagaaggtggattggttatggaagaatgtgcaaggagaaggaattgaataatttgagatatacatacaacttgggcagaagaatcagatgatcgacaacaattgcttatataaagaagagctgaatcgtaattcttactcaggtcactctctcacttctcattttctaccattgactcttcttcttgctccgtgatgtggcgttacatgtgtttaccgtttttactcttgctttggaacgatataggtctggcaaaggcttctgagtcgattttgttccctagtgaatccggatttgacggttctcggattccggtttgctcctcgccggatccgaacctcaactacagacctgtcatcggtatcctgagtcaccctggagatggcgcgtccggtcggttgaccaatgatacgagctcgacgtacatcgctgcttcctatgtgaagttcgctgaggcaggtggtgctcgtgttatcccactcatctacaacgaacctgaagaagtgctcttccaggtcagttctaattatgctttttttttttttggcttaagaattggattgcttgatttaagttatctttttggtgaattacattattggatctgcagaagctagaactggtcaacggtgtgatattcactggtggttgggctaaaaaatatgattatttcgagatcgtcaaaaaaatcttctatgtaagtttgtcctcatcgtttaacacgttttagtttttgctcacagtatatgaattccaatatttatgtttctcacagaaagctctggagagaaatgatgctggagagcatttcccagtttatggcatttgcctcggattcgagcttatgtcaattatcataagtcaggtgactctttcttctttccttgtgtacagattgaatggtttctaggttttgctgagttcaacaccatctgaatcctggaatctctgtctaagtaaagaatcttccatccctccatggtagccagggagctatagttttcatgaattaggatctgaaaatacaacgatgtagtttgctttgggatttgcagactctattcttaaacctctccaatcttttgtcattgtaacagaacagagacattcttgaaagatttgatgcagaggataatgcatcaagtctccagtttgttgataatgttaatatagatggaacattattccaaaggtgcatagttttttcatcatccttttttaggtttctgtttataaagccctcaaattattctcatatattatttcatatctgcagatttcctccagagttgttgaaaaaactcagtacagattgtttggttatgcagaaacacaaggttagttttgccatgtctagttttctgcataatatggaatataacaaaagttaaacttattatgcattatttgaagagaggaattgtgttgctctcttcttattattttgtttacctctgtggtatcttgaacggcgactatcttctcattctatatgcttcgctgatacgaattgttgttattatctagtatggtatcacaccagcaaattttcaagccaatcctgctttgtcaagtttctttgaaattctcacaacctgcattgatgaaaacagcaaggtaatatattcccattaaccatgaggactctatatatgaattccacaatctgaccttagtttgcgaaaagatctaatcatcatggtctgcagacttatgtttcaactgttaaagcaaagagatacccaataactggcttccagtggcatcctgaggtaaactgaccaattaaacttatgtttctactactaattctcagtgttgacaacattgattttagaaagaaaaaaaacaaaggtcttaatactctaaactaattctctgtagaaaaatgcatttgaatggggatcatctgcgattccacactctgaggatgcaatccaggtgacacagcatgctgctagttatttagtcaggtaagatctccctcatcaacgttttcacagttttcccaacaacattttgtgcactagttttctcaatgattgcgggttgaatgtgatgcagtgaagctaggaagtcactgaacagaccagagtctaagaaagtgctgagcaatctcatttacaactataagcctacttactgtggatacgcagggtaaagccactctgacaatctttacataattctctcttcttcttcttcttttttcttctaagttttaacgattcttaggatcgaataaaatggtggattttgcaggattggttacgacgaggtttacatcttcacacaacaacgatcccttctctaataactataacctctcctgtgtatcctctcgtgtgtatagtgaaatatgtaccttcgactctgttattatctgtgaacttgttgtaactttgaacgtcagcctatggcttgtgtttgacattaaactagataatgtacgcttttctatctttagtctaattcataaaacaaaacaaaaagcttatatatgtttactcactattaataagataatgaatctatgttttgttacataaaactttgtcatttaatataaaatatgtgatctgtctgtttcatgacattttataagattcgagttctgtttttcattcaattggtaacctgttcttctagaatttacagtttctgtacatgttatagttgttacataaaatgatcattacaagaatatatctgttgggcttagttaaatatttaatatatgggcccataatatatctatatgttgggctccacaaaatcccaatggcctgataacaaattgaatggtcttcattgccaaccgacagacagagtctgactagcaaaactttcccggtttattatttcttaaac

SEQ ID NO: 23692 - DNA, 917 bp, Arabidopsis thaliana landsberg
taaatgtatcttattatttttgaaattttttaaaatataattaaaattgtgtttaaaaacaactatatttttttattattttattttattttactaaaatgttaaacttaaattgtttttcaaaaaaattgataattttcacatttttctaatattttttgctatagattatgtaatagtatcttattatataaaatacggttttgaaaattatagtaactcacgagatcatgacacatgtcaattttaacaaccttagattttggcgcatggaaaacaaaattttcattgtaaaaatttgaaaatagaaaaagataattgtaagaaattatgtctgaagataattatagaaaacagtttaaggggttgcgtagacaaccgtttcgaccacctaaaattatgtaagttttatttcattgtattttttccatttataactatataaatttaaattataagtcttaacacaatatatattttgatataaattaaacaaatgtttttttgcaaattaatgtttatgatttgatattttctttacttctctctcttctctctctaaaattattcaaagagagttttccttcttttatctcgccgtccggtaggtttgctggttttagtatccggataaggaccggttgtgccgttagtctagccgtccgaggaatacggctttcgttacggtgttccattaccgtgtttattttatccggatttaattttcattagaatccgactttgggtcaggtgtatatggctcactttggtgccgtatttatgatttctttcaataatcattgttcttagtaccgatatctttttgggataaccttctcctcccgctttttaaggttacttgggttttgaagggctgaattttgttttccagtctaatccttgaccttttttggttt

SEQ ID NO: 23693 - DNA, 699 bp, Arabidopsis thaliana landsberg
aatattgtggtattcatgtatgatgatattgctaacaattacgagaatccaaggcctggaaccattttcaacatccctcatggaaaagatgtctatcaaggagttcccaaggtcttttgctttcttacgtttttgattgattctctcaatatgtgtttactcatttggttgggattattcttcgtatggcaggattatactggagatgatgtcaatgttgataatctatttgctgtgatccttggagacaaaactgctgttaaagggggaagtgggaaggttgtggatagtggtcctaatgatcatatcttcatattctacagtgaccatggtggtcctggagttcttggtgagttccgttatacacacagaaattgaatggttttggaccaacattttttgatgattctgtcttttatttgcagggatgccaacttctccttacctatatgcaaatgatctcaatgatgtcttgaagaagaaacatgctttaggaacatataaaagcttggtataaatcgtgaaggttcctctgaaatacttttgtggttggtgctgcctatgagtaatactaaaaggcaaacctgcaggtgttttatctcgaagcttgcgaatctggaagtatctttgaagggcttcttcctgagggtaaaaacatctatgccacaacagcatcaaacgccaaaaaaagcagttggg

SEQ ID NO: 23694 - DNA, 623 bp, Arabidopsis thaliana landsberg
gaattatcatagtataatacaatatcatcttttcaatgacaattgctaacatgtcatgtgatttgtatactttaaacactataaccctcttgcaaattattattgtctcattaattatcatcaaatattaaactactgctgctacatttagtgaaatactaacatgttttttttctttggtttgcttgtggtgcaagcagccttggacctaatccagaacgagcaagtgagtgccatcatcggaccaatagactctatgcaggcaaagtttatgatcaaactggccaacaaaactcaagtaccgaccatctcattctcagcaacaagccctcttttaacatccatcaaaagcgattacttcgtccgaggcactatcgatgactcataccaggtcaaagccattgcagccatatttgaatcctttggatggagaagtgtcgtcgccatttatgtggacaacgagttaggtgaaggaatcatgccttacttgtttgacgctttacaagacgtgcaagttgatagaagtgtgatcccctcggaggcttacgatgaccagattctaaaagaactttataagctcatgacgaggcagacctagggtttcgtgtccacatggcatcacg

SEQ ID NO: 23695 - DNA, 555 bp, Arabidopsis thaliana landsberg
  unsure (1)..(555): unsure at all n locations
gggtcctatttgacataacttggttttctttacaaactgaaacaaatantaaaacctattttgtattgtgcagtacacgttcacattcttttgaaacagagggtggcatgaactactactcgattttcatattttggatgagctattacatggtctaaatcctatagaaactgatatgatctttcatagatatctatagatattccataccatgacaaaagcattggacgcagttgttagatttatcccaacgccaccagcttttagagacatcaacagtacctatccaacaattgaaaaggagactttttaacttcaatttcgaatctagaaagtataagtattgaacattgcaatgtaatgcgactgcaccaaccaggatactgccatcttcggaaaattctttaaggaccttctctcgttgctgctgacttagcgtgccatcaagacggacaaatgaaaagttattcctggagataaattgtgctatattaaaaacattntattctcatactaccatagcaagccaacaatggtataccgagagaggggaat

SEQ ID NO: 23696 - DNA, 1608 bp, Arabidopsis thaliana landsberg
tctgaagaaagtttctcattgatttcatctccaaacaaacgtgttaacactggtacacatgttggatgaaattctaagagctttccaacatcaacctccgccattgacgataactgaaattcgaccattgatttttctgattttcaccgataaagctggttgcaatacgaatcaaaacttcaaacacttgaaatcacggataaaaggcatcttaaaatggtgaatgaaatttcttcttttcttcaacattatttgcaactatccctgaaatttctgtaatccatatacccaacatgacgataaggagaaaagccaccaactaaaggttctaaatagatctgattcaccatagatggtaaagcctcgcttcaaatccaacgaacataaaaacacttgtataaactagaaacatataagataggtgtgtcatctctcatgaaactctgtaaagacagagacgatagacaattcccttttattggaagcagacaaacaacacctaacaaaagcaacgacataaaaacatggcaacggaaagccatgtctacgacataaaacacgacaacggaatagccatgttgacggcaagaacacggcaacggaatagccatgttaacggcggtgaaagacaacgacaaagaagaacataaatcaaaatcctagagagagaagggagagaactctgacaccattatttgaactatatttttttttttttcactggaaagattatgtttattaatgatccacagaatacatcccaacaaaggtccacttagttacatttctttaaaggaaggatatctctttaacaaaacacgatcgtataacaagacacgtgttgcaagagaagcgatgaaacgttcctgtcatcctttgccgtcaaagactccgatccggtgaacacaatcaacgtcgaaaaagggcaaacatcgatttttgtttttttctcaccggaaactgctaaacagagaagggaggatacacaaacagagaattcaattccatctgcatgccaaaatcatcaatcaagagatttggcaaaaacaggtaatgaggaaagaaaaatctgagtattcctcaaatttgatcgatcgaagctccataaacatgtagaaacggctacaggcaatcccaatatgctggaaacaaaacttcctttcatacttgaggtaattctgcaaatcaaactttctaaagatacaaatccgaaaacttaatcttaggctattatgacctaaaattaatctccaattgaaatctttagaaattattgaaagaaaaactgaaaaagaaactaaagcaatcagtaagaacaaccgatcgaacggcggaggaaggataaaagccggccaaaaccgcttgtagaagccggatttgccagaagaggaccggccatctttgcttacaaagccaaaaagatgccgggcaaaagcccaaaacttgggacggcagaccaccagaacaatccgggcgggagaattcaacagtgactgtctctaaaagatatgaccgagagaagagagaggagatcatatcatttgaactatccaaatatgcactctttctgtccaaaattttcgtcatatattgccgggcatacttaat

SEQ ID NO: 23697 - DNA, 358 bp, Arabidopsis thaliana landsberg
tgatatatttgtaatatggactaatcttcacatttctaattattattcagtttgtgtagagaccatattgatgaaggaggtttttccggcaccattgggccctaacatgccaaagcattctcctgaaggcactgcaagagataatcctcgaactgccattttttgtgggttcccatccctacatggatacaccttcttcagattgtcacatacaatcgcatggcctgtgctcgtctcaagcattaactgctcaactttgactctctgattgaaacaaatctcttaagcaaaatagctgcataaacgaaaaacaattgtgaaacgttttgcaatacctcatgtgcaaccatctaatttt

SEQ ID NO: 23698 - DNA, 585 bp, Arabidopsis thaliana landsberg
tgacttggcgcgccgagcagtcgccgagcttcggcttgtcgaggggtagatctcctcggaggagatattgcaggtacggggtctgccagttttggtttggcgcaaccccattctactctccctagatgcgcaaggcctcaccctcggcggtcgagggtacctcgggctgggccgaggtctcgtcgggttcgggcgcgtcgtccagtttcacggagggttgatatatgtccctggagaagacgtccgggggaactatcgtccgccccgaggctattttagccagctcatccgcagtctcgttgtaccatcaagcaacatggttgagttccagcccgtggaacttatcctccaagcgccgaacttcgtcgcaataggcctccatttttcgatcgcggcattgggagttcttcatgacttggtcgatgacgagctgcgagtcgcctcgagcgttgaggcgccgaacccctagctcgacggcgatgcgcaacccattaaccaaggcctcgtactcgaccacgttgtttgacgctgggaaatggaggcgaatcacgtagcgcacatgtttcctgaggggtgagataaaga

SEQ ID NO: 23699 - DNA, 621 bp, Arabidopsis thaliana landsberg
  unsure (1)..(621): unsure at all n locations
gagtccttaatcgagacttttgtagccgcgtttcctacagtcacaggtgtagcagatttgtttgcagactggttcactgaaggagaattaagcataaaggatgacagcaacggatcagaatcgatattggttgaagaagtgaaacttgaagatccaccaagaagagactgtaggtttgcttcccggagttcctttttcaaggcgagataggtagagctatatcctcctcttcgcaaccttctccttcgctgtacgtaaaacctctcatcaaggaataaacacaagttctaccaacatgattgtgtactaaataaagaaccaagctattcacagactaagcatcaaatattggaaataacaaatatcaagatgtcgaaatgtgaaaggatatcttaaagaaattcgcatggttgcgtcgtaatatggccaacgatatccaatcccaccctcttagtgcatacaggacagacctggaaaaaacaaagaacacatttttaagtccacgtttaagaggaaacatgagatgtagctaaaaaagtagcagtctgggtcatgannagatcactaatattaccgaccgaataacgaaatattcaagattggattacaggctgctaatga

SEQ ID NO: 23700 - DNA, 2018 bp, Arabidopsis thaliana landsberg
  unsure (1)..(2018): unsure at all n locations
tacgtataagatttggtcaaattaaaattataatgatgtgtagattcataagagttgtttcatatgcatacgtcataacatatactggatattatggtggatatatatatgcgtgacttgacgcaactttgaaagactccattcttttcacattttattcaaaaaaaaaacaatgaagatgtataagtgatgtctttcttgactaggttcatgtttcatcgtgattgtttttttcttttaatttcaataaaaactattacatgtctctggaacatgaagtcggcatagcatcattaatggtagtntcnnaacataatcttaatatagttatgaatatttttataattaattttgaaaattttgaagttaaaaattggttaagagattgaaattttggcaatatgcaatggtggactcttaacttgagttcttaaaaaaaaaattgaaaaaaaaaattagaaacattataatttttaaaaaaacttaataattattacaactcataaaatttgaaacatacatgacataaaattttaaacaaatatgacaaacaattatatggaatacggaatttatctaagaattaagattaattgaattaaaacattacatttaatacctaatttatctaagaattaacctaagaaacattagatttggctcttatataagagccattcttaacaattaattgaattataacattaaatttaagacctactttatctaaaaactaacctaaaaaactatcaataatgatggtcttagtgacattattacctgcccattgttctattgcggtgccttgcaattgttcggtaatatctctttatagaacaactctaattaatagcaagattcgtactatttgacattgagaagcgtcattttttactatgcatatcttaccaaaatagctccttaatattattaggtattattttcttttcttttgaaagctatatatcctaaaatggtagaaataagagaactatcgatagaacttagtaacaaacttatatattaaaaaaaaaaaacgaaaattgtaaatgttatttacatgtctgttttactccactaggtacgtacacatttactaacatcaactttcaactacactacgtacacatttacaaacatttccatattcatgaaaatagaaatattcatgaaaatagaataatctgttgagacaaaataaatattgccgtaaattgaactcaatcgtagatgcatgagttttatttacttcttaattcaatttacggcaataattaatttgtctcaacagattattctcataaacaatgaataaaaatgttgggattttcagcctctacaaaattgcaaatgttatttacatgtcagttttactacactacgtacacataacacatttactaagatcaactttcaactacactacgttatgtatgtagttactagtaatttccaacaaaaataaactccaatagacagttccaattacttcaaaccaagtaacttataactatattagaatttatcagaaaaaagtatattagaagcaagcttcacattaacaacaaaacatctcaccaaagaaaaaaaaacgttaacaacaaaacaaaagaaaaacttatatattggcctattattataggatccctgcaggatgctatatattaaagagatttagaaaatctagtagcttatataagcatcgcatgagacggatagaacgtaaagtcgtcacctaaggttaatattgattcttggattagcttcgcatttaattcgttaatatttttacgaaattttgcaaaagaaatggcgttggccgttgggactatcagaggctacaagaaaaacttgtttgaatttgtgaaaacatgtgctattgccggtatattaaagatttaaaaaaatggaagaggtagacagagcatttatggagagtggtgaattgcttttaacgacgcggactttgatgccacattatcagcccatatatacccagtctcttatgttcatacaac

SEQ ID NO: 23701 - DNA, 4061 bp, Arabidopsis thaliana landsberg
  unsure (1)..(4061): unsure at all n locations
caaaagtacaccgatttggaaaaactggtcaagattgtcaagttgaaactattgtctccatatatattggtattctataaattacaaagtagaggcataatgaaccaaacagcaaaatgaaagaagcactttttggtttgtatcttgttcttttggtttcgagcttagaagcagcagtgacgaaaccaaattctggaaactttattgaatgccttcggtatcaggctagtccggagaatccaatcaccgatgccatctttaccgtcgataacaccaccaccttcttgtcttcttacgtgtcatacacgaaaaacacgaggttctcgaaccctaacaacaaaaacctactagccatcgtagtggcgaaagatgtatctcatgttcaggcaacggtggtctgcgcaaagtccaatggtatccagatccgtatccgaagcggtggtcatgacaacgaaggactttcttacgtgtcgtctgtgccatttgtcattcttgatatgcacaaactgagggatattactgtcgacgtgtcaagcaagaaagcatgggtccaagctggtgcgaccttgggagagctctacgtgaagatcgatgaggcaagccaaacgttagcgttccctgctggcatttgcgctacggtaggagctggaggacacataagcggtggagggtatggaaatctgatgagaaaattcggaaccacagtggatcatgtcattgatgctgaattagttgatgtcaacggcaagctcttgaatcgatctaccatgggagaagatctcttttgggcgattcgcggcggtggtggtgcgagtttcggagttatactctcttggaaaataaacctcgtggaggttccaaagatctttacagtgtttcaggttaacaaaacattggaacaaggaggcactgatgttctctacaagtggcagcttgtcgctaacaaattccctgaagatcttttcatgagagcatggcctcagatcataaatggagcagaacgtggcgatagaaccatcgcagttgtattctatgctcagttcttgggtccagctgataagctgttggcgataatgaaccagcgcttgcctgaattagggctaagacgtgaagattgtcacgaaatgagctggtttaacacgacgttgttttgggccgannnnnnnnnnnnnnnnnnnnnnnnnnnnnttctagataggccaacgaatccaggattctttaagagcaaatcagattatgtcaaaaaaccaatcccaaaagaaggattagagaagctttggaagacaatgtttaagttcaacaatattgtgtggatgcaattcaacccttatggtggagtgatggatcggattccgtcaaacgctacagcatttcctcatcgtaaaggaaacttgttcaaggttcaatactctaccacatggttggaccctaacgccacagagagtatcctgagtattatgaaggagctctacgaggttgcagaaccgtacgtgtcaagtaacccgagagaggccttctttaattacagagacattgatattggaagcaatccaagcggtgagacagacgtggatgaggctaagatctatggatacaagtatttcttggggaatttgacagagattgatggatgttaaagctaagagtgatcctgagaatttcttcaagaacgaacagagtattccccctcttttatcaagggtgaggagagacgccgaattgtaattgttagaagaaaattatgtttaccttaactctgcatagataaaaggttgaaatattggattgtatgctctaaattttactagaaatttgaaatgtacactacaatattttaaaatttgttcggtatcttattattctctcaaaaagactttttgcacttaattaataattaaaaatttgagaaaaagaacaaaataaaataattaggaaaaatagtttttacaaatattattaaaaaatctagaaaaactattcattttaaaaaaattatactcaaaaagtttttttttctttcttgtaatcaaattatgaaataaactatgacttttaattatgtaatcaaatttatctagattctgggttaatttagtaaataattgagatgacgattcgtttaatattactggttcatcatccgtcagtccttgactcgccataccaaaggcatatcctaatgcaacccctacaggaactgccacagcattcccaacttggatgtacctacaaaatttagattcaaacccagtttttacatacattaggatctccagttcaaaaacaatcatatacatagatagaaaagcagcaagaaccaaggacttacttttccttaattgttccacagagcttgtaacaatcagggaacccctgtaatctcgcattgtcacgaacagacaacacacggttttgcattggatggattacacactgcatcaaccagttttaataaaccagccactagagaattctaagtggaacgtacccagacacatgggaaatgaaagcaaaagggcttacctggttgtgaggttcagcccttgtcacaacagtgttaacaatttcatcaccccaaagtctaccaaacggcctgaaattcagataacagatgtgttacttttaatgaatttaacatgcttacgttatggaaagaagatccacaagaagcatattagttggagaaactcacttttttgattttccttttatgaatgaaattgcataagcagggacctgtgaaaaccaaaagacatgtcatatagaaggtgcaaaaagaaactagagcagaaaaatgataaggttgcgagtggtttattttataccacattttttccagatttcaactttgctcgaaacctaggattaatttcccctctgttgttgtgaactaaaacaccaggcaaaaagcgatagtttgccccctgtaacaataagaatacaatgacatgaacaagaaatgattatatattgaatgcttgaagcacgtacttaaaaaaggtcgcaccttctgttttggtatgtaggaaactctttccaagtcatcatctcctaatacgaggggttggtgatcaaacaacctgcgtgtcggatctccaccacatgcgggtaacagtgtctctgaaacaagatacgttagtattggattagtagtacctaccaaatttacgagtttaaaatgctcaccagatcttttgaggctaataaagttctcaaactctgtcttaggagcagcatcattataatccatcacatcatttgccacataatttgtcacctgcagcattaagagagcagtgatcagacagatatattgtaacataatcatcaatggcagttctgaagtttagatacacaccggtggcagatcactaatagcatcagcctgtaagggagaaatgactaaggatataattgtaaattatagatacctaattactcttgtaatcactatatatattgtacaaacatctatgtaataaactattgagcctcatttcatacatggtatcagagcttgtcgatacctaaatctaaagaaaaaaaaaaagaaaaaaaaattccctaccgccgctctttcttcttctcttttccatctctctttttctctctcttctttcacgatgtctgattcaacctccccagtatctgtctccgagaccatcgccgtctccacttccaccttgctgaatgtcaacatgacgaacgtcacccgcctcaccgattccaactttgttatgtggagtcgtcaggttcacgccctacttgatggttatgatctagccggctacgtcgacggatctatccccatcccaaccccgactcgcaccactgctgatggcgttgtcactaccaacaacgactatacactttggaagcgacaagacaagctgatttatagtgctctgcttggtgctatatctctctctgttcagcctcttctctcgaaggcgaacacatctgcggagatctgggaaacgctttcctccacgtttgctaatccgagttgggctcatgtccaacaattgcgtccagcgtcaaacaatggacaaaaggaacca

SEQ ID NO: 23702 - DNA, 881 bp, Arabidopsis thaliana landsberg
  unsure (1)..(881): unsure at all n locations
tgagcaataaacagaataagttagtagctacaaaacacaaaataaattggtgatctttagcggttgcttagcctgtttgtcctttagggggggcctggaaacatgcctatatactcttgagattagttggaaattttgacaaaattagtataagttaagattggggtaaagaaaaactaaattaaggaagaacataaatagtttcttctaatcattgaaataataataaaaagaattattaactaaacaaaagccggcatgatgtatgaaaacttaaaagtagagtcatttgatcaaagatccttgttacatataatccattctcatctcaggaccacaaaacaaagaaagcaaaggcatgattggccaaacatctatataagtatatctctaaccctctgatcactttcagacatcaacttttcaattatttttctttctcttcttgacatttgataagaatgcatgacagaaacatacatatatggccgtcttttgataaaccaattacatcagtcgagtacatatcaaaatgagacagaaaattgaaaacatacaattgcttctttatccaaaataatgttacatgtatataataaaaatatttgaccttttaagttatattgtatttattaatgataaaagaaaaattataagggattctatatgaaaaacaaataacaatttttgtgtatatatgatcatacatgtaattaaactatgcaggaccaggctgctcgtcgattgcttatggagcttcggaggaaattggaccatttcggatcagcaaaaccggacaaaacaattatctcancnncttttcttggaacngtgattgtcnctnagttaattttagacatgcttcaagttagttctttatt

SEQ ID NO: 23703 - DNA, 626 bp, Arabidopsis thaliana landsberg
tctctgtgttgttgcagatgaagaaactggttggtactatggtcaggttatgattttttttgttatctctcgatctttggttaagaagccatgtagaagaaaacattttgttgcttaatgtaatctctaatgatatggaacaggtatgggtgaaaacaccagaagtcttggcacgagaccgtcttcttggatctttctcggtaagctatccatcatgaagcatgtcaaaatccttgaatttggtctaatgtatgtatcatatttcaggggtctgctaaagtttctgtattcgttttgtgtgtgtgtgttgtttttccaggtaaagccagttcttgcgagactgaaaaacacgctagttattctcggattatcgctcattcttgttataaaccttggtgattctccaattgcaacgtcttatagaacatacagggatcctagggacagatcctcgctgccaatcccaggagcgtacaatgatgaaaccgcaagaactttcgaaccagaagctttctgcggtgaaccatcttccgatcttttttgaaaatctcttcatcacaacgcaaatacagatagtttctgatagtaaatatatctgtacattcctgatatttcgataaatggat

SEQ ID NO: 23704 - DNA, 1036 bp, Arabidopsis thaliana landsberg
  unsure (1)..(1036): unsure at all n locations
atactgactcggattaatattacccatgaagctaaaccagtctcatgccattatgggcgtaatttcttgaaagtgagcagatttggttcttcgatttttatatttatttcattaccattttttcttttgtcacagatatttattcatttatctttctttcttttttgtcaaagatactttttcatttatctttcaagatcattggtttctagaagaagttttgaagaatctataatatatggactctgccacttcacctgcccaaaatctttgtgatactctttttttcatatacttttatttatccaaattaccatttttataaaaatatttttcaaaagaaccaactctctttacagcatttctaatgaaaatatttcactaatgaaataataatattttatatttatttattaattaatgaaattctgatttgttaaaagttttgaacaaatcaacaagagacaaataactagaacaaatcatgcgcggattcttgcatgaaatgaaacttgtgacatggacacatatattctagggtttattagcaaactatacactttttcaaaagttatttgagaaataggtagtttttttagatattagagaaataggtatttttttgcttttgtgagatagaaaatatgtgagatagaaggtacatgactaaaaaataaaataagtgttaaatacaattgtacccttttgtgttgtgagaaaaaacttttgatatatgcccaaatcttttggagataatgggtcaaatactatttttatagcccaattagtttgacttatgttatttggtcccaaaaaaaattccaatcgatttcgtttttttcagtccatttcttccaacggttaaatttaacattatatcacttttggcgattaaaaagaaattttggaaaatcctatggtttacacaatttttaatgaaatacggaatggtgtacaccattaaaatcatgatattggtgacgagatggtgtacacaattcttaaataatntaatatacataaacttaatggtgta

SEQ ID NO: 23705 - DNA, 765 bp, Arabidopsis thaliana landsberg
cgaagaacagtcattttgaaaacaaaataaacaagataagagtcgaaaaatgtcttttgaaccaaacttatactcttaccccaagaaagctattatcgttggtaaaagattaaattgcaagatcgggaaatcaaatcacatattttgaccaaaaacaagttttgcacttttagcggaaaatgcgggtataggagtttagctgaaaacatgtttctacgattttagtgaaattgagttttaacgaattaaatcgtttactctcttattttagcgattaattattaatgtttttaattataactaatattaaagggcttaattgggtacccaattattagtgtgaaccccatttagtatatgagtttaattgggttaacccatttaacctcatttaactctttcccctaaatgagtgcagttgtacccagtaaattgttaatttgctcaagggtaaaccctttcatctcgatccttttgaaattcaccttgcacatccttggacaaccggcatctgcacgctctttttcttctatgaatctttccctaagtgatgggattgcctcaaatgctaaaaactacacaaaatacatgcaaatttaattgttagcttcaattagtacgaaaatgtaacaatgataaaacatgttacttacctcaagcggcatacaaaaacctggaacaggccatggtgactgagtgttcggcacgacaccattaaaatgatccaatgtgtgtgaagatcgattttaacatggactacccttt

SEQ ID NO: 23706 - DNA, 721 bp, Arabidopsis thaliana landsberg
aaaaaccaaatatatttacatattttactataagtttacccacgcttgatgtgagactttttctagttgtttgtattgaaagagataccaacgagaagagaggcggagagaccataaaaatgacgatgaataaaattaagattgttgtggtgagcatgattttttctgtttccagcgaaactcacatgatccgaattgatatcgggtgagcttattggatttgggtcacggaaactcatgggttcggatttttgattgagagaaatgaaagaagtgaaggaagtttttggggttttattaatggcatagaagggagacaaaatcctattgaacacttgtaaatttccaagtcgccaatattgaccgattttttctcatgttttgcattttgtttagttgatttatcttctcgatggtttatgtgatttgagttttcatcgaggataaggttttattctctactcgagaagtttaaattatgcatgcataggtattatagatgcgtggttagcttttatatacttgataccaacaataattttgagattatattgaatattttaggtttaaattgatgtctttggacaacaacattctgacaacaagaagttatatgtatgaaataatcgatcatacaactaaggatatttaaaaagaatattgtcaaaaattataacgtatataagttttggaaaaagaaattttatttcatgagaagagc

SEQ ID NO: 23707 - DNA, 598 bp, Arabidopsis thaliana landsberg
caacttcttcgtcagctacctacatttggttctgattctttttctttttttcgtttgaccttttgtgttgacgatacttgcttttcttttcaattcgtcacactttcttttgatttcttaaacttctttggttgagaatgggttcgatgaataatcctccgattccgtcaagtttacgtccacctctggcgaatctttctgatcaatcgcgttatcagacggatcaatacgagaatccgtatcatcttcatactagtgaccacgcaggtttggttctagtctcagatcgtcttaatactgcttcggattttcattcgtggcgtagatctgtttggatggctttgaatgttagaaataagttgggatttatagacggaacgattgttaaaccaccaatagatcatcgtgactttggtgcctggtctcgttgtaacgatactgtttctacttggcttatgaattctgtatccaagaagattggacagagtttacttttcattcctactgcaaaaggaatttggaagaacttactttctaggtttaagcaggatgatgcacctagagtatatgatatagaacacagggcttagtagattga

SEQ ID NO: 23708 - DNA, 913 bp, Arabidopsis thaliana landsberg
gttgaaattcaagtgtgcctctaagttttggtcatctctcttgtcctccacatatttttgcagctgtttccttaagctctcatctcaacctcgtctttacatgtctttattggataccaactactactccaagtctcggctcctatccgccgctccaagctcgttgtcttcagctaccatagtattcgaccaagatctgaccatccgtgggatgggtggctacgacccacgttttcttcatggctttatttgcttcatgtatgagctaaacgtgcggatctataaccgcagcaccagacaactttatatcatacctgctattaacgaatctgtcatcagagctgaggatggcgaccttaatcccgatccttatacaccatccaatattatataggccttcatgatgactccatacaaacgtctcggaggcggagctaacaccgtagctgatggacagcaccggaactgctcttggtgctgagattattggcacatttgtcttggtttacactgtcttctccgccactgaccccaaaagaagtgcccgtgactctcacgtcccggttagtaaaactttgcaaaccagttttgtataatttataattattctaaagctgaattttttactgttctttcatggtttcaaaatgtgattgtgtaatttctaaaaatagttattcttttctaaatttttcatagatttcatgatgggtttttctttactgttttttcatgattgaaatttttgaacatatttctaggtatttaggtttgtgtagttaataaagttgaatttttctgaatatttatcgtagggtttgacatggatttttgtaatttttaacaagttgaattcttttgaattttttttcttatgatttcacatgggtttgtttaatttctgaaaaagtct

SEQ ID NO: 23709 - DNA, 138 bp, Arabidopsis thaliana landsberg
gcagcgcaccaagaccaacaccggaaccggagcaacccggaacgacgaccaggagccgccgttaaagacaacaacgaaaaggcctgggacgaccaagtacgtcacaaacccatatataaacacatgagtgcaaaagag

SEQ ID NO: 23710 - DNA, 1122 bp, Arabidopsis thaliana landsberg
ggtataaagcctatgtaacaggccaagattttacacatttaaaaacaaacaaacccacaaatagaaaacatacaaacccacaatgagtgagtgatctataatatctcaatggcaatatattacaactaccaaacctgcttcgaaggactcttcatcaatatattgactagcatcaagttgaaactttatcgatatcactagtatttgctcaaacataatatctaaacaacagctgttagaatgttatcacgatttctacaataagaaaaatccacaactgtatcatatattcgagcatttgttgatcggtttcaggaaaactctcagaattggcgttccatcaagaccgaatcattgtttcctatgtgacttcttgtgctgtttcgttttggaagacacaagtccatttgcaagatcaaacgagctaagatcatctagaacttgatcaagaccaagactaggagcttcttcacctttcttctcagtctgtgaaccttctcttgtttccgctccaaagtgtcatccgctgtctcgttttcatcatctcgggttatttctggaggcattgcaaaatgtggaagctgaccttcaatgtaatctttcagaatctgcctagctgctctagtctcatcaggtagtccactagaggcaacataaccacgagagaggcagtaagttcttagaagctctgaggcaagaggtgggcgggactgaggttcataggatttgggtttaggtagagagatgttgtacacatcctcaatggcatgtcgaggaacaagttcagccacaaccttaatagcttcaaggtgctcggtcatccggtctattggaagaactccagaagcaaccatttcatatcttgagcttgagaatgaagggaagactaaaccagggcaatcgcagagcattagatcctcagagattatcaatgtctggaaatgctttgttttcccgggggtagatgtgacaccagttcgcttctgacctaccaatgcgttgattgtcgaactcttccccacattcgggtacccaacaaagccaaccacaacttgttcgcagtgtgattcagtagaagttgcgggaactcctctagatttcctcatttttactatctctaga

SEQ ID NO: 23711 - DNA, 1104 bp, Arabidopsis thaliana landsberg
gccataaggaaggcaggagaatagaatctccgtcgtgatcgtgatcgggcgaattattcggatgtggcagtcgtatctaatggatctgtctatgtcaatgcttttacttttcatcagttaagacagtatcattctccgcacttttttcccactctaactaactctttaagtcgtttctcacgctaaatatatatatagtacatgatattataccaatatacgaattggtatatagtgtaacagcattgttcagttttgtcactaggtaatttcccttgttagatctgagtcaataaatcttttccttagttaaattcatgggtgtcaatcaattaagttaaagaaagggtagaattgattgaaaactggagtatttattaatacctgcaactatgtaggtaactagtaggtactcattacgatctgtacttttttttccatgactccaaatgatccttaatagaaatatgtgtcaacatcaaaattctatgtaactttctatttttagtaaccaacacactactagttttgcagtttcaaggtccctttgtccctttctttagttttaaatatatattttaaatcaggcacactttgtggaaagagtagttttctccatactttctctccatctctcaacttgacctttgcaaacacatcactcactttgttcttacttctatgttaaaaggtttagaagtctcacattatcactccatctatatatgtagacaaacacaaagatatttatgcaaatgatcacagcatatgtaatgttttttctttacacatgacaattaaacaggagtcacaaagagatggagaagagattcaagatatggacatatagagaaggagaagctcctctgtttcacaagggtccactcaacaacatttacgccattgaaggccaattcatggacgagatcgagaacggaaacagccgttttaaggcggcttcaccggaggaagccactgtgttctacatccccgtagggattgtcaatatcatacgctttgtctatagaccttacactaactatgcacgtgaccggctccaaaacattgttaaagactacatctctttcatctttaccgttaccc

SEQ ID NO: 23712 - DNA, 1584 bp, Arabidopsis thaliana landsberg
  unsure (1)..(1584): unsure at all n locations
tcgtctttcttaatcagataaaatcttgaattctcaagactttgcacttcatttttttgtttccagcacctgctttcctcttccatggataagactgttcgtctatgggacttatctagcaagacatgtttgaaagtcttctcacatagtgactacggtgagtggatataccatcctattccccaccagtgatcatgatttacttttcttcttagtctttatgaaactaagcatatattgttagaagaatattaagtcattttaggtgtcaactctgttctggaaagattcatatgtcaatataatgtggtatgaatcaagcttcttccacttgtaaataaatccctgaaacacaagaatttctatgttggttatgtaacataaaattttctctcatctagttttctgtttcctcgatacagtgacttgcatccagtttaatcccgtggatgacaattacttcatcagcggatcattggatgcaaaagttcggatatggagtattcctgatcatcaagttgttgattggaatgatcttcatgagatggtcacagctgcttgctacacaccggatggacaggtatgccattaaaagtttttcttacattgaagtgactttgggtaaaactaaatcacgcagtaccttaataaagctctcttggtttgtaaagggtgcattggttggttcatacaaaggaacatgctgcttatacaacacacatggtacataagctgagaacttactcatctgaaacttgagttgtttctccatctcgtcttttgaacttattatcttttttgtttattcagataacaaactgcagcagagacgcgaaatcaatctgaagaacaggaaaaagaaaacccatcacaagaaaatcactggttttcaggtaaagctaaaacaacttacaccgttctgttctcatcttttcatttatactacaattttgttttggatgctgtactggtttatctgactattctcgtgaaactttcacagtttgtggcaggaagttcatcggaagttctcgtcacatctgcagattcacgtacgcgtgttgttgatggtgttgaccttgttcacaagtttaaaggtaaacaatactaagcttaaaactctcttctccattcttagaactcgggagttaggaataactttattgttcatggaggtgaatttctcgctctatcgtcatctaagatacacatgagtcccacatttcatgaacatgatgttctttcgctttttcttgatctggtgttggagtaaaatatgctcaacgctcttgccaagtaatgtgtgtttttctgagttttagaaatttttcgggttcgcaggatttcgcaacacgaatagccaaatctcggcttcacttacatcaaacgggaaattcctagtatcagcaagcgaagactctaatgtgtatgtatggaactacgactcagactctcgagcaggaagaagcaaacgtgtcacagtcacaaactcatacgaaaacttttattggcgtgacgtctctgtggctgcaccttggcctggcanaatcagtaacaaccacactaacaacagccccgacagtc

SEQ ID NO: 23713 - DNA, 1268 bp, Arabidopsis thaliana landsberg
  unsure (1)..(1268): unsure at all n locations
ctgtgtggcttacgtgtctcaagtggctcggggaaaggtcaaatgatctcaggaggcaagcaatctcagttcatgttcctcacaacaatcattcaagttgtctcacaataaatacagtttggaatctcgttaacaccaatgtcataaacaagattcagggggaagagtgtattcggattctcccgacgttagcaactgggaagatgctatggagtgggaactaaacttggccaagtctatctagttattgggatccaatatctgcaatcagattgttgatgaagccggtcttgcaattcgacttaaaactattctgctggctcaaggctatattctgatggaagacgagtcaaagattgatactcatcttgctagatgtgaatctatcaggtttctgttgggatgtgcatgtgcagcacatttttatgtgcatcagatggtggtcaagaaaggaataatgagtagtgagcctcggagggattggtttgagaatcaaccaagagcattcgggagtccaggaaatccgtactcggctcatagattgaaaacaattgtctactgtttaaagcaactttcagaaacacactacgagcgtctgcctatgtttctagaagaaagaggttctgtgcgcagtgttcatgacaagatattgtttgtgttatcagacaacaagggagtgttgttggtacaactgtatggggacaatgtgctgtatggttcaaaaagtnnnnnnnnnnnnnnnnnnnnnnnnnnnnnnatcactagagagtttgaggtaagtatgtacggagatctgaggtacatacaaggaatgcagattaaacaggcagatgaaggcatatctatgtctaagaacatgtacatcaaaacaatgactgagaaagactagccactgaataatgagttgattcatcaacgatctgagtggttgtgacaatttcatgctgagtcctgaacaattgattggtataaagcacacctcagagtacaaggaagaggtaagctttgaaatgattgttggaaagctattacccacatgtgtcaattgtcagtttgggtcactaaactggttcaggatatgaatgttaagtttttatctggaggttccttgaaatttgatgctaacaaaaatcatttgtttgattgaggaatttcttggcaaggaagcacttatgcgtttgtaagtgtttcagaataacaaaacagtttaggtccaagcccatttcgagtttcaaaagcctatgtgatttcaaggatgtttgtcgagt

SEQ ID NO: 23714 - DNA, 570 bp, Arabidopsis thaliana landsberg
  unsure (1)..(570): unsure at all n locations
taacttattctggtattagtctacccgaggcaaagcttacccatgacgagacatgtgaccagctaaagggtcctcgatcnnnnnnnnnnnnnnnnnnnnnnccttaatcgacacagacgaagacactacaccgagactctcttctcgtgcaagtcacccgcccggtctcagcttttatcattttacccaaagcttgttacctggcagaggtacatcttttctgatgttgaacccatcatggccatgatggatccaccatcaagttttgtttttgaaaacatcccacccactttgaagcatcatttttttgtgaaaacaaaacattttgttttctagagccaagctaagcataagaaaagcttttttgtaaatcagggattaaggagaagtaatcaaattccaaggaaggaaatgcagcaactagtttaacagacaactcctatcacctaatgcatcaagtaagtgagaaagatttttaaaataacaagggggtggcaaatgcaccggggcttgccttgagtgataggtgaatcaggctctgttcagcatatatcaaaatcaaagcagttg

SEQ ID NO: 23715 - DNA, 1034 bp, Arabidopsis thaliana landsberg
ttgggctcggctctttcatgcacaacaaggaattcgttacatccattgatcctatctttttttgtgtgtattcaattctaacaccaaaaaaatgataaacaaatatcaaattactttcgatttagaattttataccaaaatttgtacacacaacgttaaacaactaatgcgattttttataagcgggtcaagattaatctagaatttaggtgattctaagagaacaaactaaatagtggtggatggaaaatactactgaatccggcgttaatggaatagaaattgaggttatccacttcgaaccctagaaccgggatcctcccttgacgagcataggctttcaaggttgtgttaataacacttgaaacttcatcgtcttcattggccaaaaaccttatagggccaacacttccaagaacattcacactcaccaacaattttttattctcccctttcatcactctttatatatctttatatatatatatatatatatatatatatatatatattactcttctatgcatacatcagtaaagaagcatggatttcatatacttattgctttcgttttataagagcacaaaggaagagatatagagatagaaagagaccatgaaaggtaattgttaggagtttccatccatattgaaactctattgagaagaatctataatatccttaattacattcatattataagtcccgaaacatcaagagcacaaattatttatcgatggggttattcatagatatgtgaaaacccactttttgttataaaaatgatgttgtttttttttcgtcataaaaatgatggttattgatcaatgatcactaacttgtttattgcatatttgtacgtacgtttaagtttttttctttatgaatctaatgctattggcttgttggctcaaatgtggatgcatcaactatggtgagaaagagagatgagtggaattttttctgaaagtttccaccataaaaacattgttttatatatatttctaccactaaggtcactgagactttcagga

SEQ ID NO: 23716 - DNA, 541 bp, Arabidopsis thaliana landsberg
agtaatgatataaaaattgttacacaagataagagtttcgatacaaattagatttaggaaatatttttttctccatgactataaattagaatcttatattccgaatacgaatattacgaatgatgaatctcaatatataactcttagcccttcgattaaagtagttaaaaaggatcttaaagtttgaatattactctctaagggattttgggttatgatgaatgatgaatccaccggttgatttgccttatattccggatgacttacttttgaactgcttagcccgagtcacgagattgtactacccgattctctccttggtttccaagagattccgttctctcgtggcatcgcttgagctttatgagatcagaaagctcttaggacacacggagaagtgtctttatctgaatctacgtttcagttctgaatctgagccgcgttggttcactttatgccgaagaccaactcgaagccctaaccctaatttcaactcaggatggttcgcttcttgctttataccacacactatgaagaaaga

SEQ ID NO: 23717 - DNA, 842 bp, Arabidopsis thaliana landsberg
ggagtctctgctagaggctttgtcgatgtagaagagtgagtggtcatgaagtttaggaattgcggatctgtttctcgcagatatctctcgactaaagacaagtgctcgagctagtccttttgctcagccgcaactcgggcttactcagcttcacgagcagcaatctcagcatctcgcttctcattatatgcagcctgctcttcaattttgcattgcgcttcctgcagccgttctacagcttgaaaggatgggtgagtctccagggtgcttgcggttggcactgcctaaagtgtctttcagacttccaagtccataatgattgcctcttgaatcactttctatggactgaaaagaaatagagaagaagatattagtgatagaatatataaactcaaagactaggacttagactgcaacatcttacctcgagagagatgactgtatactcctctattgtgagatcccgagatcgtgaaaagccatcagagacagcagaagcagctgcctctagttcggacaacctatctttcacattttgctcataaattagagcaatcttctccgccttccgatcaacataagtaccatccgacttagtatgtgtctggatgaacacctcaccaagactgactgctcttcccaatttctcttcctgcaatgtaaccaattaaacacatatcaaaatctcaaaaacatacatgtgagggtaattgaaagaggtaacagaaacactaaccaattcgtcttggatttcttgataagactttggcctagagaagtggatgtgaggaccaagaccgttacaatcagggagacgagctttggaataggtccgactcctt

SEQ ID NO: 23718 - DNA, 598 bp, Arabidopsis thaliana landsberg
gggggggctactgtcctctgaattgaagtccttgctttctatatctacaggagaaattggaatagtatggtgggctgggttaacacagagattaacctcttctatgtgacgtctcatttgagtgaacattgtaaaatcactatcttcactgatgtattaaagaggcaacccgtttccttcatctatagccattcactctggatattggtaagccattttaattatgatgtctcttgcacggaaagaaagtttctctttcaccttctgagctagctctctatacgtcatgttggtccggaagcggatgtacgacgatccttccacagtcttaggttcaaattgtcaggccaaattatcaaccctcacccactcgccaataaccaacaagacttcatcttgtgctgccgtctacatggcgtatgtaaagaggtcattaaggtttagaaagaaagaaaaaacacgtaaatataaatctcaacagatatgcacacttttcccatttaactaagcgtagtcattaatttatcagtaaaacagatagcacgaatcaagatcgaatttgagaaatcctaacaactgggttatagatctacaatca

SEQ ID NO: 23719 - DNA, 584 bp, Arabidopsis thaliana landsberg
ctgcaggtcgactctagaggatccctaaaaagtctgtgttaagctctcttccaatggaaactgaagaaatcaaaaatacatgacaaaaaggtttaaaggcagagactttacatctaacatatggtcaaggaaaggaattccactagaactatctgcaactccagtaccatccaaattaatcttcactgaaacattcgtttcctttgttactctctttacttctccaattctacctgattgagattaaaaacgacgactttttgagtgaacagaaataatatcaatcatgaaatgagcttaatctcagccatgtctagacccaaaactgacctaatgccatagaagaagaagaagaagcagagcaagagatagattggcgaacgtgagattgagattccatccgcaaaaatcgaggaagcgaagaagaaggagaagaaacgatcatcgctcgacgaggaagcaaatcaataaacccgagcttaggtctgagaagctgagcggcggaggaggagtggcttaatatggcggacgcagcgacagctccattttgttggcagcggaaggaacaagagacgacgctttga

SEQ ID NO: 23720 - DNA, 325 bp, Arabidopsis thaliana landsberg
acataagaggatggaaagaaacaccgtagaaattatttatttgaaagattatttcacaagaaggtgaagtgtagagggagtaaggtgagtttggtccacgaagcattaaagtttggaaggacatggtctgatagtggtgttcctaatcgtatcgatttgaataaagttccagaatatataggttgaggtcttttagtttgggaagcgtgaaggtgaagatgatttaaacaataacatcaaagaagagaaagtgatagagttaagaaccaatttagaagctaaatgtttttactagaataataaaaaacaaaacagagcaaaacaa

SEQ ID NO: 23721 - DNA, 1640 bp, Arabidopsis thaliana landsberg
tcatcatcaaccaattctaacttacgcttccagcctcgcgtggatgtactaacttttgtttttgatggagttcctttagaagaagaagttggcgaaagtttctttttcctgataactatatatttcttgtgttgtactacaagctccttttcattgacataaatgagcggtagatcagcataaccaccaggccactcctttttggtgaaattatggcatttgcttatctgttcaatcaaataaagaaccttcttgtctctcacttcatcatcccactcaccccaaccatcctcattggtgtttacagacaacatagggataacagtcatttgaagaaacaaactcagaaaattagacctactaaaaatgtcatgaaagcacatgaaagaaaaggtacaacaacaatgattacaattacttacatcaggaacacgttcaaggagataaacatcgttgatagaaagattgtttttcggtatcccaattgaatgtcattccaaaaaggttctctcatctgcagaaccaggaattttgtccagtagaccagaaatgttcctataagcaagaagctgcagggctaagggaaagccataaatagctatactatgctgttgcatctgatttgtgaattgttggatgggatcttctagcttgattccaggacgagacctttttctcttagaatcaaccattgacgggttttttctaacaggcctcatgatctgaatagtcttcaaaaaagattctctcccccatgggaaagccaggaatgagtcaatgtcctctaacatcttaacatacttgaaagttggacgatgagtctggttattagcaataaggactccatcaataatcacaagcatagccagggggagttttaaagggtcttcaatcccttttaaagtttggaacttagaggaaacatcagctagtgatgcattcttatcttccccaatcaaaacatcccagtaatcatttgtcccattgacacgtctagggaagtagtcaggtacatactcctccggaaattcaccacacggcaaactagttacagaaccaaactcaactaaagagaatctaagaggctgtccaccaaaaactgtccacatttcgtatttatgtttggtaacaaactatctacataacaaagcatgaactagtttgcaagatattggacattcgctaacccttaaactaaacagagacccaaaacaagagtctaagatggtttccatctcattggtacctttcaatacttcacttattatagtcagaatgtcgggtctggattagatattgagacgagcatcagggtaacggtcagttgcaaatagcctaggaggaagacgagtgtcgagaacatttatatcagcctcaactgtgcctgaaatcaaagggacgatttgtgaagagaaaattatcgatctgcaactgagattttagaacaacaatggataaaatataaatttacctaactggtaaagaaattttggaacaacaatggcttaaacgttcagataactgtaattagtagaagaacaaagaaaaacatagtcgattacctgtcatttttctgaaaagagtgaaaagtaatatcgagggatttcatgtcggattgcaaactaggaaggtgagtctga

SEQ ID NO: 23722 - DNA, 809 bp, Arabidopsis thaliana landsberg
gaacggaaaagaactcgaaggagtacccttagaaatagaagttatagagccatatgtggtagtagacgaaaagacaatacaacatttcagccacaaagagcattacctaagactccacgttaatggtgttctttgtgatgacaacaagcggtgcagcgcatgcacccatccaatctgtctccaatctttctacggttgtatggattgtgacttcattctccaccaaaactgcgctggatttcttagaatgaaatggcatgtgctacacaatgaacttttactctagttactaatgagactgaagtctttaagtgttatgcttgtgagagatggtccaatggtttcaggtaccagcaagggtataaatcattcgatgttcggtgcggttcaatttctgagccatttttccatccaagtcatcccgatcatcccttatattgcattttaccttacggaaaaatattctgcaatggttgttacaagttcaaatatggaatgctcgtgtgcgttgaatatgaatgtaatcatttaatatgcttcaattgcgccactctaccaccagtggtaaagcatagagttgacgatcatcctctctcactatgctatggtgaaaaggctagtggtatatgttggtgtgacatttgtgaagccaaagccgatccagagatatggttctacacgtgtaaagaccaacgtgctagtttacatacaagttgtgtgcttggagacttttcagggctcatgccgggaagcacactcaagagtgcgagcaattcatctgaggtgctgctcaacaatattgtatctcg

SEQ ID NO: 23723 - DNA, 1012 bp, Arabidopsis thaliana landsberg
ataaattaaattctttaatttccttttaacccaatttagaagaattttcctttgggtattttaatttaaaaaaaccaccaatactttttttcctgccatttaaaataaggtatgaatcccaataacccccaatttaataaagattttaaattatttttccaaatattaattgataaccccaaacctttaataaactttttttttttttgatttaataacaaacagattctacatgacactttaagttactaaatctcttttgaaatcataaaccaataacatcccctaactttatatctatggtatatttccttctccaaatatcaaagttttattccttttattgtttatgaaaatttatagatttgttacatgtctaaatatgaacgtcaatattcttgtctaaattatataagaaaaaaaaagattttccaggtgtgagattcttgtgttaataaggatgatatacaactcacctttccaagtttacaaacttatatatattatggacatgaatccaattcttctttttcaaaagttaaataaagaaattatctacaaattagttatcaacaaagaagaaattgtctgtcgtcggacacatgtctttttagagttttggtgttaatgtatatctttttatttttatgaaaatatcttttattgacacgcatccatatttcttcttttcaaaaatcatataaagaaataaattggttattgttagatatatgttttttctttaaattaattggaatagggtcaactttgtatttatcgtttaggggatgtttaggtcccttatttaaatagatggagtttgctactttctaatgtctctgctctattagtgagagaagatttcgttttgataaaaagatttgaaatggatcccccttctctgatgtctgatggctcaagctggtccaagcttcctttagatctcttgatcatggttttcgaacgtcttggttttgtagattttcaacgaactaaatcagtgtgtctagct

SEQ ID NO: 23724 - DNA, 535 bp, Arabidopsis thaliana landsberg
atgtagattttgtttttgcaaaatcttgaatgataatttatttagtttttagtttttctacataactattattttaaaactttttaagttatcaaatttaatttttagtttttattttgtgttttaaaattacaaaaataatgataataaaaattaaaaatgcagaaaaacaaaagcataggtatattttattatataaagtttctattccctataaaattttaatgtatctttttgctaaatctaattttatttaaaaaaaattaaaagtcctaatctagttgcatataaacataggtttggtaaataaaaccaatgtatacatttaatatttaatgaatggtaaatggtgaaaatagcatatttaaaataataattaaaaatttgaaaaaaaatgtgacgtaaattgttagaaaaaacccaatttgggtttttagattctgtgaacaaatatgcaaaatatcttaaaatcttgttttcctaattgttaagaaatctactttttgtagaatcatgattgggtaatatttggttt

SEQ ID NO: 23725 - DNA, 2676 bp, Arabidopsis thaliana landsberg
cctttgatctgagtttgtcatgttttcttatacatggattggtctgtttgactctttcaaacgtcaaccgtaacagatgattataaagacaatgattggcgtattatgaattgtataaggaacagggatggaacaagatgggatttgtccctcctatataacgggagataaatatctctgggcctatcgaagatttgacactgagaaatgcatggccgtgctcaaatggattgaaagtcaatcgtttattttatcagtataaatcagagttcgataaatatgattcagtataataaggttgacaccatttcttaccttatgctaaaattgagatatacagacgaaaggattaccagaatagatgattccagtacaagtgcgagattgttgggaatgtcctgaaatcatttgtactcactctaaattaagttgtatcgacgaggttcgacagtcgaataatattagatgattataatattttggtagaagcctcttataatcaatgactttagaagttcataactaatgttatacgatcctacaaggtcacacacctaagcatactggattaaggttggtttatataatataatatatatatatatatgttatatgagatatacatatatgtttatatttctgtatttataataaagagttttttatagaagctacatatatatatatatatgaagttgacgtgtgatactatgtttttagtcaattatcctaaaacaccaatcatgtcattgtagtattttaggttgtcaatccaaatgggtgtgatgctaacaatcaagatgtgatcagaagtcactaagtcaagccaagcataacaggttttggtgtgttctagcagtcctaagtgaacatgcagaaaacagaaaatcaaacagaaacagtaaaacactcgaccaacacagctctttgtagagcactgggtgaggtcgatagacaggtcgagtaacagacagaaaatgaaacacaaatactccactgcacagtctgttgccagacaactaggtggtcgagtatgaggtcgagtaacaagaaagaactgcagaaattaagcgacagataataagatgcagtaaacaacagtagagtaaacaaataatttaatcagataaagaattcccgaggatggggtaattgagtagtttcgttttctcagtttacaggtgattgacatgctcaataaattaaccctagacaagaacttcattaaccaaatctaagtgccaccgcaatagagaccctcaagttaacctagtcccagactcaatcaccattgacgagagctaacctaacaggcattacgaatcaacaagttaaagccaaaaagctccctgcaaccaataccttggtacagggtcacgaatctctagaattagtggttcagacatttcatcgaacaccttttgggcgtggaaatgtctgggctcaaattccagttgatcagaaagcaataggcattaagaacaactaatccagaagggatctatcaatcaatactcaatcacctagcatactgagaattctacactactctaacccatcctcagaaacctattcactactcagacatcataacagaaagcataaacgttgaacaggttgaaaacatgataacaacagtgtaacagcagggtgataacagaatgaacaacagtaaacgaaatcaagaacaaaaactgaatactgaatactgaatagataaagagaaatccggattacaaaggtctagcacacaaggtctgcggaataaaactagataaaaactttttttcgtcgaaaatgtgaagtacatgctacttatagccaaatatcccgaaaccctaatactcaaaacgatgaagtattgggacgggctaagaactgtactcgacccatgtggtcgagtgagaggtcgagtgaatagctggagtcttcttttcttccttgtgctcgagtgtctggttgagtgcggaatgaagatggctctgaagcttgtcatcgagtatgcagtcgagtggtggtgatggtgatactcgacatccaggtcgagtgatgaggtcgagtagatgtctggcaatgggatgaagtcacttgacctgggggcgagtgatgtgatcgagtgatggtcagaagatggagatgaagtcactcgacctgggggtcgagtgaggtgatccagtggtggtcaagagatgaagatgaagacactcgacctaggggtcgactgatgtgatagagtggtggtgtcttctactcgacttgggggtcgaatggtctcttgagatcttgaagctcctactcgacctctgggtcgagtggtttgtcatgatcaggtacgcttcttccagttagctcgtcgacagctccaaatcacctgaaaacaacacaaatatgcaacatgcatgcaaaactatcctaaacatgcaaagtgatgacaaatgatgtgaaatggtataaaacagtgatgatatgatgctaaaatgatgacaaatggatgcttaaaacatgcaaaatacacacttatcaactcccccaaacttagtctttgcttgccctcaagcaaacaatcaagaacaagctggaagtgaggtttgaaagcagggactcagagccaaagcaccagatagaccagatgaaatcaatgtccaagttgaaagttctaagctgcaagatcgaatt

SEQ ID NO: 23726 - DNA, 550 bp, Arabidopsis thaliana landsberg
atcttacacaccgtttgcgtcctcagcaaaattggggttacacaatccggtgcagagtcaaatttatgaaaactcaagaggtaaagtaaacgcatagttagctaacccgtccgcaagacgattagcttccctatacacatgagaaacttggactatccaatcctttgataaaaagccatagcacaaacgtactaggaatgacagaggatgagaatcgctaatccctgtcgttaggaaaccaaccacgatctgagagtccacctccaactcaacccgtatagctcgacgctcccatacaagaaacagtccataataaactccccaaagctcaggcaatggagcagtgcaaatgccaatattcactacgaaaccaccaccccaaataccattcacatgtctaattactccacccgccgttgcaacacccggatttccgtgtgatccaccatcgatattcaatttcaaccaaccctcttgcggtggtacccatgcaataagttgatcaattcgaaccccaccactcttagtaaccgtgaacttctgatggctc

SEQ ID NO: 23727 - DNA, 652 bp, Arabidopsis thaliana landsberg
ctctagaggatcccctaaatcatttatcttacaaaaaaagactaaatattccatctttgactgtaatgattcaaacttcagtctctcttttttattcattatcagtctttatttttttcttcaaaattggtccttctcctaagtgtggatccaagtttgcaacaataatgtccatgtacacatttgatagattaaggtttataatatcgtcatttaaatggaacaattacactgtttgaaaccggagttggttttgtccgatttggtgtatgtggattggaatctaaagagatttgtatgggcctaaatccaaaataacctattagacattgtcttgtaaaattgaatatcttctgttttttcttttcgctattgaatattttaaaaaaaaataaaaaaaattggttgttgtagaaaccatgcataattaataaacgtatctaaaagtagggagatatttatgtctcgaggttattaattattataccttgtgttacaaaagacgaccaacaacaaacattcccttcgagatttgagagattcatatcattaaatgcacttctcaatatacggagtattactaattaagaccttatttcgagttctctcaacagtacccatgcaaaattggcccagagattagctttgatga

SEQ ID NO: 23728 - DNA, 603 bp, Arabidopsis thaliana landsberg
  unsure (1)..(603): unsure at all n locations
ttgaatcacttctttattttggtgttttcacaatttcagaaacgaaatggagccaaagtttcatgcttttatgtttccatggtttgcttttggtcatatgattccctttctacatcttgcaaacaaactagctgagaaaggtcaccgggtcactttcttgctacctaagaannnnnnnnnnnnnnnnnnnnnnnnnnnnnnnnnnnnnnnnnnnnnnnnnnnnnnnnnnnnnnnnnnnnnnnnnnnnnntggcctccctgctggtgccgagacaacctcggatatccccatctcgttggacaacctcttgtccaaagccttggatctcactcgcgatcaggttgaagctgcggttcgtgctttgagacctgacttgatctttttcgattttgctcaatggattccagatatggctaaagaacatatgatcaagagtgtgagttacatcattgtatctgcgacaacaatagctcatacacatgtccctggaggtaaattaggtgtcgcccaccgggttaccgtcatcaaaggtgatgttccgtgaaacgatgctcatgcattagcaacttatcgatatttactagagactgtatcacagatact

SEQ ID NO: 23729 - DNA, 490 bp, Arabidopsis thaliana landsberg
gcatatcatccattggaactcacacacgtgagatagccgtaggtgccaggaggaggtctgcaccggattcatggcaagattcgcacgtttgcgatctctggagacgtttgaacactggaagaaaaacacctccacgtgttcgacgcttcctgcccgcgccagagcacgctcgcgcgcgcccccgcatgcccagcgccgcgcccgagccaagccagcgccatggcccacgcacgcgcctataaaaccctcccagacttagattgtacccttccgcgcaccctcaaacctcactggagtctagctcgtcgccgtttgcccgtgcgcagcgtgtccgcgaccgcccaatccctctaccaccgtagaccggcccgtagagccattcccaactccgtccagccctcggataagactgtgcacacctccgtgaagctccccgagcaaggaatcggagtttgcttcgccggagaggccagtccacgctcgccggagc

SEQ ID NO: 23730 - DNA, 606 bp, Arabidopsis thaliana landsberg
ccacgtccgaagcacaaccggtggcattgaaggcgacggaggagaagaaggagtctacaccgagtagacaaccaattgacgcctccaagctcgacaatgaggagatggctttaatcatcaaaagctttcgccaaatcctcaagcaacggaaggggaaggattacaaatcccgttccaataaggtttgctacaagtgtggtaagcccggtcactttatcgctaaatgtccattatcaagtgacagtgacagggataacgacaagaagggaaagaggaaagaaaagaagaggtaccacaagaagaggggcggcgatgcccacgtgtgccgcgagtgggactccgacgagagctccaccgactcctccttcgacgaggacgccgccaacatcgccgtcaccaagggactcctattcccaaacgtcggccacaagtgcttcatggcaaaggacggcaaaaggaagaaggtaaaatcaagatcctccactaaatatgaaacctctagtgatgaggatgatgctagcaatgaggaggatacttgcgcgttctttttgcaaccttaacatggacaaaaggaaaactagatgagctaattagtgcatccatgaa

SEQ ID NO: 23731 - DNA, 556 bp, Arabidopsis thaliana landsberg
  unsure (1)..(556): unsure at all n locations
tagagattcacaagcgaggattaccgagagtatgatcattcgtaccttcgtgatcctgttttttgtgttttgatgttttggcatgttgaagagtataaaggtattgacttatatttattcattgtattttctaaaaacggtagaaaacatcactaatttaatattttacaggaaaaccatnnnnnnnnnnnnnnnnnnnnnnnnnnnnnnnnnnnnnnnnnnnnnnnttttacgaacttgaggaaatcaaaaactggtaatattcagcatttaaattcatatattgttggatatacataatccatacgtctagtgacctattaaatttatatatatagtacactctccaccgcttatgcttgggttgctacgaattcaagatgttccggtttggatgattgagtgataatgaaaattttctacaaaaatgatcgatgagtattatgttgttatgggttttaaggaatgtttaaatactctgttttagagacggtttgtttgatcatttgtaatattatgtagaatttccaaatctcataaatatgttctatcaatg

SEQ ID NO: 23732 - DNA, 720 bp, Arabidopsis thaliana landsberg
  unsure (1)..(720): unsure at all n locations
agcgagttttgggtggaggtttcctaatgaagtcattggtattagtagggttttaggttggtttatcgggctggtgcataaccggtgcatcgccactaatcgcgctcctcccagcgacacatggcgtcgagtcacagctagagacacccagcacagtctgttggtcaacaaccgtcctgggatgctcaggtggtgacagccgtcctagggatgctcaagtggagccggccctggggatgcttaggtggcgacagccggcctggagtcactatccacctgttagccaatcggaaccagctctgaggtcgatcggcagccacacgattatggcggcccgagatggccgatcctcaagccacataacactgaattagcttacccacctgcttgatgccttaagctggtcgatgacgtggccgagtcctggccgccccttcgctgcacacgtcggccatgggttgagcacacgtccatcttggccaaactcacgccaccggggatcgctcacattgcgtactgcgttcgtactgcgcgcataatgtgggcgtattgcaggcatactgcgggcatagtgcatgcgtactacgggtataatgcggacgtactgcgggttggttttctcgttcttaagcaaactcaacagcccaacttagtcttactcaatgtgagggatattacattctcctncattaaataaaatttttcctcgaattttatgac

SEQ ID NO: 23733 - DNA, 586 bp, Arabidopsis thaliana landsberg
  unsure (1)..(586): unsure at all n locations
attgagaatttgatgaacaaatggtggatatacccgattgttctttacaaatgcacattgcaatttctcaaaaacaaccaatgactcaatcaattccttctttgaacttgagtgatctcctgaatcggtgaatctttgtcagtcaagtcacctccacccgacaattctgtatcctgaattgcttcaacattnnnnnnnnnnnnnnnnnnnnnnnnnnnnnnnnnnnnnnnnnnnnnnnnnnnnnnnnnnnnnnnnnnnnnnnnnnnnnnnnnnnnnnnnnnnnngatccaatgcttcatttcaagatcgagttccataagtactcgctttttgtcctgattgtttccaaacgttaacaataaaccatccttcacctggctccaactattgaacggaatccacgatagttccttgtggaaccaaaattttgcttggccaccaaaaaaaccagaaacacacgccaacttgtctttctcactatagtcaccaccaagagattgagcttcagtcatcgcaatccactcttcggattacctttagtgaagatcgggaggtccagctgtctaccgtcatcttaaatcgatcg

SEQ ID NO: 23734 - DNA, 625 bp, Arabidopsis thaliana landsberg
catctgaggtttgataacaaaccttgccttctgcaactctttggctagagttattgatatccagcttaatacacttctgtttcccaccattgatgttacccgaagtgttacttagagtctgtcaatttaaaatctgaatgtatatatgtattaaagcagttctcaccattgcagctacttaactgtatctaaaaaaattcacagaagatgaaatatcataccgttgatgatggtctggtaggtgattcctgtagtggtgatggtctgttagctgattcatgtaccggcgatgaacttataaattgtatcttctgaataggccagacgatgttctcattaagtgcttcactcatcattgacatttcaatacttggtctccacaaaaaagcatcgcctttaattaccagaccaactttaacaactgcagcattcagacctagttgagtattgttcaccattcttttggatcagttgaacataatataccttcagctataacttcatcaaaagtccaatcaataatgcgaactctatctgttgatgtatcctatgtaatcatgcatatatatcagcaaagttccacttaagttccacatttaagaataaatcaagttagaagttagaa

SEQ ID NO: 23735 - DNA, 493 bp, Arabidopsis thaliana landsberg
cacttccaaagcaccgtggctatgtccgatttattctattaagtacttgggtgcatgagcacttgggaatgtctactatatgccttggtatgtctcttgggctcccacacttggaaatggctggttggaggtgtatttatagcccccaacacaaatatagccattggagaaaagctgctgctttctgcggcacaccggacagtccggtggtgcaccggacagcgcactgtagcctgtccggagcgcctagccgttgccctgtcagagcaggtgatcgttggcgtcgcatgctttccacaccggacagtccgatcctcacaccggatagtacgatggtcttctttccgggtgccacctggaactagacgatgggctgcggttccctggtgcaccggacagtacgacgtgtgggcaccgcatagatcggtggtacacgcacagacagtcctgcgtgtgggcaccggatagcccggcgctccacgcacagacagtt

SEQ ID NO: 23736 - DNA, 840 bp, Arabidopsis thaliana landsberg
ccgagaggaaagaggagagtcaagccgcaggaatctatgagttcatgttttaatggttaatgtgtctttagttcatgtaatatcttgactctgttaagttaactttatgtaatatgatattttatgattcattgtctttcataaattaaagctaattatattttgtgcaattcaatatttcaaacaaccaattatatttgattcattgcaaaatagattcaatatatgttaatgtatatatcttgcaatatatatacacagcattttctcagtgtcataataaatattagatagtacaatataaaagccaataaatcatatattatagcacgtatagcacgataaaaaggctaaaacattattaaaccgtaattaataaatgctattgtaaatgatattattacaatttataatagctactaaatactacacagtagcaaaaccaaagggctacatatcactttcttatagcaaagatttacgctacattagtgtacaattcgagaaccataatgtcaaaaaaaaatattcaacagcacatttaatgtgtcatcattaccaaatatacaacataaaacaattgccataaaaacgaacaattggcgagaaaatacgggttttacgtttttggtgagaaaacatcggtttacagttttatcatttcctctacaaaaaactgaaatctgggttccaggaaagtagccctgggatttcggtataaaccgtttaaaccgacccgatcaaaccgaaacgtttggttatcggcgtcaaaagaacaactttttcctaatcgatcgacagaattaatttggatagctcggacctcggctcgggggtcat

SEQ ID NO: 23737 - DNA, 2456 bp, Arabidopsis thaliana landsberg
ggaaagtagttcacaatcctaaggactatgctactgcaaatgctatcaacatccaccaagaagatgagtctccaccaagtcatcagactcccactactgaggacaatatgattcaagaagggggggattcaactcaaattgatgcacctgtcatccaacaattcatctggactatagagcacacacctttactgaatactcatcactctgaaaaacatttcaaaagagaaaaactcaagaaggatcagaatcaagagatgattagtagagtcatcactcaagaagcttacaagaagaaagtcatccaagaaaagcttggtgatcccggttcattcactctgacatgctctctaggatcattgacattcaataggtgcctttgtgatttgtgagcatttgttagccttatgcctcactctacaactaaaaggctagggatcatggaatacaagttctgcaacttagccttactcttagctgatggttctgttgcacatccacatggtcgaatagaaaatctatctgtcaagattggaaatgttgaaatacctacagattttgtggtattggacatagatgaagagggaaaggagcccctaatcctaggcagaccattcttagcttcagctggagcagtcattagatgttaggaatggaaagattgatctaaaccttggagaaggcatcacgataagatttgacatcagcaaagctttggggaaatcaacaacaggaggtcagaatttggggatgcgggtcatgggggcgtggaaacacacaaaaactctagcctggccatgggatagctatgcttctccacttactatgcagataagaacatctgacgcacacgaggagagcgattgatcggttagctcagactgaatatcctacaaaagataactggtatgagatgagaaaaaaatttaaatggcaaagtagagtcatatagggattatcttcaagggtgatgaagctgaaagatcaattatggatgtttgaaagaagagttaataagttttcaaatagtattgatccagagaagatggaaatagcactagctatcaaggaggacgaagatttcacaacagaatggtttgcacgagaagattagaaaggagttcacttagaggaaagaatcctagagagcaagttgttgagtgaggaggaaatccctattccgacttattctccaggagtacctaaaccaaccaccaacccctctgctgaagaagaacacttgattcttgattttgttgctgaagaactcctggagctctgaattgggtataaagctcaagagaatataattggaaagttaactcataagatggaagagttaaatagcaccattctggaacttaaagaaatggtcaaggactaccccaatttcgaatttgaggattggtcaaaggagtctggttcagaagaagaagactactctgctgattagaaagaagcttattttgaagaaaaatcaaatgagtactcatcctaccatatctcaagagaggatgcagagtatgattcaagcactgaaaattcaaccactgaagatgagaatttctctgttcctctcttcaaccttttttctgactaaactctgtaagagtcaagcttagtgacttaaaacaaactcacttgggaggaagtcccatgtctatccatgtaaataactttctatttttcttgttatttttgatgtttttgtttaagtgtttcaagtttgttttagtgaccctaagggagtcaacgttcgagtaatttcaaaccaagtcaagaaagatctcaaccgttgatcgagtaaaatgaggaggagtattttgagccattgatttggatgaccaaatgagaggagcatcaccgccgtttgatcgtgactttcagaagttaattttggcccgtttgatcgagtaagcaagaatgagaagctctccaccgttggatcaaatttttcgcacttcaagaggatgctcgatcctttactcgagctctcattatttgaagaccatggcataacttcgtgaccccacttgttcccccaacactcttttactcaatggacaaagcgattacccatgcccctcaccatttccaatcaacttttctatcccttcccaagaaaccaaacaccaatctcctccacccattgaattcgacaaacccacttttggaactctctctttcatcatctcattttcgcaacctctccatctctcacgaagcttcaaagtttcactccaaactctccctatcactcttcacgaattcgttctcacttcatcatacttcaccaaagttactcgatcacttccaagctcatcctcaagcattcaattggttccaagctcaaaatttcatcaccaaagaaaccgattccctccccctttgataaaccagagagagttgtttttaattgtgataataggtttttcggtcaattagcctaagacacc

SEQ ID NO: 23738 - DNA, 410 bp, Arabidopsis thaliana landsberg
  unsure (1)..(410): unsure at all n locations
atcaaagtaacctttcttctgggaaactcggcatgtggtcaaagacgcctctatagctgcggttatggtttcctttaaaacagggcaccttctcgagctccgggtcctgacggtttccccgctggtggctctcttctagtnnnnnnnnnnnnnnnnnnnnnnnnnnnnnnnnnnnnnnnnnnnnnnnnnnnnnnnnnnnnnnnnnnnnnnnnnnnnntgatgtctataagtggaagtcggaccatcatgctcctttgaatatcttctcagcgaagataacttgggacgctcttcatccaagctctggttctactttgtggcatagctctgtttgnnnnnnnnnnnnnnnnnnnnnnnnnnnnnnnnnnnnnnnnnnnnnnnnnnnnnnnnnnnnnnnnnctcgtgacgtg

SEQ ID NO: 23739 - DNA, 1325 bp, Arabidopsis thaliana landsberg
tccttttccgttccatcaaagaaataatttcctcctctacggtaagggttaacaatcatatacagtaaactccagttaatggttgttaatggttcaattgagttaaaaatgagagtggaaatcatcaacaattccaaaagtcaaacactttgtatggtgtgttttctccggaggtttgagtatgtgttcacgacttaaccaagaggaatgaatattgatccgacatgacaaaaatgtgggatctctaaggaaactatcaattaaccatgttctcttcactttcccatgtcattttgacgctggtttagacccgactactgatcaggtaacgagcggttggatcattctagatcaacgggaacccctattagttggggagtagcctaattacaattggcctcatcacctttggaagcggaagctaaagctattttggcttcaatacaacaagtttggttaaaaagttgattatcaagtacttactaaaatcatgaatggtgatttcaaagacatatccatcgataatctgcatcaaaacatcatcggttagactcagaaattgtaagaagtatgtttagttcatatatacaattaagaaggcgatgtaatgaagctgcacataatggatgtataattattaattcggatttttatccggattcatgtaatatgccggaatggctggaacatcacatgtacttaattaagggtttgtttggttctccctttgccacccgcaaacgcagcgtttgcggatggtggcgattgttagcgattgacaccaatcatagaaaccgctaaataccgttttgaaccattcgaaatagccagatttcaaaagctccttctcgcaagcgtttgcggctgcgggcggtagcggttaggttaaaaaaaaaatttcttaattaattaaaataattctggcttccacccaaaccctaattactataattaaaataacctaaccatttatatatcttattcttattagaaaaccctaatcaatatattataaccctattcttttaattatagcatccacacaaactgatgaaaatcaaaatcaagaatcaaacgtaagaatcatctatcattttatccattcagtagctagtgtaattctttgagtattttatggcatcattgtatttttattttgtattcttttgagttttttgattgaatacatgtttcgatttgttttctcgatttaaaaatcatttggttaaacgagataatatattgtatttgtatgtcgtttatcaatttttgagatgatataatggatttttatttggtcagaaaaatcaaatttcgtaatagta

SEQ ID NO: 23740 - DNA, 1000 bp, Arabidopsis thaliana landsberg
gaacaattggtgcgcttatcaaggcttgttttatctgctgaaaggcatcatgacactctagtgtaaactcgaatgtgacttctttacagagtagagcagtcagtggtgttgcgattttgctaaagtctttgatgaatctcctatagaaaccagtatgtccaaggaaactcctcactgcttaaacattatcgggtgctaaaagacttgtcataacttcgatcttagctctatatacttctataccatgctcagaaatctggtgactaagaactatcccatcctgcaccataaagtgacatttctcccaattcaaaaccagatgtttctcctcacatcttgctaacactttgctgagattctctaaacatcctcaaacgatgatccataaactgaaaaatcatcgttgaagacctccatgatatcctcaatcatgtctgtgaagatagacatcatacctctcttaaatgttaaaggagtattacaaagaccaaagggcattctccgataagcaaatgtaccataagggcaggtgaaagtcgttttctctgggttgtctggatgaatcaggatctgaaagaatcctgagtatccatcaagaaagcaatagtacttttgatttgctaaccttcccaacatctcatcgataaatggtaagggaaatggtccttcctggtggcagcattcagcctttctgtaatcgatgcacatctgatggcatgtgattgtccgaggaggaatcaactcgtctttctcgttcttgactactgtaactcctcctttcttaggaactacatgaactggactaacccaactactatctgaaatcggatagataattcctgcttccaacagcttcataatctctttcttaaccacttctttaagattcggattcagtcttctctgatgttcaactgaagacttagactcatcctcaaggtggatcctatgcatgcatacatccagagatatacctgtaatgtcatcaagcgaatagcca

SEQ ID NO: 23741 - DNA, 1292 bp, Arabidopsis thaliana landsberg
cccatggtagtgattccgatcaatcgagtaagcttaataattttgcctcaacggtagtcaggtttctttgtgactcagagaatctctggaatcaaaatttgtaaataaattaggtctacaacaaaattgaaattatgtttgatattcaatcgataacccatgctaagttatttgattaaggaatagaaaatcacgattgtgtacctttggtattgttaaatctgttgatgaccaaacatcttcttgaattcccgacaaaactcttattgataccattttaattccaatcttcataatatatgtaatcttcgatgttcatcctgcttagaattgaaaataaaagtaaatgatagctcaagcatggttagtgataatagtgattcagtcaagcaagctcaatgttgaaaaatggtgtgattgattgtagttttttggtttttcccaagagcatgtgtctttttagtctttattttctattgtttttgaaaaggttaccgaataaaagatttttacaaatgtaaatcacatatttagtttttatgtgtagcattataatacagaaatagaaattttcagtttaaatttaaattatgattagtaggattacataatttcttcattattaaaaaattattccatgtaatcaaaatattatcttctacacttaataaacataaattataatatatagtactatccaaaatttaaatataaaattccatccaaacactaaattcacatccataaaaaatatattaaatactagaatcaataaatctaacatttcaagcgtttgctacaacccttaacaacatacatatattataataaattcgtattaaaaattgacaaaaccatattattaacaaaccaaaaaaatttactcgaaatacaattaaaatttcatggtactatatctttcaaaaaccaaagttttgtatatatttatcaaaacttaacacctggtgtggatgtcagattctgataacactagattttaaccattttaagcccttgtttttcatgcatttagcttagtttcatgcttcttttcatgcattcatagtccattttcctttttttttcacattttgcattgcattgcatagcatatttgcatttgaagtgttttacaggtgaatcaggtacttttggactcgatttggacattttcgtcacaatgagtggacttgctcgagtttgtgcaacaaggaaggacatggagccatgctccacgtatatgctaggctggagatcaagtgacacacatggaagaagaagagtagctgctc

SEQ ID NO: 23742 - DNA, 558 bp, Arabidopsis thaliana landsberg
  unsure (1)..(558): unsure at all n locations
gataaccttggtcactctcgccggaaactaatagggcgagtatttttgtcaataatcttcgccctctccatcatcttcctaacaatcctcctcatttgggcaattctccaaccttcaaagccacgcttcatcctccaagacgccaccgtctacgccttcaacgtctccggcaatccaccgaacctcctcacctccaacttccaaatcactctctcttcccggaaccctaacaacaaaatcggcatttactacgaccggcttgacgtctacgctacttaccggagccaacaaatcactttcccaacatcaatccctcccacgtatcagggacacaaagatgtcgacatctggtcgccgtttgtttacggaacctccgttcccatcgctccttttaacggcgttagtcttgacaccgataaagataacggtgtcgttttgttgatcattcgtgctgatggtagagtgaggtggaaggttgggacttttatcaccgggaagtatcatcttcatgtgaagtgtncagcatatataaaacttcgtacaaagctaacggagtta

SEQ ID NO: 23743 - DNA, 609 bp, Arabidopsis thaliana landsberg
  unsure (1)..(609): unsure at all n locations
ccctatatacgttaattttatgttcgaaatctatatttatgtaggtcaaacgattatgtcagtaacaatgggatggagaagaaggctctcactactgctgaatcagttcgggttgtggaaaagcatccatgggttatcacctttccgaaccatgaagacttgacttttctcttcgatccattggaatggaagaggtacacactgaatttacccgagttagttggaaccgatgtttgttactcgaaagacggatggttgcttatgcgaagatccagtttagtggacatgttcttcttcaacccgtatactagggagcttataaacttgccaaagtgtgagttgtcctttcaagcgattgctttctcttcggcccctacatcaggtacttgtgtggtgttagcgttaagaccttttacaagatatatcatccgtataagcatttgctgtcctggagcaactgnnnnnnnnnnnnnnnnnnnnnnnnnnnnnnnnnnnnnnnncccatacatgcatagcaaccttgtctatgccaacgatcacttctattgttttagctcgggaggtgttttagttgactttgatgtagcttcccgcacatgagtgaacaag

SEQ ID NO: 23744 - DNA, 3250 bp, Arabidopsis thaliana landsberg
cgctctcagtgaatattagtcttctgagcaagaactgtaccttccagtattcagatgggtcattaatcatagaagaaatttccaaatgattgttggctttgaccatggcatctactatcatcagctctatcgcctgcaaatgaatggaacgagacaagtgggaaagagagaaagaatagtcaaggtacagagagaatgataatggtataatacctttactttcgaatgcgtgtagacggttcgataaagatcagctcgagttgcaaataacttgtggacactaagatctgaaaaattcaccgggtttaaaatgggatagaagcaaacgcaaatagagaatttaggtggacaaaacttacactccttggcgcggaagcagatttcattgtccaggactctcatcgtctctgtcagtctagaaagttctaataattagcaatttccttattagaaaccagtgaaatgactatagaatagaatgaagacctttggaattgaaaattggatcccagtccacaagctcgagaatcacggacaaggtagtcaaacctataaatatttgcagacattaaaagttgatgttgtaagataaaggttcaaatttacgcaccatgatgagtgaaaagggaaagaaagaaactgcagacaagtatacaggtaaagaattacttgtccacatcaatcccatttcgaccattagcaacaatatcatacaagaaacgcttctctgcattgccctgcaaattatgaaaaagggaaaatatatacaaagcttaagtagttgttcatgtttgattagaatagagaacatacttgttataaaacttactttcagctgtgaaaattcagtactagctagtatcatgtcctggtcagttaacattagagaaaatcatcagcaaagagagaaaggaagcaataaatattaaattggatttgtaaagactggaaataatgtcacaatttccagtttcaaataatagaggccatttgagggaagcaaaacagtcttaagaaagaaagttaccttcactcttttcagcatttgagcatcaatatcgatgtgatgtgtatcaaccatatggtcaatcatgtttacagacattaactcatgagacctgcatcgaagaattggcatataaagagctagagataatccatagaagccaactactaaaagttaaggcatagttcttataatatcaagtaacaccatggcattgatcttttcaaggaatgtgcaaacataccactgacagtcacttatgacctttggaaggaattcacgctcaaacatatgactgaaaggcccatggccaatatcatggagaagtcctacacatacaaacagatcagaaattgtatcaaggaataatgtagtcattgagctaataatagttaccacttaccagcaagtctcacagtctgaagatcataattgtcaataccaagctccattccctatagaaagttaagcacgtacattacaaaccttaccatacttaaatcaaaatgtgactgcaccactgaaatccaaattaaaacctggaaattttttagcctctgagcagtttcgcctgcaagccaatacacgcctagagagtgctcaaatctcgaatgtacagctcctggatataccatgtttgtcactcctgaaccattaaagaaaaactcctctcaacgaaagaagatacacaactcaagactcatttctgttaaaactagaaaccttaacgaagaatctccttaaagttttcaaggaaaatttcctatatttgacaataaatacatgtttatcgatggggggaaatagacataacaagactgtcttcttcgttaaacaagaggagaggcaacttgagttgaaaacgcaagccaactcaccaagttgctttagttcacgaagcctgaaacaaggaattagaataatgaatcagaacactgtggttttagcaagtcattcattgaaggaaacaagcacaatccaagactttacctctgaaactgctcagtgtcaatgaattttaaacaaagctgcaaaccaaaaagtgaactattagtacagatgccatgttgagtcaatagtaaactacatttgggaactattagtaatgagattccatagacatatgaacgtaggcactctagtggtttagagaatatgaaaactcttgtttacacagaaaatacgaaacaattttagcaaaagccattaacaccagtaaatttttgcagttggttcatcaaattagtctccgactcaaaactcaaccatacatttcataattttccggtaaacagcaatctctaatccatccgtgactcgatagttcaattaaattccggcgaaatcacggcgatgaatgtaagataaacgaagatagtatccagattccaactagaacaaacggcaccggaatttcaacagaaatctccatagaaacagttctagagcgtcgctccttatctctcgcaaacgaaccattaggaatcacagaaacaggaaacgaagatgattataaggaaatcaaccacttacaggatcgagatagatgtttccatgaacgttatcgtagacatgcttgctgaaccggagctcgttcgccggagcgccggaggagaacaccggtaaactacttaggttttcgtcgcaatacgctcccatcagttgaaatttcacgtcgaactcactcactcgccgccgtgaagcagttacgttgagagaaactgaaatgggtacaacgacgagaattgagaaagcgattttaaaagctgcagagagagagagagagagagtaatgatctttattaaattcctttttgacgtttttatgcgattaatattccactaaaccttaaatgaaaggaaaagtttcgaatagatccctgtactttgctaatattccaataaatgtgcatatatttaaaattacttagattaaaacctcaacttctattccgagtattttttggcaaatataatgacagcaaactgaattatcacggatgtggcatatgctcatgcattttgacttgattctagttagaagataatttatgattatcatgtgagattaattttatttaatattaacctttccttattatcatgtgaaaaaccatttttgttaaattattggatttgaattccattaacaatagatttatacaattttatttttcttgatttcttacaaaaataatgattttaagataagtttttgaatataaatattctttttttttttta

SEQ ID NO: 23745 - DNA, 304 bp, Arabidopsis thaliana landsberg
ggggatcctcatccctgttttaaacaaaagatgatgcttcatatgggaggggatgttttcaaagataagactcgatggtgaatccatcatggccatgatgagttcaacatctggaaagatgtatctctgtcaggtaccaaactttgggtagtaacttacggagacaagatcgaccttgcgtgctgcagcagtcggaagtctcactgtagtgccatcgtctgagacgactaaggaccgcgtcgatgtagtgcttgctcatcgaggacccttgacctggccacacgcttcttgatgatgaagctta

SEQ ID NO: 23746 - DNA, 526 bp, Arabidopsis thaliana landsberg
tactttatctacatttatatctttggatacatgttatggtctaaggttcatcttcatcggtagaattgggtggagtatctcaaaatattgttttttaattattattatataatattattatttattgaaataattattccgaaaataataatttaacctattaaaatatgacatgtattttaattattattatataatattgtttatctgaagagaaacttttctcactctctctcttactttattattatgtgatatttcttagattatgaaaaaccatgttagatactactactgatggacttgttaattggtcgggggaagtatagtgtcacagagtaatagatcagagcgattccggaatttgatttaaaacgaataaaagtaaaccggtttatagataaaggatgattgaaccggtgtgtcttttttttctcgcaaagctattgcgtgtacatggatgtttgtcggttacagagcataaacaaacaactcagctgaagaaataatgacgataaagagatcg

SEQ ID NO: 23747 - DNA, 862 bp, Arabidopsis thaliana landsberg
taaaacgtatcgatgatgctttcatctacttgtacacgatcgagaggataacaagttggaatgcatactaccctcaaaggagatcacaaatgtagagagtcatgaagacattatgtttttgccaagtaaggaatatcaagtaccaaatttggagcaatttatggagattgaagaagaagacttgccaccatctccacgagatgacccttacaacctcaacaagtgtgatcttcccgaattcacatttgtgccaaagaccaagatggagaagtttcttcaatccgtcatcaagtctcaaaggaagataaacaagtggcaatcttatgcaataggaaagctacttaagaaggtgaagaagctccaaccaccggattatgtctcttccgaggatgaacttgttgttccttcaaatgaggaggaagatagagacaatattttggagagtgatgagaataatgaaacgcccgccacttcatcacactcgtctacgaggaagaacgcctcgagagaccactcctacatgccttagccactccacggtatcacttgtatatacgactttatttcttttagttctatttatttattttcgttagtcttttcctcatatttttctctcacaccgagacggtgtgaaataagtttgggggagagactaaccatctaacgttgtgttttgttttaattttatttctttgagtcttgcattgtcaatatctatgttttgagaaaaaataaaaaaaaatctgaaaattttgaaaaatccaaaaaaatcatgtaggtttgcatattaaaattctctattagaattgagtatagaagcatctagtgtgcatttgcatgtgcataggggataatatta

SEQ ID NO: 23748 - DNA, 461 bp, Arabidopsis thaliana landsberg
ctccagtgctggtcttccttcctctgcgactccttcagaccctccaccgcctccggttgctccaatgttcattcccaagactgaaccatggcatctgcatgtctaagaaaacaaagtccaaggtctctgctccgactcagcgcaagagacagtgtacggctgcatctgccaagtccagatctaaagcgcctgctcctgctctccgacgtctgtcaagaaggaaatccaaccgatatgcctctgctgcaggacaaactgaagatcttgtccgtgactcttcagatctgcaagatggtgatgtcactgagattgctccgcctctgtttctgtctcgttaccgagagaaccgacggcttcttgctgtacgagatcgttagtatccggaactcaaattcccctcggagactccctacagtcgctgtttttttacctaggaaggtataggtcctctcaaggtcact

SEQ ID NO: 23749 - DNA, 654 bp, Arabidopsis thaliana landsberg
gagggaacctagtttttactcaatcaatgttatttttctcaaaaactaaaaactaatttttttggatttttaaaacaaaaatataataacaaaaatgtaaaacaaaaatctaaaatctagaaactaaaatctaaatccaaacactgtatcgaaaatcggcatccattcagggcctaaatcttttaaaccaaaattaattaaacttaaataaatcaatttaaagagatattatttacatatgcgaaataatgttgttctatacgaatttttagtttcaaattatttaaaacaaactatattttggttgttcactcctagaatatacttcacgatttgagtgtatttctaattttttattacttaattaattgtatgatagtttttttttattattatcgatttatgaaaattctcgtgacggaagcaagcttaagtttacagctgtatggacaccaatggaagagctgcacttttgacaacacaagtgttcgttactcttttatatttatttaaatattcacgtttacttcttgatttgttttcttatttaactggaacacacgtttacatttttttagttcttcagataatttaatttttaaagttacgtttcaaggtagacatagaatatagttttgcttagaaatctttagg

SEQ ID NO: 23750 - DNA, 523 bp, Arabidopsis thaliana landsberg
  unsure (1)..(523): unsure at all n locations
gttgtaagaagcccttggctggccagtatctcagcataactctcaaagagtttacacagagatgcgctgaactttttgttgccagttgccaaagcaaggacaagagtcttctccataagatcctattataagataagggcagaaaaatatgagcggagaagcccagcaaaaatttatgcgcgaaacatagaaagtgatactcacttgaacacactcagcataagatttcccagcactttgtttttcaaggctcattgaccaaatgtctactgttttgtcgacattgcctgcgcaaatgtaacacagagttgcatccaaagtataaccagcagccatcatatttgaggcaaaagcatcgcagaggcttatccattcatctccttctgcaaactttttgtcaataaataagaaaaaaccattcggggtagtggagttatttagtaaaatcaaaccgtcccggagcnagcgttttttcttcatcaaaaaaaaagttcttcangtgcacatgagaacnagagttttt

SEQ ID NO: 23751 - DNA, 864 bp, Arabidopsis thaliana landsberg
cgtccatgaaaatagttggacatagaaaaatagctaaataaaaataagaatagttggacatattatgcggaaaaatataagtttgtgtgtttggatggattttaatagtttttaagggagaagaagttcgagcagaagattccgagagtggagataggagatgcggaaaatataacgtacaaagacgcaaagacggcactgagaagagggatactctatttcaaggcattgcaagctgaggatggacattggcctgctgaaaactctggttgcttgttcttcgaagctccctttgtgagctattcttcactctctctactaatactatactattcttttgttttctattcattaaatatatatgtaaagtgaatgatatggtacttttaggtcatatgcttgtacatcactggacatttggagaaaatcttgactttggaacatcgcaaagaactattgcgttacatgtacaaccatcaggtgaacttattatgtaacacatttgataacatatagcttctttttagtgataagcccctctctgatctttactatgatagttttctgacgttaactacgaggataattattttggtttatagaacgaagatggtgggtggggaatacacgtggaaggccaaagcgctatgttctgcacagtcatcaactacatttgcctacggattctgggagtagaagcagatcttgatgatattaaaggaagtggttgtgcaagggctcgtaagtggatcctcgatcacggtggtgctacttatacgcccttgatcggaaaagcttggttatcggtattatgcatggcggaatacttattttattgaaaaaaaaatagtcttattatttttc

SEQ ID NO: 23752 - DNA, 622 bp, Arabidopsis thaliana landsberg
gcaggtcgactctagaggatcccccaaacttattgtcctttttgagaagttccgtcatgggctttgctatgctggagaatcccttgataaagcggcgataataccctgccattcccagaaagcttcgaacttcactgacgttggatggttgcttccaatttgaaacagcttctaccttagatgggtccacttctatcccttcagcagtcaagatatgccctaggaaggctatcttttctaaccagaactcacacttgctgagcttagcataaagttgatgtgctctgagtcttccgaggacggttcgaaggtgctgctcatggtccctgcgactcttggaatagatgaggatgtcgtcgataaaaaccacgtcaaacttatccaattcttccataaataccttattcatgaggttcatgaaaaaggcgggtgcgttggttagtcaaaaggcatcactgtgaattcatattgcccgtatctggtgacgaatgcagttttctgaatgtctgcttccttaatcctgagttggtgatacctgacctgagatctacttggagaagtcttggctcttgcagttggcgaataggcatcgatccggggaagagggtactatcttgattgt

SEQ ID NO: 23753 - DNA, 778 bp, Arabidopsis thaliana landsberg
tgatgccatttggttcgggaagaagatcatgcccaggctcttcattggccatgcaagtgcttcatttaggtcttgctcgtttccttcaatcatttgacgtgaaaactgttatggatatgcctgttgatatgactgagagccctggcttaaccattcctaaagccacgcctcttgagattctgatcagtccacgtcttaaggaagggctttatgtgtgatctctgttccagaaacatatactatatgacttcaatatggtaattgaaggtgcattttaatttgtttttttaattttattttgaataaaacgtacgtttgttacgttgtgtacttttttaaaataaataaatgtggaaccaaatgtattctttaaaatatatgtattatttgatttcatctattgtgtaaaactttgtataatataatatatttgatttgacggcaaaaaaaacacaaacaaactgcattttcaattttgaactttgtaaattaacagaagcggaaatattttggggaaaaaaaaaaagaaaaaacagaaacggaagtaaataagctttttaggcatcgatcgaattttccaggaaaccccgagagaggggaagaagaaactgacgaagacgaagtcgaacccttaaaaatccggtagagcatccgattctccgttgctcgaaacctctcaatcgattttttaaaaatttatttgcgatgcattgagccgccgtcaaaagagagagagagagagagagagagagagatgttggcagtaacgtacagtagg

SEQ ID NO: 23754 - DNA, 581 bp, Arabidopsis thaliana landsberg
  unsure (1)..(581): unsure at all n locations
ccgataactaaatacttaaggcccaatagtatatttttgtattatataagttagcccacaaaaaagcgcgattatgaagcacaccgtttaataccgttcttaacattattatagcacacaccatggtctttatttaatgactaatctcgaatgtgttatcgacggctcaatgttagctgtcatgacattgacttcttccttcaatgatcaagattcatacaactgctgaaataaatatttcttttatcttcagtgtaatgattttctattgtttaattaaaaagaaagaaagaaaacttgtctattgagagttcttagaagagcaaagatacaaaaatgaataagtcaaagtaaactaactaacatggcaggccaaacttcgatattagcgtttaaattaaacaaagactaacaaatattaaaataggaatcaatacagtatggttntttcaagttgacatctcattttaattatcatcaatagaaaacattttcattcatacaaatcaacgtgcttcagtttaccatatcagctttcctaccacataaatttttttatttattaaaacacattattttta

SEQ ID NO: 23755 - DNA, 343 bp, Arabidopsis thaliana landsberg
  unsure (1)..(343): unsure at all n locations
accgcattgaaaagagggttactctatttcacggccttgcaggctgttgttggacactggcnnnnnnnnnnnnnnnnntccatattcttcaatgccccctttgtgagttagtccacactgtaaaattaaatttcttgttaaacagtgacttttgaaataatcaacttatacaacgttaaaaaacaaacaattatgctgcctaggtgatatgcatgtacatcactggacatcttgagagaatcttcactcccgagcatgttagagagttacttcgttacttgtacacccatcaggtacaactatagtataaatactatacatatatatgtatgtaatatatatc

SEQ ID NO: 23756 - DNA, 1004 bp, Arabidopsis thaliana landsberg
  unsure (1)..(1004): unsure at all n locations
ctagcaggagctccggggcttagttcctcaagtaccttagttatcagactagcccgggaggctcctgcgaaccataactagatatatatatatataaaaagtgtaaaacactacacgtctaaaaagaaccctaatctaaagatcgataattgtaagaaacaacggaaagaagaagatgattaaatagcacgcggctggtcaaaaccctagcctttaatctctatcccgaaaagtcgaaattgcccccgttagttttttgcggttaaataataaccgtccagtaaacaatttgttatattttttttcattacagatagatcgaagtagtaatttgtttaccaacaaaagtgtactttgagtctgcgtcatctgccaatgatgaagaaatttcggcttctataactgttttacatatacaaaataaactatataaagtatatatggaacattgtaatgtatctttacgcagattctcttacgattatctgtctgtttgttcttttggattgtacgtataataatgactttcttgtttgtcaggtttcattttctgagagtgagaagctctaagctcctccttaatggatcttctcgagtgtttctagcagcacgcgaaaaagacgacgtcctggattcgtttcctgcttggattctctggcttgttgatgcgcggttacttactgttccgactcctccagttgatgtcaccagacggctagaggatcgactatcgcttggtccacctgcggaacttggtcgagagcttgacggaattgctctcctcgaagagcttccatatcttgannnnnnnnnnnnnnnnnnnnnnnnnnnnnnnnnnnnnnnttacagcaaaatacagtaagggattgcattctcccgtttacaaccaaaaattcgatctgacaagagggtctggtaagggatcttaccggatgcttagacaaaggcccatcaacggagtatcttgatgccgagcgatcacgagtagtagaagttgcaggatg

SEQ ID NO: 23757 - DNA, 879 bp, Arabidopsis thaliana landsberg
caatgactgacatgggacccttgtgactttatacatacatgcagagttcattgtggattatgttcctttgacaatttgtttccggtcactcaagattttgagcctttatcttgtgaaattctcaagcggtgaaatccttgatagctttctctcaggctaccctctcctggaagatctcttagtggttcgaggcagcaatgacaacgtgaaaactttcaatatcgcagttccttcattgcggattttaagcatcatagacttgaactatggttcacatggtctacgagatgatgttgggtttgttatcaaagctccttctatgaactcgttaacgattactacacatttttttggtattcattagtgaaaatgccttacctcttgaaggccgatatcaagcttagacttggtgactctaagaagtttgagggatgtcttatctcagccaaacatgtttccttgtgtttacaacaaccaatggtaatattatgtgcttttgctttcgcgtttgtgataatatattctctttgtgattacaaaatagttcgattcacttatgatgtctcttgcaggattcatgtccaataggcgtcttcaatcagctagtgtttctaagtctttgtacatgctctttatactggtgtcgtcttgtactcaaccatacacctaagctccaagttctcagattcgaactaaaacaagcaagatcgcgtgctacgctaacacctcaacagatatgttgcagcaattatgttgatgtccaaactcaatgggagcagcagagtactgttccttaatgtttgatttcgactcttaaagctattgagtggattggttataaaggaattcaagtagagaaaaatgtggtgatgtatttat

SEQ ID NO: 23758 - DNA, 1612 bp, Arabidopsis thaliana landsberg
aatttgctaattttttatttcactggatagaactttataaatatagaggtttaaatattttgtgcaatttataaattaaatatatgtagcaatgtgaattttttattttaagttggtgataatattaaaagtgagtttaaaagtataagggatatgttgtattgagtctactaaagataagttaaaacgatttaatattaaaatttctaacttaattaagtataaatgattaataatacatttttatctgtttataactcactgtattcattttcattgagttttgaggtaaacaaattcgaactccataacaccaacttagtattaccagtagtactaatatgaccacaaattcgacagaaacagacatgatattacttgttataaccaatattacaaaaaaacaatagaaacagacatagtattacagaaaggggaaatacagtattacatagtaagtccataccataaaaacaacaaatcactgtagaaacaaagtaaaaaactcagataggcgtattcccaaataataaccattgacacgattgccttggacgccttttgtttaacgtcctttgtcgttttggccgcttttccccggttgatggaaaccttagcatatttttccttcctttcttcggttttttagacagcgaaactatcttcaacgcctttacttcatctggtacttcccactgcgacctatccggaacaagataaataggccaatgcccacaactctgcccaataatattttgtaaccaaatcatgtaactccaaacctcttctccgatcttcatcatccataatgttaatgaaagcggctaatgcatgaatacaaggatatttttggatatcgaaaaccttacaactgcaagttttcaaaagcaagctcaccgtataatctattcctttgtcgcatgtgactacatattcacgctcgaatgagtttagctccaccactttcagcttctcggcaaaactccacaaatcatgcaaataattctcgaccaaaggcactatcttattttctaaggatccagacgcggcttccatccgattttcattaaaccaaacggagatttttttgatgatcgcatcaagcattggtattaacgagtatttccttgcgtttttaaacacattgttcaaagattccacacaattgcttgtatctaagttgtatctttctccgggaacacaacaccttgcccatttttctttcacggttgtatcttctaaatacttggtcgccttaggatatctcaacttaaacccgtcatacgctcggttgaagtccgccatgacgtagacccaacttaactcctgaaacttccatgcgagtacgtctcggttggtgtgagtagcatgacctttcacattttgggacaaatgccaaatacaatacccgtgatgagtcgtggtatacacgttccgtatggcctttatgaggcttgcatttctgtccgtcatgaaaaccaattctgaagtatcgggtacaaccgtttttagcttctcgaaaaagtactcccaactagcatcattctcaccttcgagtacggcaaacgctatgatgtaatggtgacggttaggatcttagccgaggcaaaca

SEQ ID NO: 23759 - DNA, 568 bp, Arabidopsis thaliana landsberg
tcgactctagaggatcccggcacatgaccgagcgtttccttggctgggcaagtataatgtaagctttccacatactagggaatgaacttctagggctcatgctgctatgtctagtatgacctgatgttcggtcatccaatcagttcacaagatgatgtctatgttttccaagcccaagactaggagtgtggttttgaaggttttacttcctagctgaatagtcacattacgatttaattgattggttgcaatcttgtccctgacattgctatcataaaagccccttgggtatgatagaaggtagttggcatttgacaccgaaatttgcactaatgaagctatgtgatgcaccagagtcacatagaattaatgctggttgatttaaaactaagaaggtaccggtcatgacgggtgctccctcggtcaattcttccagggatgcgaaattcaacattccttgcttgacttgcactttttgttcatcccctatcctggaactacagctggcataggctctggatgattgcgcgagaatcacttggcgtagtgggcagtgccgcccatgtgt

SEQ ID NO: 23760 - DNA, 1346 bp, Arabidopsis thaliana landsberg
aataactaacatgttttttatatattttttgttaaaaatgatttttttatattgatctcttttttcttaattggagaaatcggatggtcgttcttatcctaagagacaaaatgtcattttgtctcttatataagagttaaagtgaggcgttcttatcctaagaaataatctaagagcctaccaataaagatgctcttagtacactaaagaggataaaaatgacttgtcaaaaaggttttgattggaaaacactgaaatgtaaagaaatgtaaataattaatattccactcgttttttttaacaaagtaaactaaattatccattttgaaaataaagatattccaaaagagtaaaataacaaaaataatattttgagtcgatgttatttgacgtattcgtcgaatatgttcttcatcgaacggaacaaatcaaacaaaaaaagaagcaagtggatccgtcacgtgtcactttactattgacctctgacgtgtacacggacgtcaagtaatttccttgcaccgcacgcttccttcctctgcaagtctcttactttttttcgcttccctcaaaatgtctcttattaattttctatccttaaatgtgaaacagacaaaagtgtttgccatgtgcttctataaagcctatcttctatttctcacatttttaactcatcacttctaaaaccttttctcaaatctctctcactctctttcaccggaataaaattctctaggtcatcggaaattttttacttcagccgacaatgtttccttcatcagatttctctttctcaccgtcgtcgctgttctcagcgtacgcatctttaaccggattcttgatgctctttagatcgatgctccatgatttcgtaccggagaagcttcgatcttacttctccagcttactcgaccggtttttcactccgaaatcaaagtatctcactgtgatcatcgacgagaacttcggattgaaccggaatcaagtcttcgacgcggctgagatgtatctcaggagcaagatcggaccggaaacagagcggttgcgagttggtaagatccctaaacagaagcatttcacaatctctatcgaaagaggcgaagagatcctcgatactttcgaggagtcggaggtgaaatggagttatgttcaatcggagaacgagaaaggagataaagtgaaacgttactacgagctcacattcgagaagaagcttagagacaaagtcttgaactcttatttaagccacgttgtagcggaatcagaggagatcaagaggaatctcagggtggtgaagctctatagcagagatgtgtatgctagtgatgatgatgatggaatggctggtg

SEQ ID NO: 23761 - DNA, 548 bp, Arabidopsis thaliana landsberg
caccacagacgattgtgcatgctataccggtataccctaatgcggttaatatacctaaagaaatgatttttaatatttcttatttattatccttcaacactattggttcctctgctctggctcatggatgaaactaccagagagatgttctcacctcataatcttcctcttgaaatgatggaagagattctcttaagactacccgtaaagtcattgacgcgattcaaatgcgtttgcagctcctggagatctttgatctcagagactctgtttgctctgaaacacgctttgatcttggagacatcgaaggcaactacttccacgaagagtccttacggagtcataacaacgtctcggtaccatctcaagtcatgctgcatccattctctctacaacgagtcaacggtctacgtctcagaacatgatggtgagcttttaggaagagattactatcaagtcgtggggacgtgccatggattggtttgtttccacgtagattacgacaaaagtctttacctgtgggatccaaccatcaagcttcaacaaag

SEQ ID NO: 23762 - DNA, 657 bp, Arabidopsis thaliana landsberg
caggtcgactctagaggatcccccccacgcacaacggcgctggtggtgcccgtgccagcggcggtcacatccgggcgcctggctcgtgggattcaccagctattggtccagtggcaaggtgagccagctgcgtcacgaagctcgggaggattacgacgactttcgcgctcgcttccctgatttccagctcgaggacgagctggtcttcgacggcgggagatatgtgatgtgcgaccgcacatacaccaggcgcgcgcgtgatgtgccaggggagcagacgcgcaccaggacacgggaagggaaggcaagtggctagaaggaaagttagccacctaattagttgtttcctgtgttagttatttccttattagtcgtttccttgttagttatttccttgtgagttgttaccttgttagtaatttcttactagttgtttcctagttagttatttccttattaaggttagcctataatggaggatagctgccccctctgtggctatataagcatgtacgtgagatcatttagaataagaaaaagtcagtcctaatcttcctctcttctctacaaaccgacggctgaggggtatacctcgccagcgtgacggacagcggctacgagttacgtagctggagtccgcgcagtcggggatttggt

SEQ ID NO: 23763 - DNA, 480 bp, Arabidopsis thaliana landsberg
atccgaacgaagtcggaaagctaaaacatatttcaaaattttaaaaatcctattagcaaaggagaagaacgggatttagagttttctctctctaaaagatctgagaaagtgaagagagagaaaactctttttattttattttaataaattctagaaagttaacaaatggatgttattaaaatggaacaaatatcaaaaaaattgcaaacttttaaatacacagaaaagcatgaacttttgaaatgtcattaaaatcctaaagtttggtttgattttataaaaaaatagttaagtttcgttaactgggtcattttaagcatatcaataaatttccgttaacaaaaatatgatagagttaactttccataacgtttaggaaataaataaattttatacatacatataaagtatcactaaagataataaccaacacaacgttgggtatcggaaagcttattttgggaaaatcaacttttcata

SEQ ID NO: 23764 - DNA, 1607 bp, Arabidopsis thaliana landsberg
  unsure (1)..(1607): unsure at all n locations
accactttgccattgtgcgtcgtccactccggctgatgcaacggcgacttggtaactcatgatgtattgcgccgggtcagtgctgccgttgtacttggggtatgcccccgctcgaaagttggctggccaaggcgtcacttgcaggtgtggcgccaggggacttcgctcgtcgaggtagttgaccccttggaatggcgcgccgtgctcgggggcgtagtcatgctgggggaaacgcgggttctccggctgcgcccggtgctgcaggggttggccatgctgccggccgaggtagccttcgcgcatgtcctccggctgagcgcgttgttggaggggtggctcttgctgtaaaccgaggtggccttcgcgctgcatcagcgcgatctcgccgtcgaggtcttgggctttctgctcctcgtcacgtatcatttgccgcactttggctaatgcggaaacacgctggcgcttggcctccagtatctctttctgcctctggagattgcggttcctgaggcgcagggcgcgcagctgcagctgttcttctgttgagacgccgaggacctcgccgtcctcggtgagatccgcgccctccagtggggcgaatcctgggggcggctgcgattgtccttcgggcccgcaggtgtggaaggtgtcgtcttcgcaggtgtggggaatattgtcttcagtgggctcttggtgggtggattgggtgagggcgagggccttgccctttcttgcggccagcagtgctgccttcgcagcctcgtcagccttcgggttagctctcttgggtgccatcgcgggtggtcttgtcgtagcacgaacggtgggcgccaaatgttggaacttgctctcagcggtaaggaggccaacaagggtgaacggtggtgacaacagggttacgtgctcgggggcaatagctctgttcatctagcctctcacgggcactgtgcgggggtatttataggtgtctgagtgcccagcgtcttgtgttaaggacgcatgtgccctcagacgcctagtctatccccggaatattcccataaagcagggttacaagctgtaattacaagtttgcctttacaagtcaggcccgtaatacacgaggcggccacgcggggcccgttacaatgggccggatcacacgtgggccttggggctgaacgaggccgcgccgtggtaggannnnnnnnnnnnnnnnnnnnnnnnnnnnngtactgcgaagggtgtccctgcccgctttgtctctgtcggaccagcggctgcagcgaaggcctcgagcgaagggtggcgtctttgccttcgccccaacaaccctgaatttggggtataaaatttctttgctcatatccacaaattcaggtgttattcctctcatctcatcttctccaatctcttgttttctctttttctatagaagaagagtggttattttcaagtgtaaatgcaagtataatttaataggttaaacctaagggaaacaatggttgttgcatcatgttggaaaacatttattttgtttgtttgttgtttgatgaatggtttgcttgatcttcgaactaatcatttgtttgtgcatagtgtcaaactgaaataaatagaaaagagta

SEQ ID NO: 23765 - DNA, 388 bp, Arabidopsis thaliana landsberg
tcgcgcgagggatcggaatgttcttgggctaccgacccccggtaacctccagcatccgcgccgaagactcccggagctcgggcgaagacatccttcccccgagggctgcgcacgtccccatcaactccacaacaaaactatcggagacccccagttcccccaactgcagtacctagttttcttttcttagtcgttggggcggcctcctgcgcagggtcttcttcagtcacagtcgctggccctttcccgcagcggtcgaaagcgtcatccccgggataaccgccgtacggtaagcgattcaactcgaagaccctattcaggcggtcgttggattcgcgaatatcccagctccacagggcctccgtcctcggcacataacgccccacaa

SEQ ID NO: 23766 - DNA, 904 bp, Arabidopsis thaliana landsberg
  unsure (1)..(904): unsure at all n locations
taacaattcttccttctcgtttgctttcacgtgatgtgctcttcattgtatctagcagaagtttagtctttagaaaatgacctgaaataaagtggatcacaaattccatgtcactgactaaaaactaatgatgatgttaacttaagtatataactttagaacaaagccacataatgttggtttacttctcctactcacctaaatgattggttgcgaattgcagctcgatgttgtccttagagagcataaaaggacatgccataatcccggcattgttgcttacaaaattaagacaattcaaaacattaaccatcaataaatcaaaaccgctatatacagtattcaatagcttacatcaagaggttgagtggaagaccagtagatttgtactcagacgcaaatttcctgacagattgcattgagctgagatctaactccatgacatcgagtttagctccagggacttgcttgacaatatcttccttaactttagcaccagagtcagtgttcctgaccgtcataaccacatgcacaccacgcagtgaaagaacacgcgctgtctctactcctataccacttgatgctcctgaaaatatgaacacaaagacaagaaaacttaaggaaccaaacatgtccagaaaactcaatgcaggctagactactttttaaagttgtatcaaccaatgatcagttaagctcttccaagccttttcaaacnnnnnnnnnnnnnnnnnnnnnnnnnnnnnnnnnnnnatcgatgctacactcaaatatgtatgtgcaagtctttagtgtcacctaacagggttctatcaattcaaggactccattgttcttgttcaagccctaatggaatatgatcaaaatatagaaacgatttctacaagcaaatctttattttttc

SEQ ID NO: 23767 - DNA, 541 bp, Arabidopsis thaliana landsberg
acccgaacttttaaaatacttgaacgggtctaaacttcaaaacccaaaaaacccgaattcgaaccttaatctttataggtactcaaacatatctcaaatagaagtatatatcagttaaatttatacttatatatagaaaatattatgatttttttggatattctagttatttagtgtatttttaaatatattcaagcaaaactactcgtgttgaattggaaatttttgaaattttcaagtaatttaatagatttacatacaaaattttgatatttcgatatataaataaacccaaatccgaaccgaacctgacccgaaatcttaaattagccgattaggtcttaaatttctaaacccaaaaaactcaaacccgaaatactcatcccgaatctgacccgaagcctacccggatacccaaaagcccagggctaaacacactcggtttctaaacaaagtgcacaaaacaaatgaacacaaccggtaaaattcttttttagtttaaaaaatggctcaagggcaagatatatatatcgaagcgctt

SEQ ID NO: 23768 - DNA, 523 bp, Arabidopsis thaliana landsberg
gtaggtcgacgctcagacgtcatcccctatccacccgcgcctactgtggccggtgaaggcctattgccagcccctgcgccgacggcgaagatcccccgaagtggtggtggagccggcagccgaagacccatggccgcgactgggccttcgcaggtggctgagtagttgttggggagtctgtaaattttgtctgtgttactgaaccttggttgctgcgcaggttcaggattttgggcctgcacacgcaaccgctactgacactgctaattttgtggcggcttcgaccgtggttgctgaagactattctgatgattctgtgtctaagtgttttgagtctgatgattctgggagcttgactgtgtggacagaggagtcatcggatgaggatttggattagtttgtagcattggatgtggcatcggcggaggcttctccacgtgtaatgggtgatgaggatcttccgggtgcgagtacttggcataggccacaaagggcggtggcgaaacagagactgagtgagttg

SEQ ID NO: 23769 - DNA, 709 bp, Arabidopsis thaliana landsberg
cgcaattgcttcaaataggatttggtatatttgattttacaaagttatgtgtgtcatagttttaccacaagttttcttgttattccgacatcataccttgctcgacttgcattatcctccattttccttttcatactccaaatgttctttcaatgactgatcgaagtgaagaatgaaggcgattaaatttttctttgtaattgttgggtggtgcttgattttgaaagtggctgggatgatatctagattgcctatatggtccaagatatccacgacgtaaaccatatcctgaatcaacaagataatatttacctataggtggatgtggaaaatgtgtatcgccttgcatagccaatgcgagaacttttgcattatgtgcagaaccaggcacaccaacatatatatatgtaaacaacatgtctaagttgcatatacccagaatgttcatgctgcatttattttttctgttccagtatcgttgttggtctcttccagaaaccttagcaggaacatgtgtcccatccattccgccaataaaccctttgaagtgtggccaataacgcctatctgatcgcaacttaggatgaaatgtaatgagagtcattgggtccggcttaaacatatctattgacataagctccatgaatccaataactttctgataattatcagttttttttagaatttatctttgttttttgttataatt

SEQ ID NO: 23770 - DNA, 645 bp, Arabidopsis thaliana landsberg
  unsure (1)..(645): unsure at all n locations
tcgatctaactctagaggatcccacgccgtgacatcccctacatcattgaccacattgccagagctatctcgccgcaggtaagccccgccacccttttctccaccgcagtactgttccattaggggaaggaccctgggttagattaggatagaccctaaggggtttttcacattgtcagtcacccgaatgaatagtgccctgaggacctagtcgtaatagaaacagtaaagataaccaagggtctcagcgcaaactggttttccattcgaatttaaattaaatttttaataaataacagcagtcaacttcaaaaaggcataacttgagttttatacatcaaaaattggtcaaaccaaatttgctggattctaaaaattataaacaatgagacaaaaatattgaacgccantgttttatgtactaatatttagagcttaaatttaaattataaaactacccacaccgttattaatacagagagaaaataggaatacttcaatacggggctgaagaaaatttgtagagatgctcaggngcanttcaccatttgaaaatactgagcccccagtataaaagattcaccaggaatgtccattaaggttattctgccgaacgttaaaaaattaaaaaggtactagaaagtg

SEQ ID NO: 23771 - DNA, 558 bp, Arabidopsis thaliana landsberg
  unsure (1)..(558): unsure at all n locations
attactttacatactgtatttgatttgatcattcattatattaccatatgtcaaaaaattccactcacctcaacaggtttaataccaacatcgatgaggnnnnnnnnnnnnnnnnnnnnnnnncctctgaccatgtttggtttcccaacagctgagattaggatatcagcttgtcttgtgagttcttcagggttcatggttcttgaatggataatgctaacggttgcatcctccttctacatttagaaaataaacatcgataaagaatgttgtcctaaccagaaaaaatggcatattgaagaaggaatcatcattacctgcagcaacagagcagctggcataccaacaatgttactccttccaataacaactgctcttttgcctttgaattcaatgttgtatctgtgcaacaactcgatgcatccttttggagtacatggaacgaataaaggttctctaccacgcatggcangccgtccaatatttagcgggtgaaatccatcaacgtctttctctatactaccgcattcatatgttctgtcatcatatgctgatata

SEQ ID NO: 23772 - DNA, 2232 bp, Arabidopsis thaliana landsberg
tgtgtttcactcaaccaagtgcttatgctcttgtgatgattgcaggtgtctgcaaagggaatggttgaagactccttgtccacacctttatcgagtaacacaaggtaaaaactgaattaactcttagaaaacttctttttacttccttcattcacgagtggttagagaagtaatcaggtgttacagtaagtgcagagggaagatagctcctaattcttctgccaagacaggtcgaggaagatggaatttcctccctgcggagtaagaagaactgatcttcataagagtttactcaattcaaaaatgtataatgtgtacgtacctttttaaccaagttattggaaaacaaaagcaggacaccgagctgttttacaccgtttggcttaagaacagaggagagagcagagagaagaaaaaaggcaagaatagagatatttttggtttctacgcttttgtcttgtcacttaccatcatttaactggttcttgtgtttcagaagctagaggggaaattcaaggaaatggagacacagaaccagaagccgaaggataggagtgtgaagaagaaagagagtaaactaaggcaaaggctatgcttcaaagcgaagccacttccaaatttctacaaacagagaccaaaatcaacagaccaaactaagaaagtaagcttactttcactaatcgccaaatgtatgtgtgacgtactaaaagaaaaagatagtagctatcgtttctgtgtctgagagttctctgtgtggtctttgtaggctctgttacagtagcagagaggtcttacagaaactccctatcatcatctttcagagagatattgcgctgacttagcgcctgttgctgtggggagaactatcaaaaccggattgcctcaaaccgtatttggttttattccaagaaggaatattgaattttactagattgcattgtatgaatatttgtaaactttgtttatatatgatttgaaaacacaaaataagaaagaaagggggcattccgagaattgaactcgggacctctcgcaccctaagcgagaatcataccactagaccaaatgccctctttgaaaaatttgtttttcatttaatttctaaacaaacattaataagttcacaatcatcaaaaattacgtaatcaaaaaaaacatagtacaacaacggtacgtaataataataactccattcaatctcttgattaatataaatcactgtatatagtatagttagttagttaaagagacacggcctcatctcataatgtgaatcttatgattccgtctcaagtttaattaaaaaacaaaacttagagagagaagatgaagaatccggcggcggcgacagtgccggcgatggagagcttcacattagtcgtggcgccacttttgggtgactcggcggcggcgggtccatcagatgagggtccgtcggaggagggaccatcggcttcgggggtaggagcgggtggggaggagacggtgggtgcctcggcggagtcactggggctggctgcagagtagtcgtcttcaggggtgggttcctcagcaacaggggatgatgctttcggtgcggcggcggaggatttgggtgcagcggcaggagccttggttggggatttggttggtgatacggtgggtgcagctgaaggtgcatcggcggcgaatacggtgcccacggtcaaagccaaaagggcaactacgacaaatagacgtgccattattttctactttttaaatatagttatagagattagtaagaggaggtgttcaaagctaaagcagtatattttatttgtttgaatactgcagaagcttcagatgaaggaaaacaagaggacaatgagatggatttatatgttttgaaatttgagaaattttaggaaaatcgatggatttgagaagaaaatgggcatccattagccttattttagaagtgagctactttctgtatatattaatttttgtacgtagcaaaagatagcgagatcctaaaaattggatttctattaagaacaaacgattgggccatgaatttagttcaggcccacatgagatgtgtgatctttgttttggaacttgcctacttaccacaaacactaaaaactcatctaaaaacagaggatggatattcaagcccaccacaaaaggttgttgattcaaaatgagatggcgagagagatcccacattgcataaaagattacaaattcaatatatgaggagcgaca

SEQ ID NO: 23773 - DNA, 549 bp, Arabidopsis thaliana landsberg
ccacatcaagtttgtagagctatgaaaggggaacaattttgctatagagatcaagtcctggtactatgaaatgttttgagaaaattgggttcaaagttgggctgtcaggctgtcctaagtctgaattcagactaacagtgtgattgagcaaaccttgaattgggattcgaccatgatccagtaggaatttgactagagatgctatagtaaaaatgaagatagattataggtctataactttgatggagataaattatgaggttatcacatagaatttggagaaaattggccctgattttgctctgttagtcgttctgaaggaactatgtgatggtacagtatcccgatgggattgccagctcagtaagctcgccgccggtgatccacgcgtccggatttgcactggtcaccgtgattcatgcttggcacgcagaggatatccatgagaaggtaaaagatctcacgggggaatggatttgatcgcggattgaagtctatcaccgtgcctgtagccgttgcgacgtggccggaccgccagcgtcgccgtgg

SEQ ID NO: 23774 - DNA, 547 bp, Arabidopsis thaliana landsberg
gaagcaattggcaacctcaagtgtctcaaatgctcagcttcaaatacaatatccgtttttcatttttttttgcatattttagttgtacatcgatatatctttctagagtttggatgtgtttctcacaagttcagtaaacatctaagctctacactaacttatatttgtatatagtatattctttgaaaattcaaattctcaatttcacaacaattatgggatatgctagctaaataaatatttggtaaatacatgcaaagttttctctggtgttgttaaagtccattgagatgcataattattcttgctagaataatcaaatccgaaagtacctactcattatccgtgattgtgtatctccatttgttttttttgtctaggcaaggaagacaaagaagaaggttgaagaagttcatgaaatagagggaaattcttagactatgaatactaaagattactatatagaaaagagtatctacttgtttttttggtctacttcctttatttatttaagtttgacaatgttaattgaaaccttattttcatg

SEQ ID NO: 23775 - DNA, 578 bp, Arabidopsis thaliana landsberg
  unsure (1)..(578): unsure at all n locations
ggttatagtgtacagagagacttttggcgtcaagcggcgaaatccgatgtaatttctttcatcttcttataatagcttctagagaatttagaggaaattgatagcttgtatggttgttaatatggactgatagattattttttgctgatggatcgatcttagggtttcgatttagagaacatctcacttccaccaggtacgaatggaattgtcatgggactgattccctacgactgtcaacgtgcaaggcattatccgtttcctgtcttggtcaaactttatgctaagtttgggcttcatcgttacaatatgttgaaggtaaaatataaatattgattgattgattcggttgatttgtctcctctagttgtatgctctgttatatataccatatatattgattgattcgattttcttccttaggggacaagcttccagctcgctaccctaatgaaattcaacatgttaccgaactatattttctctttctacatgactctgcttgcacatgatcnnnnnnnnnnnnnnnnnncatcgcagataacctttcaggttcgagttgatgaacaacaatttgg

SEQ ID NO: 23776 - DNA, 421 bp, Arabidopsis thaliana landsberg
aaaacactatctaagttgatatgtacgtttgggaacgtaattttatattttgtatatgtaggtttacacatagtggctttggagcattttcgtgtatgtaagtgttatagaagtttaacagtatctcataatcagaaaatttctaattttatatatgtttatatttacagaatgagaaactaacatttgttgataaaataattatgttatatgagacataagccaaagcaataataaatatattttactaaattttacaattttgatagagacagacgaataaataaatattagaattagagatataaagcactattaagatgtttacaaaacattgctgtcatctacaatattaaatcctttcataccttctaagatttattttaagatgaatcatattaaactctgtcaataatatcga

SEQ ID NO: 23777 - DNA, 276 bp, Arabidopsis thaliana landsberg
attctctcttttcttcatccccttccaccgtatcttaaatattgttttgtttatttgtttgtttttttcttgttgttgttatgagtttaaaaaatattattgtaaacacttaattctaaattttaattttagagtatgaaccttacactgttattcttttttgtttaaatacatctcgattattaatttttcattaccatcttataaataatcattctctcatcattttgcactatattcatgtatatatatcttatgttgttatatgggtaaaac

SEQ ID NO: 23778 - DNA, 464 bp, Arabidopsis thaliana landsberg
ctaaacactatttgtttgtttaaaatatgatatttatttctctttaataataatcataatcataatttattgcatatttattctttaaaatgtttaactcccataatgtttgactaaaaaaaataactcaacttatcttatataaaaattgttacaaaaatactatacaaatgatggtttaaaataaaaattaacattaaattaatttaaaacatgtgcttcccctacaattatttcctattttcattattataaaataaataatttacataatgtgatttttattacactatttttacttatgatgtctcatttacccaagattaaataatacagattttaaaaaaaaaagataattacataaaacagattcaattgcctttgtcaatacaaatgtataattgaatgaaaaataaaagattctaatgaccacaaaaaaattggaaaaaaagaagagagagaga

SEQ ID NO: 23779 - DNA, 469 bp, Arabidopsis thaliana landsberg
  unsure (1)..(469): unsure at all n locations
tagctaacattttaataaggtatcttcttctcgtctttttgagctgcaaaggatactttttgttatagagaagttagataaatcaatggatgattatattaaggagataaagcgcatctgtgaacaacttactgttattggtagtcctgtgagtgagaaaatgaagatttttgctgccttacatggtcttggaagagactatgagccaatttaaacatcaatcgaaggctccatggatcttgnnnnnnnnnnnnnnnnnnnnngtatcataccttggttaactggctttgtggataggcttgcatgctataacacaggcgtggaagtttcacctcatctggccttctacacaaactactcaggaaaaggaagagggtatttcagtgggaagcctagtggtaattaaggaaaaggtgggcactactcaaccataggcagaggctttccttgcagatctcttcaagctcca

SEQ ID NO: 23780 - DNA, 893 bp, Arabidopsis thaliana landsberg
tgactcggtagaagcatcaccatggtacgtttcatgtgtctaacagctccaaagatttctccaaagaaaaaaagacttgatgttttctcctccttgtctccttgaggtggagaccattgtttgtctttaacgtaccatagagacgagaatgtgacgataaggaggagagtgatggataagaagaaacaagtcttgagattcgcacaatagatgtcgcaagcttttgtcattgtgaaaggaaacattttgtgaaggttagtgtaagatccagcagcgtaacccaaaacgtttccaaccgccataaagaaggagaaacacgcgtttgcgactcgcgtttttttagcgtctccggcggctaaatcggctaagaaagcacggcatggtccttgtaaggtgttgttagccacgtcgaggaaccaaaacccggttaggaagattataatggctcgagtccttaccttgttctcgagtttatctccaaaactatgtcccatatccgccgcgaatccgataaggaaaaccgagacggctacgagtgcgactccggcggcaatgaaaggacgacggcgaccgaatctggactcgcatcggtcactgtggtaaccgacgatcggttgaacaatcatgccggagataggaccacaaagccacatgtaagacgaccatttgtgagggatcccgaggagttgtatgtaaggagtcagaagagaaagctgtaaggcccacccgaactgtacaccggcggcgattgaagcgacggagatgatcttacgcagaggagatggttgactgagatcttccggtgacgactgtgtctctaacgccgtagcattgttggcggctctttctgcttccaaggctcccattatgaaaagaaaaacgagcagacaaaa

SEQ ID NO: 23781 - DNA, 1084 bp, Arabidopsis thaliana landsberg
  unsure (1)..(1084): unsure at all n locations
ctctaaagcgccatcgacactgtcattcctcatccttactccgattccaaacacatcaacaagcaaccgcgcgtcaatgggctggtccgtccagctagggtacgctaccacaggaacaccagccaccactgtctccattgtcgaattccagccgcaatgcgtgacaaaacaagagatcgccacgtgactcaaaatcttctcttgtggactccactcgagaacaaccccttgtccttctttcaccatctcctgcaaaccatcaacgttttgggctttctcctttggccttatcacccaaataaatggaagtcctctgttcttcagcgccttcgctatggtctcgacctgattctccaatgtttcgagcatacttccgaaagatatgtacacaacagaagacctagcttgcttgtcaagccactccatacaacaatcatcagatttgcaaaaatctaggctcttaccgtctagggtttcctcctcaccacctcccaacagaaatggagaaaccagaggaccaattggaattatagggttttaaatcaaacatcgattcaattatctctgattcgagttcataaaatgaattagccaaaacccatttaacatctttcaagcattcgacgaattccgccattagtgtattgaagatagcaccgtgagaaggtaacatcaatgtcgggagatctcggacttctaaaaacggtaagcctggtaactccactttttgattaggatcttcgagatcggggaaagagtttgtcttcatgtagtaacggtaataaactgagaaacctgcacaagcttcaatccagaggattgcacaaggaatgttatgagcagctgcaacagctggaacccatggagtaaaaggcacagagatgatgcaatcaaatctctttccttcgattattttcgaaaatttattggctccgacttttctnnnnnnnnnnnnnnnnnnntcgtggtctcttggatcgtctntaggcagaccatcagagaagaacacaagatccaccaggctatggggttcatcgngatttttcatcgcttctaatactatgacaggctcgcggctgattca

SEQ ID NO: 23782 - DNA, 715 bp, Arabidopsis thaliana landsberg
gtggctactgacttacaaatgtattcttttaagtttttttacctcacacttatttttatttttatttttgtgttttacctataattttgtttttggatataattaggtcggtctctaatatagtagggctatattaattgatatgcctggaggatgaataaattaaaaatctatgcataaatattagttatttaggtaagtatgaaagattaataatatataaattaaaaatatccttttaaaaaataataattacaaaaatgccattgaataaaaataattgtaatattcggatgataagtatataactatttgtttaacgtgctaaaaactatgatatcgcgataagtttataaattatttgttaaaacatatttatcgatttaaaattgtaaattggtattttttattatgtatattaagcacaataaaagggaattagactttttcttacataattaacatgataataattataacaacatgatatatagaataataacatgctaacatattatataacggaataatatttatatgaaaaacgttaagatattcgatatgtgaataatatttactctaacgtataaatttatacatgaatatttaccaataattgttaccgggggggttaaccctgctgaacaatgaaaaatatttaagtaaagcaaaaataaagatggtgaggaatttttaattaaaaaaaaagaaaaaa

SEQ ID NO: 23783 - DNA, 669 bp, Arabidopsis thaliana landsberg
taatgctacaacaaccccaagaaagctaagtcaatatctcttccaaagattgttaccaaagaagttggagttgagaagcaaagcctaaaaccattacttgaatcaagcgttgagccaatgcactgtaagtcttctaatctttcaaaatccagaggagtcacttgttataactgtcgtaagaaaggacatttagttgcaacttaccttgaaaaacttgagctaactaatacttcattagaatcgaaactgagctcaccaaactcaagtagtgaagtagttagtcaaggtttagaaaattctagttcttgtgtcatgcacttgttcttgtcaaaagatgttgattcaggtcatattatggagcatgaaaatgacaaaattgaagaaagcacaaaagaggagaatcatcatttggtgtcaaccacttcacaagcttgtcgactggctatgtttcaaaaatcaccatcttgaacaagaaaggaccgccatatgtatcccaaccagttctaaaccgagatttacctaaagaagaaccacgtcaattaggaggattcactcaagttgaggccgtcatttgttcacaaacattcacctatagctgaatgcaatattgtttccatggataaaccaccagattgctcaccatcattaatacttgatgtctgttcacct

SEQ ID NO: 23784 - DNA, 621 bp, Arabidopsis thaliana landsberg
  unsure (1)..(621): unsure at all n locations
tactcacaatattatgcataaccctattacaaagatgatcagtgtttatatacaactacaaactttttcattctgatttagtctcattgtatcatcattcattcattcatcatagagattagagatagataaaatatagagaaattttcaatatcatgtaaaaacatccccgagaaccaaacccgatgtaaatcgttatttggaaaaacatttttacaaccccaacgtaacaagactcactgtgaatttataataggaaggaaatgggccatgggccatataatatgtaatggacttaaactaggtttagctttgtgagattatggttaatgtaacctaaatcctatatatatgtatgtgtagccacaaagatgaataacacaataacacagaatttccagtatctaaacctaaggccctgacatggtatcagagccttaggtcttttaggttttaaagtttttagggtttttgttttgcttccgctaaaatgaaaaaaaagtagttatttttggttttaggttttgttagtcgtagggtttttttgtttgtcgggtttcgtttttaatgttttaatttgggtntntgtgtgtttgttcagtttgtgagattccttgtgag

SEQ ID NO: 23785 - DNA, 1002 bp, Arabidopsis thaliana landsberg
  unsure (1)..(1002): unsure at all n locations
ttattaatcatagtaggaaaatgattctaaattttcatctctatataaacaaatagatagtcttgaaatttctcaccaaactaccaaaaacttttcaaaaacaccacccatacttcaacgtcagtctatgagtaaagctatttttttgtccttgtgtaatttggtttcgaactatgattatgtttttagttggaaatcaatatcatcaatacaataaaaacactagatttttctcgtgttgacatatcattaaaaattactataacattaatacaactcagctctgcgtaggtatgaactatgaagctgtgtgttgtgtttcattttcctctgtaatttgtaattaagcaatcgaaattttcattaaagaagataacgaataacatcatgttgtaattctcacattctctctatctctttctctgtttttagtttctttgttctagagaggaaaaacaacaaacgtttttactctttagtttctttgttctagagagtataatattactctgtacttagtgagtcatggtagttgataggtatttaattgcaagaatatctctatactggcaaaaacaaggtgaaataaaagtttgttttgcgaataccaaatccatcaaaaggtaatgtaacccaatgcatgctcaagtgtgtctgaggataataatttatatagccgtcgtagccactctcaagtcttatctcacgtctcttcatattctccttttctctccaaaatttccttaatggtgtagcaaaacttgatatctgcatttaaaccctaatatatattattaccttctttccttttccgnttcttatttctctctctttcttgagaacaacattctccttttctctccaaaatttccttaattttctgagatttgtgttcacaagcagagtcgctctaaacggtatgcttaaatctacgnttcttcatctggtttggctttctctgtttggctttatatagctctcatgggttctttctgcattatg

SEQ ID NO: 23786 - DNA, 654 bp, Arabidopsis thaliana landsberg
gcaggtcgactctagaggatcccccatttgggtcggtggtggttccgtcacggagactttgacggtgcattattgacgtcaacatgaagtagctctcacaaaacacaaaaaggaccgtttagtttgctagttattaaaaatataatgggcttcaagcccataataacatgtctttttacaaaacagaagccacgtattatataaacccattttttaatatataaataattgggctgtacttgggcttggacggtttcactcttttatttttatttttttaaagttttttctatattagtaataatatatttacagtggaagccttttttgcggaaagttctattaatgcttatacacaaagaaattgaggttcaagtcccaaatactgtgatttattagcagataatggaggtaagtgtgcaagagatctcgaacgatgtacaattataactgtttgccaggatttgaagatcattcaaggtgtccatcaaaagcatgaagaaggagaagaaagtgtcgtctttcgtggatctaataaagatcgaaagaaattattcgtaatagaatcggctatataacggtctcataaattataatttgcaataaataataaatctagaacggtaaaaaaatatatatatctacatgattgaa

SEQ ID NO: 23787 - DNA, 556 bp, Arabidopsis thaliana landsberg
ttttattcattattagacatattactggggagggcggctacacttaaatatctataacaaattatattaaatcacaatcatgatgtctattaaaaaggtcattttatagttagaaacaagttctctaattctttagtaagaaacctatatttaccaatatactatcaatttctttattagaaaaatatgagcgcctaattaagtcattttaacattattataaattctactctttctgttttctcctttcttttctaaatagaatttatacgtataactaaaaattgtttatttataattcttctgacattaatatactaagaattaattatacattactaaatgagacttttaataacatattcattgttattatggcataaataagcctttctaattctaagtaattaagtactatacttatgattatacttttattatgaataataatattttcataaataaaatatacaagtttaaagaatggataactttaggcaaaaatctactatttaaatagatggggctccacacaaggaatagatcataatgaagt

SEQ ID NO: 23788 - DNA, 571 bp, Arabidopsis thaliana landsberg
ctcgactctagaggatcccctcataagattgtgccatgaatcaattttattgatttctgattttgacatgtgtagaacaaaatttctttttttcattattaattttaagacaaagataattttaagaaattataaataaaaaaaataaaaatacctactaattctaattttaagctattaattcttaaacaatctttcaaatttttaaaaagatttaaaaaattaaaaaacttttcaaaacaccaccattgcttcaacgtcattctcttggtaaagttttgttttggttagtttgtggattttttgttaataatgatttgttgtttgttaactatttcaatcttaatgaaaatatatatttgatatggtgtgatatagatttcaatattattttgatatgattttttcttttagcatttattcattaaaataaagtgtgtagaatcaaaatccagtttattatgattagatagatagttcaattgtattttaaatagaatgtaagataaaaactgttttaataaaagtactaaattagatataaaaagtgtgtgtgagatactatttagaa

SEQ ID NO: 23789 - DNA, 679 bp, Arabidopsis thaliana landsberg
  unsure (1)..(679): unsure at all n locations
gattatcgatttcatcatcaataatcaaagagaagaatgctagacgatagtgaggaatagcgtgtaccggacttgttaatctgacgacagtgtcaacagaaaatccaattttgaagctatgagttgttgccctgacagaacccgagatctcaacaactccaaaatttgttatcgttacccattctccttcattaataaaatctttatagtgatccgacatcttatacccaacagtagcttcaatagtcataccctacggatcaaacatactaatcaaaattctaaaacatgcaaacctagaattatcattacaaaacagtcaatacttacatgttcgtcggcgagaatcaaacccataacctttgaagatggaaccagcgaaactaagaatgtcctcacaactctaccacgaatacaccatcatctaatagacggtttcaacagtgaaagaggatgaaacgattccatcttttggcagaaattttttagttatttttttgtattcgttttatgagatgctaatgataccgatatatatataagagagagaaatacaccatagaggcatgttttagacgcaactntnttaaaaagtagtaacagtcatgacgtttcaagtcaaacatcaatcttgaagattctgtaatatatnttggaataaatcaatattaataaaata

SEQ ID NO: 23790 - DNA, 607 bp, Arabidopsis thaliana landsberg
gatacatagcccacatgtccttcacatgtctcacacgattgcaccacatggggtcatccctcttttcagcggggaagagtcccaatgggtgcatcaccatctccagggatggtagccgcagaaagtcatcagagtcttcatagctgccgcctcggtggtgtcgtacatcctgaatccaatagtctcggagtcaagggaacgccaacccagctaaaggggtgtgcctccagagtcagccagactcggcaacatggcacccgatgctccacatatagttgcattgtgtacaaaggggcgtagggtaaccggcggagttgagcacctctcacaagaaggaaggaaaaccctcgtgagaaaggaaatcgaaacagaaatgagtgtctcctccactggcgaggtgggtgaagtcatctgtggaagaggatcagatgtaaaggttatggtggatgaaagaaaattgaaagagcctggatggttaaaaggaagcgggttacatcaaaattttttacccctttaatttataatccttttagttttataatgcatgcatgctgaaaagaacgtctccacactgaatcagaagggtgcttttttaggccttcttaaa

SEQ ID NO: 23791 - DNA, 445 bp, Arabidopsis thaliana landsberg
ggaaacacacgaaatttatgaatcatggactatagtggcgtttgtttaccaatatatctttagtgatcccggtatcttggtcctcgggttttgatccttagttatgacaagataatgctatctctaaacaaatgacgtttcttcttacataacaatttattttctaggatgtttatatatttttatttattaatgtttatagtttttcgatacaaaaaatactctctcttctcctaaatgattaattttctagaaaaaaataccttttgtaaaagattgattttttaagtcttccatgcaatatttattggttagtattggtgaattgtaattttcaagaaaaatagataattatcattgatttagaattacaggaaaactacttaaacacagaaaaaatcaatgacatattataaatcaaatattttaataattattcctcttt

SEQ ID NO: 23792 - DNA, 539 bp, Arabidopsis thaliana landsberg
tgacagtatcgtccccatcactttggctacactgctcctttctttgaatgatactttctccatcctttgttaaaaatttgacattgattgtgttacgttttattccaatagaaatgattacagaaataccagtttatatgaatttattatattcatgcaaaccgcaaacgtccttgttagatttggaccacaagattgtgctatagtgatgtagtaacaagctaacttcatatcatttgaacatgaatgatttcgtttaattttggggtcacgaaacttttcctaaataactattttttacgaaaacatctaatgaatcaaataaagtttcgtgcagatttattcatgttaggtaaaatgtttataaagtacgtgatatcacctatatgttattggtatatatataaactatgatcttatacattactatatagcgcattggatattgtaggagagtgatttaattagctctatccagtacttaacctgatttaaacaagaataaccattcatattttgactactggtccatagcgatc

SEQ ID NO: 23793 - DNA, 632 bp, Arabidopsis thaliana landsberg
ttttcttccccaaaattctgccaccaccacaacagtctctctctcttctctcctcttctctccgtcggagtcaccgtgagagtcaccgccggagtcaccgccgtctacaccgccggagtcaccgccgtctacaccgccggagtcaccgccgtcttcaccgccgtaagtctctcgtcatctccttgaaaaatcaaactctagtttcacttgatattagatgtcctttctctcctttgattttgtgtttttctcctagcttcagaatatgacgaatctcatgaataatctaatttttagacttggtgataagtgtatctttcattctttttttaaacgaaacaattcggtgaaaaaacattcacgagagacacatagtagtgctatacacttctagaaaaggagagaatttaaataaacattatcaagtaacgtcatgagagtttttctatagaggtcatgatcttgtgttttctttgaaaatctgaaacccatttgggaattccaacattgctttttttaagtatcaaatacgttacttgctcttaatcagaatttgttacttatatgatttaattaatgttcattgatggtcaagtttatctctaattaaagtcatgaggttttttgtagat

SEQ ID NO: 23794 - DNA, 607 bp, Arabidopsis thaliana landsberg
  unsure (1)..(607): unsure at all n locations
atatactatagttagaacttacataggaaatgattacagacgtcnnnnnnnnnnnnnnnnnnnnnnnnnnnnnnnnnnnnnnnnnnnnnnnnnnnnnnnnnnnngtgtgctaaaacatcaatctgaatctagcaatggttttacgaaataattcacctataccattgataacaaaattgtgtttagtaaacaatcttgaaaggtttcgacgaaataaatccgtatctagacatgtatggtttagtacttatagtcggtttagaaatgatagatgaccaatgatatttatggggtgataaactgatttcactagtttgatagactctctattaccaaagtccaaactcaatctcaaaacatcaagaacggaaacctcccgattttttgctaggaaatatccaaaaatctacctagactttgtcctcgtgatcaacggcggtggatttgtatgatcgatcagatttaaagaagtatagatcaacccattaatatccctgaaaatatagacaacattaaaaagcttaaatctcactttcttggagtgagattaaaaattgaaccaaagaaaaaatgaagcttacctgatcggtgatagagaaactataac

SEQ ID NO: 23795 - DNA, 564 bp, Arabidopsis thaliana landsberg
  unsure (1)..(564): unsure at all n locations
aaaagcccaaggagtagacatcactggttttgaatatccttcaattctttgactctcatcttgatccagcaggttataaatgtcattcaatccaggtcttggtttcatattcagaatctgaccacgaatgttattgaagttatcattcaatcccatcaaaaactgtatcacacgacttgtctctgcttcctcaagaagttctttaacctgatcacaatcacatttcttcacagtcttaattcttgtgtttgacaattgttcccacaatgtcttcttcttagtgaagtatgttgataaatcnnnnnnnnnnnnnnnnnnnnnnnnnnnnnnnnnnnnnnnnnnnnnnnnnnnnnnnnnnnnattaaccttgaacctagtgaatagatcatcccacatttccatagcatcctgataatacagnatactatcatatatctccttgttcacgacattaagaatccacgatttcaccatgctattgcatctactccacacacggaaacttatatcatcagtaggcaacagaacaaccaagcacgccttgagaggaaactagcatgtgat

SEQ ID NO: 23796 - DNA, 619 bp, Arabidopsis thaliana landsberg
  unsure (1)..(619): unsure at all n locations
tggttccagttcgtttttttttggttcgggtattatgcccatgcatagaggggtgaactttggtttttgantgagatgatgttataatacatgtgggaaaacacatatcttcatttagtaaacatcatttcattctaatatttattctatataatgatttttggacaggcacatataatgagtgtatatccagcagcattcagagtctcctttctttacactgtatgtgtttcaatcgtgacctcgacgattggactagtagttgaaaagaacaacccaagcgtttggatcattcatttcgatattactttgattacaattgttaccatggtatgttatatatatatatattttaaagatatcaaaatatctactttttcatcttaacacttttttaaaaataaaatatttcaggcaatagtaacttcagtatactatgtgattcattcatggacagtacgacataaaggacctctgtacttagccatatttaaacctttgtccattttaatagcagtggttatgggnnnnnnnnnnnnnnnnnnnnnnnnnnnnnnnnnnnnnnnntaatgaatcaatagtcttcataaacatatctataaacaaaaacatctactca

SEQ ID NO: 23797 - DNA, 768 bp, Arabidopsis thaliana landsberg
attttccgtcatctccaacctgtgtatcctttctacaaacctaattttgcggccgtctttatcagttttctcaaaatctcatttttgtttacgttttgattactatttataaataaatcttgtaaacctagagtatctttagtttaaaaagctaaagtgtttgaatctatgagttttttttttgcattttgttcatctctgaaaacaataaatttgttcctcaattttggagttcaatggagagatgtcgaaatatgaaggagtggataatgaattttgaacttctttctacttctctctcgaatttctccgtctctttctctttttcttcttcttcaatttctttgtttcagtttttttttttttttctcaaaactgaaccacataaactaaaccgaaatcaagtgttgtgtggtttggttgctcctattaaggatattttggtctaaagcaactaaaaagacaaacggtgaaaatcatatcttactttaacaaataataaaaacaattcttttttcatccacttatatgaaaatttctttttatataatcttgttttagtttatggctattggctagcgcaagcctggaatagttttgtcctaactacagctggattaaaagagagagaaaaaagagagactcgagtagtttgacttgggctagaaggagcataaaaatttatacattctctctcattggcttcttccttcattccaaacaaacaaactgaaacccctccttatttttctgtatctgaaccccaat

SEQ ID NO: 23798 - DNA, 518 bp, Arabidopsis thaliana landsberg
gtatgcaggtcgactctagaggatcccttgttattaatgtaaaatattgtcacttatacacattgttagatgtaaaattcattatgtgcacattaaaatcaatgtatttgtacaacgggtgatctcttaacaaggtaattctttaattttatcattaactattacatgaaaacattgtcacatgtaagtttaacgggtccccgctgggaacggggatggggaatgcttccccatccccgtccccgtttacccatcgggggagaacttatccccattgacatccccgtgggggaagaaacttccccatccccattccctaatagaggaattcccgcggggaatcggggatcgggtccccattgccatctctagccacaatcctgttccacacttcaatcccgttccacacttccacttccacgcacaggctccgtggcacaaagatcgcgcgcgcaagtagccacgaccccacggccgcgagcgggaaacgcgaaatccactacattgcgggttgccgc

SEQ ID NO: 23799 - DNA, 934 bp, Arabidopsis thaliana landsberg
aacttaaggatcttttgtctccggaacaacctgccttgtttggagtttcctccgcgaatgtctgattaccatctgcattcttgtgctcgtcagagccatcagagtgtcggtcaccgggcatcatcaacatccgtggatgaggaagcagagctccagaaacatcgccccaccactcagggttctcagtataccattccattgtcttcctcagtccttcttcccaattggttcgctcacaccatcctaatttcttcagcttctggtcatcgaggaagtacctctggtcattgaatggccggttttccacatactgaatggtggagtcagggtctatcccaaagagtttactgatgtcattagccacatcatttactctcctttctctcgttgtccctatattgtagacatggttaacttccccctttgtgaagaacaacctcaaatgcctcagcaacatcttcgcagtagagataacttctcacattagatccatctccgtggattgggagaggcttcccattcatggccaagaggatgaacttaggaatcaacttttcaggaaactggttaggaccataaacattgttcccgcgagttgttataaccggcaacccatatgatctaccatatgccatgacaagcatctcagctccagctttagtggcggagtatggattagttgggagcaactgagaagcctcgtgattacccactgaagcatcctcatcagtctctccatagacctcatcagtactcacatggatgaacctcctgatctggccagtgactttacaagcttgcaaaaggacatgggtaccatagatattgttcttggtaaactcaaagctattaccgaaagaattgtcaacatgggtttgagcagcaaagtgcataatggtgtcgatttcttcagtgatgagaaggtagttgacga

SEQ ID NO: 23800 - DNA, 551 bp, Arabidopsis thaliana landsberg
  unsure (1)..(551): unsure at all n locations
aacaacacaaactttcgaaaataggaataatactttgatttaagtttaagcaaaacaatagcatttataaatattagncaaatttaaaatgattagataaatacagtagcacatgttgaacatgataaatttatcttaagaatattaaataaaattaaaattacatatattaactagaaaatacaatatttagttatcatatacatgctagaatggcttgattcatacctaatttagacattccttcaacgaaaactctccaaatcagattcgttattctctgaatgggtttatcttcctccagcgataatcaacaccgtctgtcaaattaataaattgagcgtttgaaagcctcaaataccacaaatatacacataaaacggtgttaactcataggaaatcaaaagttcaccggtttttatcttcgtgcgagaaatagagagaaagaaaatccgagtttcttttgtaaagataacaatatacgcttttttttttttcttttattaaaactaaacatccaatcaaatgcatgtgaacacatgtccaccttt

SEQ ID NO: 23801 - DNA, 860 bp, Arabidopsis thaliana landsberg
tggtgaccatacactacaattcttgactctcctgtccaagctgtttttccctttcatcaagagtttgacctctcaaatacactgaagcatcaaaagtttttaaaacatccatcaagtacatccattctcgagtagcaactccttgaatcaaagctcatatagtatcggtattcaaaacagatgtgttttggttatttgccattttaggaaaatcataaacgaagttgagtgagggagaaatcctaccttgaaaaatatgcaaaaccgaaaagaaaaattcagatttagatgattgcaatataaaacaagataaagtcattggaaacagaataatagaggtcgtacatcaacatgaaacacaaacccaaaacccaccaattagattttgatatagccatgaaaagattaatctacggactagggaaaacggtctatttctccacaagaactaccacatcatactagatagagcccaatatatgattacgtgctagatgtcccccaaaaaattacttatcgagttatatccccataaatttaggaagaaacgaaattcaaactatgaatttatggagatataagtagataaatatgtttttggggacatctagcacgtaatgataaattgggctttatctaatataatatacatatttttgtggggatatagacatttttccacggactggaaatgataccgaaggaagagtccatgcacatagagagagattacatgcaacatatagtcctcgaaatcgataaacctaaacctcaaaaagtggtgagataggattgttgactgattttgtttgcatgatgaccaaaaaaagaggagtcatcgttcctttaaattctgcagt

SEQ ID NO: 23802 - DNA, 455 bp, Arabidopsis thaliana landsberg
  unsure (1)..(455): unsure at all n locations
taataaagagaacgatgaaaaaagaagagacctgaataactttgtgggcagagataactatatacctttatcactatccactgccttgagccgtacgtcaacttgccaattttctgccaagatcttggcaagtccaccagagaaatggtcttggnnnnnnnnnnnnnnnnnnnnnnnnnnnnnnnnnnnnnnnnnnnnnnnnnnnnnnnnnnnnnnnnnnnnnnnnnnnnnnnnnnnnnnnnnnnnnnnnnnnnnnnnnnnnnnnnnnnnnnnnnnnnnnnnnnnnnnnnnnnnnnnnnnnnnnnnnnnnnnnnnnnnnnnnnnnnnnnnnnnnnnnnnnnnnnnnnnnnnnnnnnnnnnnnnnnnnnnnnnnnnnnnnnnnnnnnnnnnnnnnnnnnnnnnnnnnnnnnnnnnnnnnnnnnnnnnnnnnnnnnnnnnnnnnnnnnnnnnnnnnn

SEQ ID NO: 23803 - DNA, 489 bp, Arabidopsis thaliana landsberg
tcgactctagaggatccacctgaatttcccaagagagaggcttatatacagagagagacactgtccggaaaaacacgagttagtcaggtgtcggattccagcgccgtacggttacagtttaccttttcggtggccggagagccgtgacgtggcgtggtttgctaacgtgccgcatacggaactaaacggtggagaagaagaatcagaactgggtaaggtatgagaaggataggttttaattccctggttgtggtacgatgtttcaactggagctgaatgctaacatcgacgagatcggacggttgataaatctcaaagatggatcaattcggacagccattgatactggatgtggggtaagttaagacttcagatcactctgttttgttcattgttgcttttgtgtcttggaacattcatgtgatgtctgtgtttttttggctctcttgttaatgtaccatgcttgtgtgatgtcaacattttgatttt

SEQ ID NO: 23804 - DNA, 541 bp, Arabidopsis thaliana landsberg
atccagttgcatgtcctaatttgtaaaaaaccagacacaacagttaactagcggtgccaatggaagttctttggtaagtaaagcttttgctacatgactgttcttgtggtctaattaacatactctcaggagaataactgtgatttgttttgttgttgcagactcatggccttgctgagtacatagctcaggtgagaaacttttccctgaaaacttctccattttatttgttcattctacaaattgaatgttatatcagaaataatttcttgcaactttttctatttcaggaggagatggatcggagaaatgggtattggtggtcattagatagcaagtttatcgcctatgcagaagttgactcctcacagattcctttgttcagaataatgcatcagggaaaacgttcggttggttcagaggcgcaagaagatcatgcttatccttttgcaggagctctcaattctacacttcgtctcggggtagtttcttcagctggtgggtggaagacgacttggatgaatcttgtgtgcggaggaag

SEQ ID NO: 23805 - DNA, 481 bp, Arabidopsis thaliana landsberg
caggtcgactctagaggatccccgaaattaatgaacagtgagtgaaattatttttcctagtttgcttaagtaacagagaacctaggaaaaataaagggacctctagtccagatcagttttaaaataaaatgttttatttagcattattccaactagaaatcaattattagaattacaaaacgataaatcaaaattgataataaaatttcagtggacttgtaaccattagaaccccactgcaaaaaataataaacaccccagcccatcatttttagtagggtaaataaatataatatgataatgagtcatatttcaaataaatcatgaataacccataacaatgcaataatggggcaaataaaatttggtaagtcaatgatgagaaaggcaccagagaaaaatgccaatccattagacggatgccaaataataccaattgcgaatattttataagataggtcatttaatctaattaatgcat

SEQ ID NO: 23806 - DNA, 615 bp, Arabidopsis thaliana landsberg
  unsure (1)..(615): unsure at all n locations
tgtatatgcgggaagaaatgagattacataaagtttttcatgtgtcgcaactacggaagcatgttccggatcctaatgctatcatacctgagccgatacaagagttgagaacaaatctcacctatcccgaagacctcttggtattggtgaaagacgaatgcgggaactaaagaatagaaggattccgcaaattcaagtgttatgggaaaaaatcgtaaggttcctacttgggatgatgaggagaggttctcgaaaaatatccacagttttttgaaccaaaaaacgtagaggatgaagccggaccatctaatctttttggaattcgggatgaattctattaaggggggagggggagaatgtagtgactcgcgtaaggacatcgggcacggacaagagtccaaatttaagaaagttgcctgaatgcatggccatttgaccctaggtgcccaaaacacaatagactatcataggggaagtttgtacaagaatgggcacgaatgagcaagtttgggtaagacgaccgtgtcgcgggnnnnnnnnnnnnnnnnnnnnnnnnngcatggacgactacttggggccaagcaagttcttggagcaaatttgagtgtgtgagcg

SEQ ID NO: 23807 - DNA, 382 bp, Arabidopsis thaliana landsberg
  unsure (1)..(382): unsure at all n locations
gtcctagacatggcacaaacaagcgattctgagttccctttacctcgttagagaattattatgccgttgattcagtatatccaaataaataaggctctttagttcaattctggtccacctccgaggaataaacaagaattgtttaatcgatgtcatgcttcactatgttattatcgagaggacatttggagtttggaaagaaaaatggaggattctttgtgattttccaagataatattttaacctaaaataatatatgaaagtttttcttatccatataaaataaaatataataattttaatttttcgttgcattttattattaaattaattttatttataatatatttatagatttgtggggnngggagtagagacccgg

SEQ ID NO: 23808 - DNA, 517 bp, Arabidopsis thaliana landsberg
gaacgtcgactctagaggatccccgtatgactatctaatcaatatcgtataatttcaagtgtttatccacttctaatggttttctcttattttaccggtgcattcaggttctaacagtttctgctgataaatctgcgaaagtatgggatatctttgaagatgcaagtgggaaattgaatcgaactttggtttgccctggtataggaggtgtggatgatatgcttgttggttgtctctggcagaatgatcatctcgtgacagtctctcttggtgggacatttaatgtgttctctgcaagcaacccagaccaagaaccagttacatttgaagacggttagttctttggtcttctttcctcaaagtagcccaagaactatactatctactagctatgatggtgtcatcatgaggtggatattgggtgttggatttggtgggagactgatgcgctaaaacatcactcaaatagaatgctttgctgcatgtagagcagagcttgttacgcaggttatgagta

SEQ ID NO: 23809 - DNA, 547 bp, Arabidopsis thaliana landsberg
  unsure (1)..(547): unsure at all n locations
aaaaaaatccataatgatgttttttcttaaaaattcatgactttttctgaaattgcatgtttttaaactaaatgaacatgtgagaattttaatgttacatgttattttgaaaaattacacgaatgtgtttcgtttacagttcatcttacaacaaatgaagggtagctttgttatttcatttcttccgacaacatgggtccatggttattttgtaacaaaaaactttctctttgctagtttcttaatttgtatgttttatttggttatctaatattaccctaaaataaacttagcaaatagaaaatgaattttatcaaatcgcctacaccaatgtttggatatcaatgtataatatcaggttacatcaatatatatcataccaagataccataacaataatacaaaaatatcaaattcaaaactattagcagaaagttcatgatctggataagtagttagtagattagcctaaaatagtaaaaactaagttgcaaacctaaaaaacaaatttctcccaaaactagaatttcttaattntttggtctga

SEQ ID NO: 23810 - DNA, 1301 bp, Arabidopsis thaliana landsberg
aaattacaccctgtgaaccatacgcatgtaatgatcacaacatgacgctaagaggatttttttggaattcgagtagcgagaactagactgagagcataacatatacccaaaaccctaagacagaaaacgaaattgagcatgagattaactgaaattgagagaattgatcatacgtactgaatcagtagcaaaatggggttacactctttgattcgatcacaccaagaaatggagaagcaatgaagccagactaacgcaggcaggcttcaaaggagaagaaacatgaaaagagtgagtgaagactgaagagtcgtagaaaaattaaaattgctgaaattgggaattaattcgctcaagtaaagcacgtgcatcaaacatttgggccttttgggttttgtatatgttatgggcctaagaggtatatgttaagcccaatcgttgttaattacaacggtaattctaagaattgacctttggagccgtaataattaggccatctccaatggtgagagccctctcatgggctctctccattctttaacattaattgtgaaaatttgtaagaagagagcttgtattttttttttaaagaaacttcataatccaatggtagtatttctcaagtggggttctcttaaaattgtttcaaattgttttccacaatctctaaatctcaaatagatcattgccttgctaaagaaaacaatgttaactactttcttgctcttaagaagtataaaagttgaaagaacatatatccaagaacacaaagaacaagtcttaagaagaacacaaagaacaattcgaaaagtcaacacaccttcctcttaagaagtgtagaagcacaaatccaaaagactcttgatcagctcgtcgattttgctctgtgaaagagaaaccaaaatatatgagcaaagacggtttactttacataagaaggtaaaaaatggcagtattccttaccaatactagttcaggaacatacaagattcttaatgcagtaccaataaacatcacaatcaattcaggaacatataaaactttccaataagatcattttctcagttcaaaaacaatgaattcttagctagggaatcgtgtgcaggaaagtacagaacagccatggttccatttcttctcattccttgtccagcttccactaaactcacgtcgctcactagcagacgctatctaaatcatggcagaggtaccagtgtttaaacaccgagcaacaaaccaaatctcatgaatcaatgttattatgtctgcaaattcaaaactaagcctcaaggactctatct

SEQ ID NO: 23811 - DNA, 297 bp, Arabidopsis thaliana landsberg
gtgatccaattgctccatacctatgcttgagactctttcttctattggccggagctctatgtcctagtagactcatagtaattaatctagctaacccttggccttccgaaactgaataatgcctaaaatcgtactccagtttcggcagccacatccaaagagacttccatcgcatcgataaaagactcgttctttacagcatcttttgttggaagaaatgataataccttcaccagcaattcatcaggcaactgacttgtcttgtccatttcttcacaacctccacgtatgatttta

SEQ ID NO: 23812 - DNA, 579 bp, Arabidopsis thaliana landsberg
cggtttttgtagattagtgctatcgaataataatccctaatctaaaaatattgacccgagtcattttatttcccgggataagatagtataacgttttgaaattaccaaacgttataacgttttagctggttagtaaattatagcagaacacggttaactgctacaatataatgttataaatgctcaatattcttctagtgattttaatattaataaggaggtcttgtataaactgattgtttcctggaagtgttattgcatcgccaaaaacagttggcggaagtccagcccagtcatgtattggaacatcaattactctgttcttgctgttagaatcgtttggctcttgagtctatgacagtttcttttgtcggaaatgttgtgaaaaataaaaatactatgacttactgtagtttcaaaatataaccaaaaaaaactaaaattttttattagaagtttgaataaagtataattttgttcttagcttaacattaataactgttaattgtcaagagaagactttgcatttttaattttaagtatagactacttttattaaatttcatgatactgtttttt

SEQ ID NO: 23813 - DNA, 1043 bp, Arabidopsis thaliana landsberg
  unsure (1)..(1043): unsure at all n locations
ggacaacttctatctttcagagttgtttatgacatttaacatatcacaacaactttaaaatcttagttaaaagttaaaactcacatcaggcctaatacttagctgaatatctcctacaaattttaatatttaatatatattaacaattagaaaacaatgatttcagtacacaagaaatgagatttctcacaaacttaagcagcctaacaaaagaataagttcaaaaacttaagaaaagtaatgcagataatattagaacataggaaaattctcatttatggtcaaccatttctaacctagatcaacaatatcaacaatttaggtttaatatcaataactatgaacattactagagatttgtagaggtaacctagcaaattgagatcggtaaaaaatttgattaccaaagttagagttcgcccgttaatttatctgagacagaacaataacaantaatcgtacggtatgagacagagtagataacaataagcttcagagaatcatgaatgttttagagatttggtgtagaaagtatcaatactttgtctatggtctccgaaacattacgactgaggctgcagagacgattgtgacgagatggttcgtccatagctttcgagggaccctgacaaaaacaggaagatgatacgagtctctttgacgaatgaaagattaaagagtcagttatgagattgaagggatatttaaaactagcgagaattttgttgatataacagttttccttgttcgtcttgtagtatttaagagttaagaaaatgtaacggttacatagaaacacacggcgtagtttccaaataatacttatttgtttttcttaatttctttaatgaattatgaattggcagacttttttctcttaaattttttagagaaaaatataaataaatagtcatggcaatccataaatagaccaatcacatttgtttcagtaataaaggccgccaattgcctaattttaaccgatgacaaaaagaatacacaaatataatataatttgattttggatatgtcctttggggttt

SEQ ID NO: 23814 - DNA, 539 bp, Arabidopsis thaliana landsberg
  unsure (1)..(539): unsure at all n locations
ttttcagagttaaaatcctctcggccgactaagggggtcagcatgactccctagacaccgctataccttaggaccccgtctcacgcaacttctctatcggaggnnnnnnnnnnnnnnnnnnnnncgaaagatctggcgtcctccgtagaggaatcttcgaagaattccgaagatactcttgactctgtcattctccaccgtgagctaaaatggctgatcgaagactcaatcgtagacgatcctttagtgattcttcatagaagcgaaatcgcggacaacggcgagaagaatgtgaaattgagagcgtcgttggaggagctttacgatttatggaggcagaggatcgagaagcgtcggccgtttcagtacgtcgtcggatgcgagcattggagagatctagtgttgtgcgttgaggaaggggttctaattccgagaccggagacggaactgatcgtcgatatggtggaggagcttgtaaccaaagatgaatggtttaagaaaggtaattgggcagatccttggacaagaaatggtggtat

SEQ ID NO: 23815 - DNA, 925 bp, Arabidopsis thaliana landsberg
  unsure (1)..(925): unsure at all n locations
agttaaactttctcgatagaaagtcaaggcaaattacttttctattatgttttcatatttatttcaattactaaatatcaaacattcgattgtatgtattaaaaagaaaagaagaattttttttttgataattataattagcaatatatacaaggaatctttaatacacttaaggcaataacttaaaatcttcttttctcacttttttatttcctatctcattaaattttcttttctcacttctttaatacacttaaggcaataatcatctttatcaaactttattaattatttttatatttttatatagatactatattttggaaattaccattatatatatatatatatattaaatttttattaactactaaaattatgttttttttttttaacatcattataccgtttgaatggtaacacaataatgatactaacacaatttactaaattacacattataatcaacctaagtttttttattttttttggcatatttttattctaaatttttttttaagttttgcttaagattttcgtaatttattattaaactttgaacatgaaaatatttttttgttatgtatacattattttattaaactattaaaccatattttttcgcctannnnnnnnnnnnnnnnnnnnncggctctgccaaaaagtcgactaagtccttgtccgcttgctccgcgtaagccatcaacacttgtcgatcagatccttctatccacgccttccttttgttccacccattctctactactttctccggtacctatatcatatatagccgacaatgatattataacccagatttatacagaacataaatttattttatgttaataccttagagagtatgtgcacaaccctcgagctcactgcgacatggaggtaagacatccggaacatgggaccaaat

SEQ ID NO: 23816 - DNA, 614 bp, Arabidopsis thaliana landsberg
ttgtgattgttctgatattgatgtttgtttggtcagaatggcacctttaaggaaaagaggacgtgttacaaaccaaagggctaaccgtgttgatgatgcacccgctaaggggcaagctcaaccaccagtaggggatgttccagttggagatcaggcagccatcaatgcatcactgttaggacagattcaggggatcagaggaatgtttgaagagttaattaaccgaattcctcaagcagcaccagcaccagcaccagcagctcagccaccacaagaaaatgttctacctcagcaaccgcagccaccacctccaccaccaccactaccagctcaaatggcaggacctgcgatttcctactgggaggtaatgaaggtcatgaggaccatgggcacagagtactttactggaggtattgatccagtcaaagcagatgattggaggaaattgttggagaataattttgagaatgctaggtgcccagtggagtccaaaaggacattgcagttcactttctaaaggaggaggcacgtcattggtgggatggtgtagtgaggacacaccagtgcggcatgtgattcatgggaggattttagggaagagttcacagaaaatt

SEQ ID NO: 23817 - DNA, 1064 bp, Arabidopsis thaliana landsberg
agactaaaatagactaatttgccaaatttctgtagtagacaagtactatttgttccaaggttattttgtttattcttttcaagtcaaaggttattttgtatatatactctttttataaaaaaaataataacgtttgcaaaagaaaattcgtatataaactatttaggtaaaattagggtagtttacgagataattattaacttacaaatttaacaagttacactaattgtattagaagcatagttattatattaatattcatggataaaataatatagttaaagaatattgggtttatatgaaacaagtgtccatgttaaccggacaaaatgtcaatccggattgacaaatgtcaaagacaagtaaataagtgacggatttttgacaagtgttcatgccaattagacaagtgttgacccggattgacaaatgtcagagacaagtggacaagttttggataggttttgacaaattacgggtaaaatttaacaagtgttgccaatcgaacaagtgtcaacccggatttacaaatgtcggaaacaagtgtcggatagtttttttgacaaatgacggatgtattttgacaagtgcgcgtgtcaataaaacaaatgtcatctctctgctaaattgacgatgattaacaataatatgtgacttaatcttggtcttcatcttctctcgatcattcgatacttacttacgatatccaactgtgtactctcgactacttacacttaattatttgactagtgatcttagacttatcttataacacccctgaactgttctacgacttcagactgtcttgaaatatcacatatgatactcgtagacaatccaaccaaaattactatcacaaagcaagtgaaattagttagtccatcttcgagtatcatttctcccgaccatagcctaaaacttttcaacctgtaccacaaatataagctgtgtcggtctggacaaaacctaaataaaggaaataaatcatgtgccacattcacatgttttgagacttataggtcacgactaccgactagatctttgttgattattctcagatttcc

SEQ ID NO: 23818 - DNA, 443 bp, Arabidopsis thaliana landsberg
cgtgatgctgatgatgcaagacattacctgtacggacgagactttgatggaagtcgcatcactgtggagttttcacgaggggtgagtcgcttggctctctattttcaggctctatcatttgtttataggtatggctgaatgtgtttgccaaactcattagaaatcaatattatgtttgtatgataggcacctcgtggttctcgggattttgatagcagaggcccaccacctggagctggtcgctgttttaactgtggtgtagatgggcattgggctcgtgactgcacagcacgggactggaagaacaagtgttaccgttgtggagagagaggacacattgagagaaactgcaaaaacagtcccaagaagcttaagtactaacatttttttcagaagtgcatgatttggtattcttctcacttttcatctccctttttggattg

SEQ ID NO: 23819 - DNA, 598 bp, Arabidopsis thaliana landsberg
  unsure (1)..(598): unsure at all n locations
ggacgggacccaggaacagaaaacgaagaaatttagagactaatcacatcctaataagatatgaaggggggagggttgaattgaagcactgaatcagacccnnnnnnnnnnnnnnnnnnnnnnnnagaagaattcgaaaaagggcgggagtgaaacagagaggtgtttgttgattggaggaagagaggaggcagagagggagagagatcgagagaagaggagagattgatcggacgcttgagaaaagaagagagatgacaacgtctgcgattgagagattaggttttcacttttatcagcaccgttcgttttttttttaatctctttatttattttctctctggttcatagtctaccaagggcagaaacgccacgtgtattcattatctttaaccattaaggggaactttattattattcaatccctttatataagtttacttttattcatttttattaaattttgatttttgatacatttttttattgtatagtagggaaagaatttttttttttcgaaacttattagggttttaaaagttttttagaattcaattaactattaacatttaaaaattacacattttattttccaaaa

SEQ ID NO: 23820 - DNA, 297 bp, Arabidopsis thaliana landsberg
gtgtccttcctcggcgtgtctctaaagaagtcagagcattcctctacacatctgaagtcacatatcgctgtctctctatcgtcaaaaacttccaaaaatttgagccttctaaagtattttcagattcttacctctgatttggtggattcagttatgatagatagacatttgatttgattatagaagctagagttatgttgtttcttgaacattgatatacctagattttcactcattttagctatgatttaggtatagtttttaaagttcttttgttatttctagagtcttgtatag

SEQ ID NO: 23821 - DNA, 724 bp, Arabidopsis thaliana landsberg
catgtggtgatttgtagggaaggtaacaactctttaaaatttcccggacgtagcgtaccgaccgtgggacagaggtgaacccacatgcccgaaagaagacgtggagcccactagtagggacagtcagaacgtcataagtagtatcagatccgaattcacatgagtgtgaaatcaagaaagctcgctccatccggggttacgatcttggtgtgccacgagaacgttacgttctgtttgtggggatgaattgtaacaccccgattttaggaatatggtggtgcatgcgaaaacgtttaatagaattgatttgactatctatatcaccaacgtgcatttatcttttcggtgaaactttttgggataacttcataattaagtgtgcttaagctgaaaaatctcaaaattggtgaccttccagaaagtgattgttgtaaccatgtaactgaggataaaacatggaaaaattatgtggtgatttttaggatcagtaacaaggctttaaaatctcccaaacgtagcttaccaactatcagacagaggtaaaactactgaaacgagagaaaaacgtggaactcactaataggaacagttagttgattaaaccactcttttacttcacagataataaccatatgagaattctatccatcataacttctaaagcttttttaaacaaaaagtcattattattttgatatattttagttttataaaactttaattt

SEQ ID NO: 23822 - DNA, 621 bp, Arabidopsis thaliana landsberg
  unsure (1)..(621): unsure at all n locations
acccttaatcatttattttggttaggcctagccttanaaattttttttgttgatatagagaatgacgggaaatttgtaaaattttattattggttgatgaaactgagttatattatttaaaattttgtgtttggctgacgattttaatgatgtgtcaatataaaaacaacagaaaaagctaatgcgtcaagtctcaagtctcaagaaatttttagtatttatattttattgatttttgacaaaaagataaaagagtggatttttaaataactcattttgtgtctatatcattggattgttctcctcggaaatggaagaggccaagtgtgaatataccattagcacaacatttgatctaacagttacatttataattgntttgtataagaaaatgaactaacagttacatttataattgttttgtagtgagaaaaagagagtagagcgttgtcaggaaaaagaaaagaagaaaaatattatcaattattaaaaaatggtacgaaagacagttagtggcgaacacgtatgtttttttaacccagtcagctaaaaaacatgatttctaaaaaaaaaatcgtttatatgatatcgtatcaattaaaaaggaaatttacatgttgt

SEQ ID NO: 23823 - DNA, 682 bp, Arabidopsis thaliana landsberg
  unsure (1)..(682): unsure at all n locations
cacaaacgaaccacggctgtttacgcaagaataacccccacaatcattgtcgatctttttgcgacatacaccacaagaccaatctccttgttcaaatgaaggagtaaaggagatacggtggagatggcgagatatccttataacacgtggtaaggtgatacaactttgatgaaccacaaagtcacatggggaacatatatagaaaggacagttgaaatgctccaaggcacatacgttgcaagttaaggatatgagtattggaaacagagaaagtgtatgttcatgccacttcggatggtgtattgataagagcggtagtttctccacacaagctatgttcataccacaatcgcaaacccagcagtaataaaatatccataggagtatttcatcacaacaatagcatttcttttttcgacatccccacgagttttccaagataagctgaagagaatgttttggatgaagagggtgtttgacctcaagtggagccttctcatattcttcatgattatcaccttcgcaacttgggcagagaaaatgagaaatttcgcctgttgttaaccttagtaccctccagtactcggggttacagtactcggggtcatattttctacgatcacgcttgacaaatcccgtcacaagatttttcccgtttgataanttctagtttaattgaggg

SEQ ID NO: 23824 - DNA, 581 bp, Arabidopsis thaliana landsberg
cctcgccattcaaccggtagtgctggaggtgtgattgtctcgccagttggtgagggcaatcccaggctgagcagcatggtcaacttggtcgtcgtgctcaacacagagttggaccacacccttgacgagttgggcaaggttcgggcggaggttgcggaattgcgtgctgaacgcgcggcacaccactacatggatggtggttctcccgcccctatcgggattcaacacccttaccattcaccgccccgtggtcgcttcgactatggtaccccagactgtaggacccagatagatttggatccctagatcgacagagtcagagtctataataattcttagttcagtgtctcagtctaattagtcttagttcgagttgtttgcttatcttatgttggatgcttgttatgatggacatgtactgaagttggatctttgtaatgtttgtcacaaggtgtgggtatccttgcaacttggtgtgattattaataaatttagttatttagttgggtaatcatctattccactttccccttatctgagaagttgtcagtgaagttgatcaattgttcagtgctgtgaag

SEQ ID NO: 23825 - DNA, 588 bp, Arabidopsis thaliana landsberg
gccccaaacccactaaatgatgagcctctcatcgaaacagtccttcaattcagtgctgacacagagttgctaacattatattacgactgccaacttaattcatctgctacttctccttttcctagtagctactttggagagcttggttgtgatgagggaagaagttactatgtaacgagaaacctctcatctcctttacttgacaggtttagaggagttttaaacaacttaagagaaatgtgcaaaagaaaagtcagtgttcctgcgtctggaccggcgttaaacacacttcagacaaatccaaattcaaacaatctaaagatggctcttgaacatggttttgagcttcaagataactcaaattgttctatgtgtgttttgtctggcggttcttgtggatataatcagaactcaagtttgtttgtatgttattgtaaagatgggccgcaagataaccaatgcgatataaacctagatggtaagatctcttgcatcttattaagtttaatttcaaaggacaaagttctgttttcatttctaactgactgttgttttggtaccatttgattggtgcagatattatcggga

SEQ ID NO: 23826 - DNA, 614 bp, Arabidopsis thaliana landsberg
ttggcggagtcgaggagaaaggttgaaaatgccatgagaacaataatttacaaaactacctggaatgaaatttttaacaacatatgtttgaactcaaacgagatcattggcgtagcgatttagaattgaaaattgaatagctcatatggagctttattgaaacgcaagaaagtaaagtaaagtaaagaaaaaaattttagattttcaccaagatctaattgattcttagattgatttcttattgaaagagaattggtcaaaaacgcaattctctaagttagtcgcattgttctctgtaaattattgttatataataaatagaaccaagcagccaacatagtagttaactttactatgctagttcattgaatatacacttaaaaatagggaaaaatgtcaaaacaaattacaaatttttaaatttgggacgatttaatgtacaacttcacggaagacaaataaatcgtaaagtttttgttgactttctaaataaatgacacagtttttgttgacttgccacttgagtcatgtcgttaaataggtaaacagattttttaccaagttaaatgtctccgttaatttgcctctgttaaaaaccaaaacaaacattcggt

SEQ ID NO: 23827 - DNA, 745 bp, Arabidopsis thaliana landsberg
tttttttgtgtaatctttgcttttgtcatgtggattttactggtcatttatgtaattataccactaaccacgtacgagattttactatcactaaccacgtacgaacaagtcgccgccgtgacgacaacggtcttctttttcaagaatatttactccacgatcgtccttcagtagtgttgacccgttaaaaactagagtttagggttaataaagacggatttgtagaattaaacaatctggtctatgtgtaattaaggaacctagtaattattatagaaccaccacaagatcaaatcaaaatacacataagaattactggagattgattgattgagaagagaaggtgaaagagagtaccttggggcaacatttgccacagttggagcatctgattgggttgacgtgtcctctgttgtgcttgttcctcccaccgttccttcgcttgaaagtctgcaacacaaacaacaatggatggtcatcaattctctatcttttattgcaaatctgataatcaaaatcaaagaaaatgagtaccatcttgcttctcgatgaactcgtgttgtgtctgctgctagggtttacgctcttgttgccgatctcattcgtctaatctctgatagaggagagctgatctttattgttacttcttgggctttaacatgtagtgggcttgggcttatttttttttttttttttttaataaacattgccagtgactttttcatttgaccaaaaattgattttg

SEQ ID NO: 23828 - DNA, 655 bp, Arabidopsis thaliana landsberg
tttcttaacataataataattataatctatgatttaataattataatttaacatgctttaactatattaagggtggttttgtgcaaacaaaactctcaaagttgccaacatttgtaactttactctccacattaaacaagtatagaataatcttataaaatccaaaataataaataatatagcacaagtttaatttcttttataaataatatatcaatcgtagtttttgagacaagaagtttaagtttacttttcaatttttaaaattaaatttaatgtatgtgattttgaaaacgcttacaatatatgtgtaagagctatatttgatattattttggatttaatatgattattctgcattttttggaagtgaaaggtaaagttgcaaaaaatgccgactaacctttatacaatatgtaatttaatcatatgatgtctatttttttaatcaataatttatgataaaaaaattgcaatgatgaaatcattatatgactaaaaaagtatgttacatcaataatttctatgtttgttagtatataaatctaggttaacaaaaaaaattattatataaatctagatctacagatattgaagattatagtttcttagtcatattttaatgaaaatattagtaatatagtttcaaagacta

SEQ ID NO: 23829 - DNA, 1457 bp, Arabidopsis thaliana landsberg
gaaaaggaggaaggccgtgttggatttgtgaaagagcccaagtttgaagcactagtgggcattcaaaaaagaggtgattaactgtctcctcctgagcaccacatctaggacaatgcttttccttaccgatgtgtcggtagaatagtgtatggtttgttgccaagcaccctgataaacattaccacaaaatgcttaagctttcttgtggtttttaacttccatacttgtgccaaaaagggagtgattcctggtccctgaaaagggtagtcacaagtagggcgagaaagttcttgcgcaacccaataccctcacttaacaaaatagttactagattttgttctaatcaaactatatccatcactcaaataagtgcgacctggtcggacacctaaaatcaaaggtatgtccgttttattagttggcacgaattcaaattttcttgactttgtttttgagaccttgaaggtttccttgtctgcattggtcctctgtttaaaatatgttggagattgtagatgttttcttaatccatgaatacagtacgattagagcgtaaactaatatcctcttaaaagaatgtaattcgaatctcccatgaagtgaatgaacaacgtgaagatgggaaagataagctttcaagactagagctttggtttagacgactactatgagactactatctccacaagaccaaacccagacataccaatctaatcggctaaagttgatgaacaatctttggaggactttattcctttcctaaacaaaatctgaaaatcagaagacatgctaaacatttccaaaacaactaaacctatatgggccaaaagcatatgtgcttatttaataacaaagtctccttgttatgttacaaaatcttttataacttctctttgataaaataaaataacattgaagagtattatactactacacaatacttttttctttctgttttgataagatttcgttaacctcaaaggtgatatttattaaaacaaaatatttcggtttctttaacccattactggatgttgtagaaaataataacaattcataatgtataaaaacaacagaagaaaaaaaacataattcttaacactcataattaactagtaatgatcacaaatgatctactaattaaaatcttgattatgaatcatttgttattattctcatcatgtcctctcttgatccttgaagcagcttgctcacacagtttatcatagagctcttgatacttctccatcatcttcttcgccttttcgtgatccttcacgtcatttggatccactttccaccacacatccttattcacgaccctcgtctccgccaatgcagctgccttcttgactttgacttcgtccacctttaactcctccaccaatctattgtattttttgcaaagctcttgaatcttcgcttgctggcggagcattcatgaccaatgatgatga

SEQ ID NO: 23830 - DNA, 1163 bp, Arabidopsis thaliana landsberg
cacatcacggggaaaactaattgacaatattttaacgcgaaagttacaataaaaagacacaaccacaaaaacataaccgttagtattttaacggaaagttgcgataaaatgacacaaagaaaaaaaataaccatcaaatatataaacggaaatttacagtaaaaagatacaaccaaacaaaataactgtaaatattttaacaaaaagatacgataaaaagacaaaaaaaataaccggcaatatttaagggaaagttgtgatgaaaagacacaacaaaaatataaataactgtcaatactttaacagaaagttacgatgaaaaaacacaacctgaaaaataaccgtcaatattttaacggaaagttgcgataaaaagacataaaaaaaaataaccgataatattctaacggaaaattgcgataaaaaaacataggcgttaagggtaaaagatctaaccgaaaaaataaccgccgatgtaacaaaaatttgcaataaaaagacaaccaaaaacaactgtcaatatttttaacgaaaaattactttaaaaaagaacacaactattctcgataaaagacataaccgaaaaaaagaaccgccaatatactggaaaggtgcgataaaaagacaaatgaaaaaataactgtcaatattttaacaaaaaattgcgataaaaagatacaaccgttcacatgtgaaaatgacatttattgagattgttattattattagatttgtaacaacttttgaggtttttgtttcaaataaaaatttgtgacgattatattgcaatctctgacaaaatcgtcacaaatttgtagttatgttttatattgttatacactatttttctttgtgattaattataaagtcttaataatattattgatatactcccacagataggatgttgtgaatgataagggtgcctcaactttcgtaggagctcggcatctttaaagcaagcctcttgattgcaaataaagttgctttccgactttgtaaaattaaaataggttggataaatgtagctcacttatgataaatttccctcatcaattagagtggccaaagttcccgtggacacctggtgttggtggagatagacagccgcaggtcatcaaattggtgacatcgtcgattggtgtcgatttcaggcacatcgc

SEQ ID NO: 23831 - DNA, 582 bp, Arabidopsis thaliana landsberg
  unsure (1)..(582): unsure at all n locations
tctctgtacacagctcgagtacgctccacgtcttcagctagaatctcttcaaacagtgcataatcattccannnnnnnnnnnnnnnnnnnnnnnnnnnnnnnncctcagcgagtggaacattagcaatagccctctcatagacttctctgatcctatctttatcccccaaagtctcctctaagctaatgtaatcgaaccaagaatcgtagttcaaagggttcttcctcacttcaccttcatactgtaactttctcctgccaacaatggcatcatcaataccttccttattcccatactgcttctcaaacgccacaaacttcttgtacaaatcctcagctcttcctttagggatatgatcaagagcatacttgtaaagaaacctagcccgttccacttctttacatagtttttcaaactcagcaaaggccacaaagatcatctcagcttcttcttcgacgtctttaagcatctcaatggcgcgttcgtacacaatcctcgcaagcgaaacttgactgttcttcatctcaaactttgcgtatcgaataaaggaagaagcttaggatggcaagcacaaatctctc

SEQ ID NO: 23832 - DNA, 701 bp, Arabidopsis thaliana landsberg
cctcctaattccatttcatcatggggggatctagaacaaaaattgcatgatcattttttctccggtgattatgaattggatttggtagatttagtgtcattgcgacagacaaaagacgaatcggttaatgattacatccggagattccgtgatacaagaaaccgatgctttcaaattcatttagcagaaaaacagctagtaggattagcctttaatggtctacgatattatttaaaagaaagattagaaggcatccaattttttacactagcacaattacaccagagagctttggcttgtgaaagccgaagcaaagaaactgctaaaacaatgtgtcacaacgtacacatagtagaatgcgaccaaagtagctcaaatgacgaatcagcagaagtgtacgctgctgaaatggtttggccaaaacaggccaaatcttcggcttgttcctccttacagccagttcaaaagaaacggcaagcggaggttaagtttacatttaatgttggtaagtgtgatagaatatttgacgaattactcaaaaatggcaatattaaaataaatcacattgttccatccgccgacgagctaaaacgtcgtgcgtactgcaagtggcataactcattttctcatgccactaatgattgtaatgtattttcggcgacagattcaatcggccattaacgaaggacaattgaaatttc

SEQ ID NO: 23833 - DNA, 678 bp, Arabidopsis thaliana landsberg
  unsure (1)..(678): unsure at all n locations
aacaaaaaaggtcagtccatgcaacactggaggaagcccgggtttatatcgcaggtggacgtcttcaaacttaagtgagcctcctgaaggccagccacatacaggacgattgttctcaattatatctgtagcctcagaaggaagatcaatatagttaccaacacgctcaacagaattcaagctgttctccgctctgctagcttgccttagaacaccacttaacagactagtgatattcagagtgtaactaagaaggagacccatcgtagatgcaaaaccagcttggttatttgtattaccattttgcagaaccgcaaacgttgcagttaaccaaatcatgacacccccaagagtctccaatcttatagtgagccaacgattggaactagtatttgcaagagtgaaccttatgttattgtccatggattttccattaatcttggccatnnnnnnnnnnnnnnnnnnnnntcggatgcttgacaaaccatttaaagcttctccaaactgagcataaataggcgatcttgtaacggaatccaaacgtctaacttcacgagatgtgctctacaaatcacagaagtgatattaattccaagtggaccatatatcttaaaatcaattgtgcatgtatctgacattgccccgaagtagaaaattacctgatagtagagatatgct

SEQ ID NO: 23834 - DNA, 543 bp, Arabidopsis thaliana landsberg
cttatccaggatggctttgatcaaccattctagacttgtaactttaatgcaggtttcgaatgcttatcttgagtttttgcgaggcccagggacaaagatgttattcgattttgtgaaagaaatgccaaaacaagaaactaggctccgactggaaatggcgtctctcattggccctattttcttcacatgggttattctccttctgttccctgtaagtttgttttcactagactgattcaggcttttacaagtatatattggtagaagtttttcctagtatgatcaagatcctacaacatgcatgggatttcagtagttagaggtattttctatgcaggtgatgttaacctcattggtgtatgagaagcagcagcatttaagaattataatgaaaatgcatggcctaggagatggtccttattggatgataacctatgcctattttctcgccatatccatagtatccattatatgcttgatgatatttgggtcagcaataagtacttgaatcattgacatatcttacttatgttatattttttt

SEQ ID NO: 23835 - DNA, 995 bp, Arabidopsis thaliana landsberg
ggcgcggtgttgcgcgtgcgcccggtgtagaccgaggcttcccgcatgaatcgggaagtcgcggcatgaggttccgagggataaccttgccttcgggaggcagtgctctcggcccgccgggccgcagcgccttccaggagattcttgagttctccctggattcgccgaccctcggtggttgacggctccggcatcgcgcggatgagcattgctgcggttgccaggttctgaccaaccccgctggatgcgggcggcggcctgatcctgacatcgttggcgacgcggtgctggagaccttggggcaggtgatgtatttctccggccaggggttggcccacccatgcctgtccgacgtcccgacggatcggctcaagcgctcctgttccctcgttgagcctggcctgcgcctcgcggacttgctcgagttgtgggtcgtaaccccccgccggagcggggaccacagctagctcccgtgggatgtcggcgcgaggcaccggcctggggagatcacgcatcctccggcatgccaagatggttgcttcggtgggatcccctagctcgatgtggaaacattcacgacttgggccgcagctctcgtcgccgaggctgcggcttccatcggaacagtcagaaaggcagtagtcacacgcggtcataaagtcccgcatggcactggggttaccaagtctggagaaatcccaacagaagtcgggcttgtcatcttcctcggaccccgagggcccgtaggtcgagacgtccgtcagccggtcccagggtgaccgcatacgataccccagagggtttggactcgcctctacgagagcgtccaccaaagcaaagtcgcttggcgggtcgaggctgaatccaaaaggcgtgagatgggaatcggttggtacctcttggtcgacgggcggttacgaagtcacgtcagggactgactgcaccattgtctcaggtacgagggtgacgcccagcaagtccttcgcgagcgtact

SEQ ID NO: 23836 - DNA, 610 bp, Arabidopsis thaliana landsberg
aaggcaggatatgcacgaagcttggattcgatgaaagtaaggttaaattgcaaatgaagtacaatgcagtgttgttaagaccaacttaagagatttacattagtgatgatgaggatgtcggtgtctatatatcttcaggtagaaataactgtagatatgtttctaatgtggacgtcatcactccatcagaattgcccgagcaactgtcgagagtggagctcctcaataaaagttatgttggtaagaaatatgctaaacttgattcaaatgaggatgaaatgagagatgatgctgccatcgtgatgggcgaatgcgaggaacaaggaaaagaactaaatgaggcaatagtggaggttgatgatactcaagatcctgagattggataacgtgatgaatgtgatgataggagtgatgaatacgttgagtcaccgcctgttgtaaaatctagtcagttgataaaagaatgggaagacggtattggtttgaatttacgaaaagaatttccaagcaagacggtattgcaggaagtggtagacaaatgtgtatttgctaacagtttggttaatgttttaacaagtctgataggagcggtatgtcctacatgttctaa

SEQ ID NO: 23837 - DNA, 588 bp, Arabidopsis thaliana landsberg
tttctctacttggctttcccaatggtaacttgtccacacaaacatcttatgttgagacaacaaacattcaggaacattcgtgggttcattccatttaccgccgaccataccaacttttttaaaatccaaatttttctgagaccaaagaggcaaaagggaattaacaaaaaccccaaaagagagaccaccaaaagtagctatagctgactgataatgaaatgtcttacaccaataagcttaaggacttgtaatttaggcgagctatcaagcatgagcttaagtagattccaccactcctctttacatgtatagatctctagatgtaccagctgatagaagatactatcaataggacacttaatctatgcataaagatcatatttctgttagaacataaacattgtgaaaccaaataacacaattgtgataagcaaagttacctgcacgggtgataagtccaaggaaagacgtttggctgacttgagggatcccacaattcttctttttgtaaatataaaaaagatttctaatttttgcctcactaacactggcgcattctcaatcaaacaaaacccacaatgactcaac

SEQ ID NO: 23838 - DNA, 1474 bp, Arabidopsis thaliana landsberg
ggagaaatgttggaatggaaggcgccgttgacgattttcttggctaacgggccgattgtttagtgggctctctgataaaagttagcccatttatgaatttctcgagtgtgtcttttgataattagtaaaaactttgatatttggctaaaacttttgaatattttccaatttacccctaaacttaggttttgccataaaactggaactgaaccgaaccgaaccaaaaaaaaaaaaaagagttttgatttggttccaggttccaataagtatcttaatgggatcttaaagcaaatccattggtgggtttttcataaggaatcctttaaatttcttaataacaaatattgataattttgaagattagagtttttgtcaagtttttataaattctcttctccaaaggtagaatccttaaatgggtttccttaaaaaaaagacttatgagatcaaagccaagtaataatgggaaccaaaactgaaacaaaagaagaaaaagagactaatgaatgaatgacctatgagatcaaagccaagtaatcacagattttcaaaagcggtgcaagactaccatcaagcagtgttttctcaatcttcaaatctctatgacatatttgctacataaacatacaaaagtgttgatctgagagaacaaagagactaaaactgaatgcttcgatgttttattatcatagttgtttggctttaaatagcctaaagatgaagactcagtcttcttacaaatacgtgaaagagaaattgcaggaactaactgaaacaaaactaaaaactaggacaacaagttgacaccaaaacacgcggagcttattcccactctgcaactaaccaaagaccaaatcaaacccaacaaaaagattaacaaaacgaagcaaagatctctctgttgaagatattgctacttatcttatttagagcacatcaattaattgttcttaagcttaatgttgctttatgtactgtttgtaaccccttttggtctttttcctttttgtctccttaggtctgaaacgttttctctttgtataagtgtctgagaaacacttgagctgctatcaagacaaaaccttatctttatctcttgtctcttgattttgtcactctcctttcacactcatggagatttgcttaagttatgtaaataaaaataccagtgaatgacagtagtccacgccacaaatcagctgctgaaagaaatatctagcttgagaaaaatagcaagatggagaaatatataatcaaaaatttgtcaaaaaatccaataagaactaagttagaaagcatttatcaaacctcagcttcactgaatctactagcattacagattctttcaaagagctctcctctagaagcatactccatttcaattgcaagatgagttggagttagaaccaccaacaaatttactctgttttttaagtttcttaatctcaattaaagtactaaaagattatgcaac

SEQ ID NO: 23839 - DNA, 506 bp, Arabidopsis thaliana landsberg
acggattcgagtcgaccattaacgagggacgattgaaattttaggaaatgcaggtggatacagagccctttccaatgaacatgatcgacttcaagggcaagaaagtcctggttcggccaaacaccgccgataaaggcaaaggcaaggagatagtcatcggcaatgcaagagacgccgatgagaatcataaaatttcttgcaggaaagtggtggcagagaagactcccgaggaggggaaactcttaaggtgaccatcacgacctctggcactggagggcaggcatagaccaaggagcaggaacccgtgctgtgcatcttggaaggtccgacgcataggcgtggacggtccgggaccacgctggacgatccggagaattccagtggacggtccgatcatactcaagactcgcaacagccgcgtaccttcaaaccacgacgaccagagataggtacgtggaaaataaatacatttaaagcagctggtcggctggtcaaatccggcccac

SEQ ID NO: 23840 - DNA, 671 bp, Arabidopsis thaliana landsberg
tcttcgactatctcacagataaaatttatcttaaatgggctaattttatcaaccctattccgaatcggcaaacatctttattttcaaccactcaagaagcttgtcgtaaagatgttgagcgtgcttttggagttttgcaagctcgatttgccattatgaaaaatccagctcctatttgggataaggtaaaaataaaaaatattatgtgagtatgtataaatacttcacaatatgatagtaaaagacgaacgagatgtgtacactcactttgatgtctcttaattcgtacaactggaatcaactagaagttcacaagtggatttcacctattctacaaatatgccttcaaatctcgagaatatgttggacactcgaactcaaattcgtgatcgacatgcacatcaacaattgaaatctgatttggttgaacatatatgaaaacaatttagcagacatcaatagttaaattttatgttttcatgtatgttttaatttttttatgtcatctatgtatcaaatattatgaattcaataatgattaagttgttaaaaattaaaatatttctatattttattttgaaattacatttttttaaaaccctaatttaatatactaccattgggttgccaaaattaaaaacttaccaaactcttaacacaaaattcaaaaa

SEQ ID NO: 23841 - DNA, 762 bp, Arabidopsis thaliana landsberg
  unsure (1)..(762): unsure at all n locations
gctgtctcatgagcttccttgagaatcaattctcgaatagactggacattgggacacacaagcggtccttgaaccatatcacaccttctgcatcttcctgaaaatctttgcctctgccatctagaatcagtcactgaatctcactgatcttctcatcattcttctgtgctcctttgatttcccgctccagggtaggttccaactcaattgtgactcctcacgtattattcagaaatccgagactcaacctgtcaaactctttggtcaactcataaggcatcgggcaagcgaccctcagattgacttgactctttctgctaagagcatctgccactacatttgctttgcctgggtgataatggatctctagctcatagtctttgatcaattctaaccatcttcgttgtctcatattcagctctgactgagtgaatatgtacttgaggctcttgtgatccgtgtaaacatcacacttctgcccataaagnnnnnnnnnnnnnnnnnnnnnnnnntgaaccactgctgctagctccagatcatgagtggggtaattcttctcatgaactttcaattgtcaggatgaatatgccactactttcccttcctgcattaacacacatcccagtccggtgtacgaagcatcacaatatattgagaatggcttgtgaacatctggcagaaccaataccggtgtttttgtcaacttctgcttcaacatctcaaatgattcttggcacgctggggtccacttgaactcaacct

SEQ ID NO: 23842 - DNA, 1691 bp, Arabidopsis thaliana landsberg
tggatggtgttacctcacttgcaagaagcggggcggtttctctggaatcgtaagcgacctcctttccagctattttgaccagcataaaggctccaccgcctataccgctagaggctggactcacaacgcccaaacatagagcagcagcgactgacgcatcaaccgcatttcctccttcacgtagaacgctcaagccgatttcagaacaccgtccatcgtctgtagcaacggcaccgtgatacttaacaatactttgttgtcttttcagagccgcagcgttttcaagaaacgcgattagaagaagagcgaccgtcgctgttcgaatcagtaacattgttctgactggttggtaatgaaaaaataaaaaacagagattagttgttacagaggataaacaaaaaatatgtttatcgttcaaaaattgacagattcgtttgacaataaatttgaagaattctcgcacaaatattacaaatgttttgtatgaaaaaaaatatgttatacagaggatatatgttttaagctcaaaacctaccaaagactttctttacttatatatcttgtgtttcagaaatttctcaatgtgtgaaatgttgtaaaagctctttaacaaatataaatgttgtgaaagcttttatcgatcaaatggctcaaaagctaaaccaacaacttactgaataattgtttgaaggttgttttttctacaggaattataaaaataaaagtgaaagaaaagacttacaattcatccgacgtctttttcttaaaggtctcgttctctttcgtccttgggtaaaatagttttgttcagacgatgactgcagtgtgaccaagaagtgttacttgtgttggaccataaataataataataaaacggagtccttaaccaactaaaccaacacatattaattatgagtatcgtcacacgtacctagtctactagaaaagatttagggtacataactaaacagagagagaaacacgtcacatctatgaactagagttgatcgaagttcacctgtctattttcattaaacgctagctatactcttataaatggtggttggtttagagcatccttatttgtaagttcttagattagtttttaggataagaacatctcattttaacttttatataagagacaaaatatcatttaaaatgtctcttatgtaagagttaaaatgagatgttcttagtaattaatgacaaaaagaaaatcctaagaactaatataagaacttaccaacaatgatgctcttatattatactatttttttctccagtttaaatgatgtttaactaaatctaggtaaaattagtaaaatctttactcgtttagccctatttatttatttactttattccttataaaacatttaataaatgcattttagaggacaaaatatacattatatttgatttcttaaataatgtggaaaccctcaaaacaacatttataacgaaacagatcgagcattgaactgatatcagtactaaacaaaggttttgcagcttaatgaatgctttgccatttttgaccaagagagatttggcctccgtttatctattttcgattactgatactttctaaccgtgttatgtgtgaatgtaccgtaaaattttgttaggggactatggcatttcgttgttaattttcatattcgatgggccttttacttatctcatgg

SEQ ID NO: 23843 - DNA, 1150 bp, Arabidopsis thaliana landsberg
gaaaaggatgggcacaccgactatggttgtttcattattagccaaagattatccgggataaattgtcactccaactctaaaagatcttattgacttggttcaaggaagatttagtgtgcaagtctcatattctaccgcgtggagaggaaaaagagaagctgcaaatgatattagaggtacaccagaggaaggttttaggtttgttgattattatatgtacatgttacaaaagatgaatcatgaatcaggttcgtatgtggaagtggatgaggaaaataagtttaactacttgttttttgctttaggatcttccattgaaggctttcgacttatgagaaaagtcataattttggatggaactcatatgaagactgcttatggtggaatcctaattgttgctacgactcaagatcccgttcatagtcggtgtgcctctccttggtttgtcattatctgactgcttttggtgtagttgatggtgagaaaaacgatagttagacttggtttctcaagaagctcaaatcgattataccggattatcatgaaattatgtttgtttcgaatagaaaccaaagtctcatcaagacaatagccgacgtctatccgttgtgccactatggacattgcatctaccatttgtctcaaaacgtgaaactgaatgtttatagagtaaaaaaggcataagtgcaaaaacatttagggaatgtgctcgagcttatacggaggcggagttcttaaggttttatgaagttttttcgactacatatccttcaacacgtatatatctagatgattatgcggatgcgacaaatgtggtagatgttattttggaggagaaaaatacaacagagacacaagcaattcggttgaatctgtaaatggtgttttagagaaagtaaggaactactcgctattacaattgatagatgcaatagtgggaaagatagcggagtggtttgccaaacatagaaaatctttggaactgataccaagtggacaatatttggatccgtttgattgaggaaacgagtacccattccctaccaatgaaggtatagaatcaccttttctaccatgtcgttgagaagataattgagcaactgggggaggtactttataatttctaatactatgttgtacgtgtgatggg

SEQ ID NO: 23844 - DNA, 601 bp, Arabidopsis thaliana landsberg
agccagagatcgataggttcgtagctcagcaaacggagaagttaagattagagattgaagcaaggcaacaaacgcaaacgcggatgttagcgtctgcggttcaaaacgttatagccaagaaactaaaagagaaagacgacgaaatcgtacggattcgaaacctaaactgggttttacaagagagggtgaagagtctttacgtcgaaaatcagatttggcgtgatatcgctcaaaccaacgaagcaaacgctaatactcttcgaacaaacctagaccaagttcttgctcaactcgaaacgtttccaaccacttcagccgttgtagaagacgatgcggaatcgagttgtggaagttgttgcggtgatggtggtggtgaagcggtaatggcggttagtggtggttgtaaacggtgcggtgagagagaagcaagtgtgttggtgttaccttgtcgtcatttgtgtttgagtacggtttgtggtggttcggctttgttacggacttgtccggtttgcgatatggtcatgaacgctagtgtgcatgttaacatgtcttcttgaccatcttcttttttgttcgtacaacttaattttttttttttttg

SEQ ID NO: 23845 - DNA, 998 bp, Arabidopsis thaliana landsberg
  unsure (1)..(998): unsure at all n locations
ggaacccaaaaatttcagattttggaatggccacagtttttggaatggaggaaagtcgaggcaatacgatctggatagctgaaaccttgtaagttctgctcatataaccgataaacctgaatttcgttaatccctgctctgttttttttaacctgacttgtacgttttcagcgtttacatgtctcccgagtatgcggtgcatggcaaattctccatgaaatctgacgtctacagctttggaatcttgattcttgaaattattagcggcaagaagaatagcagcctctaccagaacgatgaaactactactgctggcaacttggttacctatgtacgcataaagacctgaactgttgcattttttactaacgctaaaaatttgactaagcatcttactttagagttaactaattgtacgtacattgtgttaggcttggaggctttggagaaacggctcgcaactaaagctgctggattcgtccataggaaggaactatcagagtaatgaagtcactagatgcatccatattgctcttttatgtgttcaagagaatccagaagaccgtccaaagttgtcaaccattgtctcaatgcttaccagtaacacaatcagtgtgccagcgcctggcataccgggatttttcccccaaagcaggcgtgaactggacccattatctgagggattagagtcgggttaatatatgaacgagcaggtttttcctcatcatgtctgaaaataaaataaaaacaaaaaaaatagccagacatcatttgattctccacaaataaggaacatagtaagtttctctgaaattttaggctgtaaactatacattatattcagttcagtaagaaaataagtttcggtgatacaaacattgtagttgtaaagaagagaatcagttttgttaatctgtgacgtatacttcagggttctacaaccaccaaatccttttagatcgattgcccctntatcaagtattcttcacttatagcat

SEQ ID NO: 23846 - DNA, 1120 bp, Arabidopsis thaliana landsberg
ggtctgtggtcagacactagggtttttgctgacagtcaatgcttgtttcccatttgtggttcatttaataaacccgttacgtctctgccacctttgatatcttttgaggatgttcagcggttgcttcagtctcaagttacatcccccaaatatataaaaaaaggtataaaaaaaggaaaatactcaaccttacaaaagaaaaggaaatttatgtgatgaatttccttttgttaacaaaatttactttatttcattgaaaccttctaacggctagaaatctatataaaatctagtaatctaccattaccaaacaaagtgaatctttagcactttttttttgtgattttgaagaaaccgaacttttgcttataaatactctcttcttcttcttcttcttcttcttcttgagaaatcaaaattatcttttatccttcttcttcttcttcgagaaagaaaaaccaaaaaacacaaaattaatcatctatttctcttttaatacacgatgcagttctcttgtcgacacagagagaatagatcgccgatgtatgtgagcctcgggattgaagtaagccgtgatttcatcatcatctctttcgtgattgaagtatctcatggatcgatcagaacgctttcaaatccgttgacgctttatatatatatattaaagtcctgattttacgtactgttatggattgaatctcaaaaaagattaacatgaagtcggtacgtactctggaaggaggggaaatatgtagtaagctaaaaagatacgtgttatttgacaaaagaaaaaataataattagtttcaaaattacaagagtcatctttacatggccctacctaaccggataatcaaatgtataccaatttattttttgctaacacgtgtaaactgtaaagctaacgataatctttttgaaaatattcatttagatgatcgtttttacaattaccaaatatgaagatatatttatacatatatgttcttcctataattggtttactttcattgtatgtaggtttattctctttttcgtttcctttttgttggcaaactttattactagtggatctttttctcccaaaatattcattatcgtatattgactcttccttagt

SEQ ID NO: 23847 - DNA, 625 bp, Arabidopsis thaliana landsberg
tcataatcaatgatgtaatcgtagttacccactgaagctaccattcgtaccacaagtgtcacctttggtctcacttcccttaacggctaataaaaaacaagactaaatatttgtaatgcgtgcatattgtttttgttgtattcaattcacaattcaaagttatttttctttcttttacttaaatcgtaattaatcaatctctttatctcacagtataaactgtttccattttaagtgtaagtagatttcttttttcttttattcataaatcatgacaattaatcatttttctgccccggtgaaatctcaatcttataaataactaattaagaatcgatttattcattagatattggttttagacttttagttatatcagaaatgttgacatgtatttttatgcaataagaagtacaaaacgaatgttagaaatctgtctaggagtcaatgtaggatgctgtttcaaaaatatcacaacagaaaaaattcaaaaaatatcacaaattttaagtttctgactgcttaagtttataaaagttcattaaactgtttaagagatacccttttagtaactcatcataacttattatttttgaaaattttgaattttggttacaattttggg

SEQ ID NO: 23848 - DNA, 555 bp, Arabidopsis thaliana landsberg
attgtttacttgcatattgcatgccagccgccaatggtacatagagatgtaaaaagtaccaatatactgttaggtctacggtttgaagccaaacttgccgatttcggactttcaagatcttttctagtgggaagtcaagctcatgtatcaacaaatgttgctggaactcttggatatcttgatcccgagtaagttctagttcacatcacattatagtattcaggatatgtttccttgtatgtttagtaaacaaaaaccaaaatatttcaattacttttcttgcagatattatctaaagaattggttaacagagaagagtgatgtttatagctttggaattgtgttacttgaaagtatcactggtcaacctgtgattgaacaatcgcgtgataagtctacatagtagaatgggccaagtctatgcttgcaaatggtgatattgaaagtattatggatccgaatctccatcaagattacgactcatgttcatcttggaaagctaccgaattagcgatgttgtgcattaacccttcttcacacagagaccaacatgac

SEQ ID NO: 23849 - DNA, 1152 bp, Arabidopsis thaliana landsberg
atgctaggtatatacacacaaagatgaaccaaacaactttatcagttgtcggatgacaggacacccttctctctttatggcttcttgtaggaaagcaacgaccatgaaaggaaacagtgtccctgaactgataatgaggagctccgcagcagacgtgtgtgaggttaaggtcatatgccaagggaaagagataaatatggagcagacgatgatggagagcagcccagctaagtccccaatagtgcagcggcaaaagaaagatcaacctgttgacccttttgcttgcatttgctttatcagtaagcccaaaactaacagataatgtaaaaagagagatcaagatgcagagacaatatatttgatgtatgttctgtgtttggatagagtgagtaaaaaggaactctgataacaactaataacgttacgagaaacagttacaacatttttataaactacagcagcttatgcatacaaacaagcatacaattcatggcaatctataaagagcgaaacatcaacaactgatcatcttttatcacatagtcttctaaggaagaatagagtaccatatgtctaaccgtaacgctagaagaaatcaaattccaaatagttatcagaccctttctgagcattcagaaccaaaccagctgctgtcttctggcttgatggtgcctctgcaacacccacaggtcccttttccagctcaaccggctttggtatttccgggggagtcgcacaccgaatcaatgcccagttcacaccttcgaagaaagggtgctgcttaacctcagtagctccccgtttgaaccccagccgctgctgtggctccttcatgagcaagccccggatgaggtctctcgctgcaaaactcaccacaggcgtttctgggaaccgcagaggctgacccaccacattgaacagtgtttgtcggtttcctgagcccttgaagggcgttctcccaaagagaagctcgtaaaggaatatcccaaaagtccaccaatccactgcactgccatgcccttcgcctttgatgatctctggggccaagtactcgtgtgtgcccacaaatgacatggaacgtgcatcggttggctcggctaccagctctggcaatggcctaacttgattcgcggtgtcattcttgggtttacg

SEQ ID NO: 23850 - DNA, 1746 bp, Arabidopsis thaliana landsberg
gtggggaagctgtgttgtttaagtttttaattgttataagcttcgttgtatttcagaccaaaacagtttcttttgtgtttttgtttaaaccgatgattatatcatcgtaaacatgggtctgtaatatttttaacacaatgtttactttcagactaatcatttatgctagatgatgtttctagagtatgtgtgttgtgtctccgatttgagtttcaggttatatcaatgaaggagtgcttgagtatcaaactcagtcaaaaagggggagatggaagatgcggagtcaatcaatcagctgatggcgatctgagcgttgatggatttcaggacgctgcatcgggtttcatcagacgcttgatttgtagacatggatgcgagagcaaacgtggcaagctaaggcggatgatgtggagagccaaggatggaagctgacttggcgtggtgtcaaagacaagaattaccaagaagatatggaagatatcatctcgaagatttaggaaggaataagcttgaagaaaacaagaaagatttcttaaaacgagattctcggagatcctaggtttagggttctggagagtaggtataagtattctagagcttagtgtgaggcgttttgagcactctagaatactacgatacgattgaaagactacagagcattgcaaaagcttgaaggtgagtgtgtagttctctttgccttcacgtgagagtgataaaaaacagagaagagaattaggcttaagtattcttagtcgggtttgatcttttgggtagtatagatcaagtaatatccgagataacacttgtaatcagtttgttatcaataagaatatagttataagcaattctctgtgttgtgttgatctctataccctcttaagagctgccaatggtgattcataagtctttcaactcttctctgtcaaacttgggcttagtacccgtttgattggggaaacaaaacaatccttccaagcgcttgattgatagcttataatcctgaccatacacagagaatcacaagaatcccaatccttcactttccaaatcatcaaaggtcataccttggtaaagctccacttgcagtgtggagaggaactgaatcgtttcttcttcataggctacatatgggtaagcaatcagagtgtccaggtgacaactctggtacaggtgctgaacatcctccagtaatccaagttgtgccagagtagtcgagcaaggatatcttgtactgtagaactccttcagcctgaagagcatgatatactcctcggcaggcaatacatcaagtttgtgcagaagtcttgtgggtctgacagaataatcaggcatatactcgacctccagctcctcatctatcaactcatacttctctgtcaatgctctcttcccacgagctatctcagcttttctcctgaaattatcatattctctttgttctctttctcgtctagaagatgaagactcagcctcatctatgtgatagtcaggatccattgacgaactgtcactgtaattgctcatgatagtcctgaaaaagatttagaacacaaagctcaaacgtcaatgggttagtctcagagaaaaccacaaaactggaattgttcttaaaaggcaacgaaatggaccagtgatcgagtatctcttcagtaaaccggaattaacaaacaaggaaccctataaacgatggtcgagatttcttgaggttttgtcggcttcgaggtagatagagttagacaaaagtta

SEQ ID NO: 23851 - DNA, 544 bp, Arabidopsis thaliana landsberg
  unsure (1)..(544): unsure at all n locations
cgtgattaaatcaattccgagttgtcgcttcgacatatcatctttgcttgaaatttcccacgagcagcggcgtgaaaaccatctaggaaaccagaaaaatgctcgaatctgcttcatggcagcacacaagctcaggaaccccgtcacagagtcaacggccgacgcgaatcataagaagactaagcttggtcgagccgaagagnnnnnnnnnnnnnnnnnnnnnnnnnnnnnnnnnnnnnnnnnnnnnnnnnnnnnnnnnnnnnnnnnnnnnnnnnnnnnnnnnnnnnnnnnnnnnnnnnnnnnnnnnnnnnnnnnnnnnnnnnnnnnnnnnnnnnnnnnnnnnnnnnnnnnnnnnnnnnnnnnnnnnnnnnnnnnnnnnnnnnnnnnnnnnnnnnnnnnnnnnnnnnnnnnnnnnnngcccggagtaagtgttgacatcgtatcacacgagctcaacatcgacccaacgtgcaaacctattaagcagatgaggagaaaattgggtcgggagtgagcagaacctgtgaacagcgagatagagaaa

SEQ ID NO: 23852 - DNA, 252 bp, Arabidopsis thaliana landsberg
ccttgaacaatatcttgtagctttgacttgattgcgcagtattagaattatacaaatagctttattgaaacaaagcttaattgaccaggatcctcagtagaagcaatcgcacaaacaactcatatcttcaaatcatgcgaagaaggtcgaagaacacatacatctccttctcgttcctgagatcttgtgacagtggctgattctttacgacactgtcagagtcagtattcaacatagatgataaaggttagg

SEQ ID NO: 23853 - DNA, 826 bp, Arabidopsis thaliana landsberg
ggggaaaatccaattttgcccgtgccagcctctttccctcaaccttttggttcatttttaaacctacaagtaatgtttactcaaaaaatttctcaatccaattgaggcactcatttttatagactgaaattgatccaaaaattgcgaaatttagttttgaattggtatatagcctccaaaatttagtgttaacgttggtactcattttctctcagcctcctccgttccctgatttccacatgcttgatcacgtagcagctaaaatagtcatcttagtttctgaggttgtgtagatatgttaaaggcttggattcaatcaggaccagatggaaaaaccgctgttgctgcaagtgcaattctttcttccgttgcgtagctgtgtccccttttttattcatatggctcatgaatcgtctaattatcacatgttttacaccaaatgcctagccttcaaaaatccctatgccctatatcttcaaagtttagtgttggcgtttcatatgtgtgagctccaggaaacaattgctattttggatggtattaaagacgttttcccacatgctggtctactttacgtcatgctccatagttgcgctggatcaatcccgtggtaattttatactcagtacatgcgaaggtactataaatttagtgaagtcgacttattcgcagataagctaatgttccatatcaacgaggttggtccacgtcgccaagggacatacaaaaattcctgggagtttgaggattacggtgagtgttggtcggaccatcagaacctcaatgagtatgaaggacagaggtgtaacacatgtatttactttta

SEQ ID NO: 23854 - DNA, 568 bp, Arabidopsis thaliana landsberg
  unsure (1)..(568): unsure at all n locations
tatttttgcctgatagtttatatttcacaaaatctagcaaaattggtttgactaattttggatgattattcttcaagttatgtatttatcaagttctctgcaatatttaaaagaaaagtaaattcgaaatggaaaagaaaacagatttgtgctgaagtccctgggttttcttcctccttttctctcacaaaacagccctcgatctactattcacatgagtcaccgaccttacacaaaaccccctggacttatcccaaaactaacccgcaatccttggctgactggaatagtaaccggggcaaagattacggcggcgaggcttaccggcggcagtagagctccggcggggtggtcagtgacgtcggggagatcacggcggtcacgtcggtgtgcgggttggcgtcgggggtggtcggggctgnnnnnnnnnnnnnnnnnnnnnnnnnnnnnnnnnnnnnnnnnnnnnnnnnnnnnnnccacggcggtagggttcaatataagtgcacgaggagctcacggggtgatgtagaagcgatcgcgcaaggaatcaagaagtggttcagtgata

SEQ ID NO: 23855 - DNA, 535 bp, Arabidopsis thaliana landsberg
tacgacatagagtacaagaaccgagtcgccatgaaagctcaggtcctagccgattttttaacagaattaccggtacccggagagaaggaacaacctcaaaattagacttgaagctacatgttgatggatcatcatcaaaaaacggatccggagtgggaatcaaattaggaagtccttgaacagtcatttcgcttcttattcaacgcattcaataatgaagcagagtacgaagcattaattgttggacttaggttggcacagggagttggggctgatgaagtggtcgcctactgtgattcgcaactagttgttaaccaattcaatggtgattatgaagcaaaagattcacgaatggaagcataccttgatgtggttaaagacttggctaaaaattttaggaaattcgaactcattcgcataccacgaggacaaaacactactgcagatgcgctcgcagccctggcatcaacatccgatcccgaagtcaaaagaatcattccggtagagtgtatttcggaaaggagcattaaggaag

SEQ ID NO: 23856 - DNA, 872 bp, Arabidopsis thaliana landsberg
taacacatgcaaactacgacatgatccaaaatccaatactccttctttgcaagacgaaaattgtaactgtagtagatacatcatgagttatggttatgggtcataaatcacatcttttttatagtctcagagacacatgagagacaaattctacttcttgaccactttccgattccaaacatcaaaacttttgtacaaaaagaaaacccaagaacctcaaatcacaagcaaaggccaaagtactacttgtttcataaaacggatgaaaaaattggaaggagaaagctgcatcaacggcttgggcaagacttgtctttcttttttagttgggtttgatagaaagaaacactcaagtccttatgctgaaaatacaatggctgatcgatgagtttcacaacccgcgagggaagttgctgacttgtccttcctctaatacatcttttccgttcagtttgtacccaatcctcatgcgcatcacaagagatttctgcaataaacattaaacccttagtgttatgttaagtcactgaatccacaggctcagcctatctttatttgagcatagattatgttgtggatcatcaagtgctattcatcaatgctgagcacggaatgttgaagacataaagttagatagaaagacgaacagagaatgtgccataccttcccctgctggctgttagtgactcttagattctgcgtgatggcaccactaccgcttgccaggagtgtgttactgctagctggatccaagtgcagctggaggaactggaagttactcaaaagaaagagaaggttaaaaaaaaatttgaaatctatttactgctttatcaattgggaaagatgaataaaggggaaaaaagcaaaaaaag

SEQ ID NO: 23857 - DNA, 1751 bp, Arabidopsis thaliana landsberg
tttaataaaacccattaaattgtcataacataatttaaatttttcatatacagttaggttatatactaaagtactttttctatgtacaaaaatttattaattttcatttttatattttctaaactcttgatattatttcttttatgaaccattataatattttcaattggagtaaaattttaaaagtagttctatcttatttttttgtacaactttcttataccattttttttatagctttgcactatttcctaatagctaacaactccagctaacaattaaaaaacttgtaaaactttcggttaccaatcagatccaacaaattcgaaaatatacaaagataattaaatgccacgatttataaactattttgagaataagttaaaattaaagaatcaaagaaaaagaatacaaagagaacaactatgatactggaatagaaaaaacaaatggagcatgaacattatgggtatatgcaacttagacatgttctttacatatatataaatatatatgttggtgtacttggttatgcacatgatgcaaaggttctcgcattggccatgcaaggcgatcccaatttttcacatccacctataagtaaatattatcttgttgattcaggatatggtttacatcgtggatatctcatatcatataggcaatctcagtatcatcccagccattttcaaaatcaagcaccacccaacaattataaagaaaaatttaatcgacttcattcttcacttcgattagtcactgaaagaacatttagagtgtggaaaggaaaatggaagataatgcacgatcgagcaaggtatgatgtccgaacaacaaaaaaacttgtagtagaaattctggcactacataactttgtaagaaaatcaaatatactagatcccgattttgaagcaaattgggagcaagatgataatcatcaaccatcattgaaagaagaggtcgaagtacaagccgatggtcaaatatttgattcttggcaatatatggaaggaattcgagatgatattgcaatgaatttatggaataatcataggtaaaattagatttatcaagaattcataggatttttttatttttatatcatcataatatatttatttaaatcagtaatgcaaggcattttatttactatataaaaaaaatatattacgactattatattttattagttctttttttataaattatttaaaataaaaaacttacagcgataattttacaacaataaaagttacagttacagctaatacaactacaccaaaatctctacagcaaaaattttacagttacagcccaaccaatcacccactcaattatgagataaacaaaaaaaactctaaatccagtttgattatataaaactgtacaaaaatttaaatttttaattgttagttgaagttgataatttttttggaatagtggaaagcggtagaaaagagttgtacaataaaattacaagtaaaaaaatttataacatttataattaagtctctgtgaatggtaacaattaatgcagtacaacttctataataaattttcatctcaaataaatatatcttctccgcataatactaaaatttcaaaggatcgttctatatattctttagtaaatttgactataggaacaaaataacaacttgtatagtttgtacatgttaaaacaaagaaaaatgatatgacgaattatcgtatgtcaagtgtcaaaaaccatgatgtggttggtcttgtga

SEQ ID NO: 23858 - DNA, 701 bp, Arabidopsis thaliana landsberg
  unsure (1)..(701): unsure at all n locations
tagactccaatttcttaggacgggccctgaataatctctaaggttgtgaatggtaacttgtaaaaagcgattttcgaaacttttttatttatcaaaatcgtagtagtgttaccaatcactatattttattcaatttgcatttaaaaataaaaaaattacggttttgtctaacggattataccgtggaacgcattttaaaacaaaccagtctttacccagcagacttgtcaaaaaacccaataggtaatgttttttgcttcttttccaaaattcgatttttcatgttaaatattgtatgttatattacgagcaaaactaaagaaaattaatcatcctttccattttttcttgtctctaaattctcatttctaattttcatgtaataatttaaaaaaaaaacgtaattcaatatatctgtctaataattttaatatatgaaatacacttgttagatttagttttttttgttaaactcttaattcaataatagtttttaattgtgttgtgcttgtttatgaaattgaaattttaaattttttaccaataattatatcaaaagaaattattgttttatatcagtttagatatttaaaatttataagtatatgaaaattttctttattaccaaaaaaatttattcataattcaaacatnttcttgtataccgcacattattttcatcaatcaaactttattttata

SEQ ID NO: 23859 - DNA, 572 bp, Arabidopsis thaliana landsberg
tttaagaaagattgccacatttcccacttgtagccgtagaagtcaacacgcaaggtatataggttacggaataagggtagtggctcacatcttgagtaatcataaatgacctaggaccacacaaaaaaaaaagtatcagtgtaaacttataatataaagttaagcattcaaatagcaaattcaatataggttacctcaagagtacttgaagcgatgatcaaagtttttatgctagagatcccgacgagaaaatcacgaatcatatttcttttattcagatcatttggattgaacatcttcttgcaaatcaagttaaagacagtatcgatatcagcttcaacaagggaagccagatcatttagtataaaacttgcaatacgatgatcactgagcctcagatacttaagcttgggggcatcaattgcgactactagatcttcattcaacatttcatcagtgtccgcaacatgagtgaagctcaatagtgactgagaacgcacacatgtaaattcaaaatcatcacagaaactcctggtgatatttaggttttctagaactgggcactgtgagat

SEQ ID NO: 23860 - DNA, 910 bp, Arabidopsis thaliana landsberg
aatttacaaaatatcaaaaatctaaatcacttactcaataacattattcattattgtcttatatttggctgatgcgatcactgatcagctctacaaacttaaatttacaaaacaattaaaatctattaacaaggtacaataaaccacataaatattttactaaagactttctttgattcgatctaattgacggcaaaggaaatagctctgtttctaggaatcatcatacattgaggtatttagaaaaagatggacattggatggtggccggagacatccctttaaagtatggtccatctcaatctcaatataatctgtcttttaatttaatatatttttttttgttttcttaagttcatgtgccagaatggttgaatctatgtttttgtagcgtacaacgcaaagattaagtattaacaatcctaagaatctttaaacctcttaatcattgttaccaacagcatgttaaaaaaactgcaacgaccatttcagatctcttcgaagttcaaatgaaccaactattctattatacaagttaaggcccgcctatagaggcatataaattaatatatgtaaattgttttctttttagttttctattctttaaggacaaaaagttaaatctattttgacacatgtcaacatctgattgatagactcaatacttggcaaaatcttatgagttactaacattgaaaaccgtactttataaaataagatacaatatctttctatatattaaaatctagttttgacaaaagaaaaaaaaatatgttatttttcaaatgaaaacttataaagaggacattttccaaatttactcttgataacttttctaatattttttttgtttatagatatatttttcatttgttttccctatttttccacaaagttgatagatattttt

SEQ ID NO: 23861 - DNA, 620 bp, Arabidopsis thaliana landsberg
  unsure (1)..(620): unsure at all n locations
acataaatacatccctgaaacacaaaaataaaagtacatgagcaaacattgcattttagttatattgtttttatctatattaatcactaacatggaagtcaatgtcctttagctatctcttgagtgatagaatcacgtacaacttccatcactctatcatcagtcatggtacatgatcaatgtttggaacagttttttctacttcaccattctctactacttcatcaccatgatgttcatattcttccattgcattctaatgtgcaaaatctgcatcctcttgacacataatctttgataaaattatggcgaggcatagttgatgttaaaagtttcatccactttctcaactcatatttagagtgtttgcaatccttgttgagcacatcatccctcagcccgacttacatgaatagcaccatagacttttttccaataaatccatgtttgccactggttatctttaactttttgtagctcttggtcattcctcaaatcaaagaataagaacacatataaatataagagcatcgaaggctaatataatgaataggccactcanagagctgatataagaagatatataccttacaacatccattccacgagtcttaactcat

SEQ ID NO: 23862 - DNA, 627 bp, Arabidopsis thaliana landsberg
  unsure (1)..(627): unsure at all n locations
ggctctcggcaaagactgacggccgtcagctctgggacggccgctgacggcctttgccgagagccccgtttgccgagtgcgttacactcggaaacttgtctttgccgagtgcctacctgtgccgagtgtttagcacnnnnnnnnnnnnnnnnnnnnnnnnnnnnnnnnnntaccgagtgcggtactcggcaaagccttctttgccgagtgtcgacaaaaggcactcggcaaagaatgcaacactcggcaaagcctcggattccggtagtggacggagagctgcttctaccactttgcattgcattaggttggttccggcgctaggatgtatcgcccgctcacgtcacacagttggcgcttggcggtaccgatcgtcgtggcttcatcactgatacagtagataagagggtgtggtcgttagggctaccggtcggacattagggttggtacaaccgcacaaatgaaacaatcagtcggtagttnnnnnnnnnnnnnnnnnnnnnagtactgatcatctggtaacacatgacattccttgattagtacacgctattttaaattttatttttattaaacaatgatcttcagaaaaatcataggaatcgatctataagcaaaggtgtgttt

SEQ ID NO: 23863 - DNA, 1040 bp, Arabidopsis thaliana landsberg
gtattgatttctccgtactcagttgaaccttttgagtatgtgcgttgtcctaccgttgctcaatttccaactataggagattgcgggccatacacgatgaagttcttggagttgcttgcgtttggacaccctttttcagaattgacaaccattcgagaagcagatatggtcttctaccgtcagaaatactcggttgacatctacgagcacggcaagcgggaggtcggtagtgtgcaattgctttaatcgtccaagaacaatattttgactctttgcaactaattattatgaacaaacctatcttacatatatgattgcaactacatttaatttggagattgtctgaagttaatttagtttcctcgatcatattgtcgtacacatcgttcacttctaattacataatgtaaatgtgtacgtacatatctatatgtctcgtacactgcatattaactttataacataactcaagcgataaattgatttgacagccaacgcttaccaacacaagtatgacattcatttcaaccgtaattgccccaaccaaattcacagtagtggttattaaagtgaagaaattactgacgatctctgactatctcatttcaaacatggttaacccgactcttcccgacgatttactctcgaagatagctaagaacctggctgaccaatgctggtccgaccttggtccactggtacgatcaggcactcgtggaagagacattgtctaccgtccggatgtcctcaaagatgccaatattctcaccttgtgtaactcgcccgatgacttccaagctggagggggccacaatccctccggatccgctgatgaaggccgacatcgaccatttttcttaaggtgttttgcagctaataatcccacggccgtatattacgaaggtgttcatgttctaatgcatgaacgaaacatcaatggagccatcaggctcttacagcgtcatgctccagtacgagcaaatgcaacacttgcatgcgccattgtattcatatgtgctgggtatgattatatgggcggc

SEQ ID NO: 23864 - DNA, 994 bp, Arabidopsis thaliana landsberg
  unsure (1)..(994): unsure at all n locations
ttcaaatcttagcttctggatagatacaaagcttattgtagatactcgaaaagagtatatgtggtcagtgtgatatcaggccattgtggttgaaaagttgaataatgatttaaaatggtcccaaacgtgacaaaagttagttctacttcatagaattgagtggattacacactagagacattgtagctaagaaaagtgtaaaaatgtcggtttagagaactattggtcacccttgaagtcgttgacttcatcgtatgggatgggagtgatagtctccagggtcataccttcgaccatgaatcctagtttgggtcctttaggctacctctttgtgctaatggtttctcctctggctttggatgcagccttgagctcatcatttttcttcttcctcagcttgaactccacagcacatcttgactgctgcacatgctccacaagaacatggatcctcttccttatgatcttatcgccaatctgataaacccacctcaagcaaaaactcaaaaatcagtgtagagcagatattgtcatagcttctatagagacaaagaaagaagagtaactaaatctaaactgtgaaagtacaaggttagtgtatttgttctttgatgattataggttgctaatcacagtatatatgaagcacaagaaagttagtatatatcgcaagttagggtgaaaagtaaaggagatcagattaaagtcctatatcccatggttttggtcactacactgcctttttgattcatgttaagcaaaacttcaatccaaaagtaaaggatggatatgcttgatttgaaccggtatgaatgcnnnnnnnnnnnnnnnnnnnnnnnnnnntaagtgggatattcacatgcatctttgtaattggtgactttttgtcaggtggtgatatattttttttttttttatgtttctgacacagccaccacaatctatagtatgtcttataaaatgttacctttcaagtaccatataccctttaatt

SEQ ID NO: 23865 - DNA, 1198 bp, Arabidopsis thaliana landsberg
ctcaactcatccctttcaaattttttaacaattaaaacaattttctttataagttaatatcactataaattaataaaagattatggtcttaaagttattaatctatagaggtttttttttactgtattgggagtgttgtccaattatgagtttaatccaacttttataaaattaaatttacaattctaagaaattaatcaaaatatttataattggataaagtatttgttgacatttagtatttttattattataataataaagctaattaatattggatatagacatatagtgtgtatatttctgcattcagatataatactatgaatacataatcttatgaatgttcatgatttcataaattacatctaatatatttttatttccaaatccatagaaatgtcataaagttactttataataaaattgagtaattttacctttctttatcttgcattttcctttcattgattgttacttttccttcttcttatttttgggggcaatttgttggttataaaaattctctctaagaacctcatcagcgaatcattgaaataaaagaagacaaaaatatcatacagaactacataagttctcactttgattcatctctgattatgaacagcttacctttgcatctcctcgaccaaattcttttcagattggaacccaaatctctggcgatgatgaaatccacaaatagaactatcaattcgcatatatccgacccgctttttgaatccgaatacttttcccggttagaatccagtttgtataacctttcccccggtggcgccagatacgtcatgtgccagcctttagtctcttcatgcaaatctatgtcaatgggggaaaaagcaattcaaggtaatttccgatgttacatgttggggtcatgctctggccttctcctactgtacatcggtggcctcttcgtcgcaaatcccctcacaaagaggtttcgatatttggatccttctggctcaaagtttatacctacactaagtggtgatcgctggatttatttggcacatccggagagagcgatgtgcgttggttttgcggttgatcgaaagagattcaagatcgtctgcatacttgagatggagacgaggtatgaattcgaaatcaacgacggcgattcatggagactatcaaaaacgactatcaatgctgactcaaaaagtgatctcac

SEQ ID NO: 23866 - DNA, 717 bp, Arabidopsis thaliana landsberg
catttcttgaagagtgtacttcttgatttcagcttctgttaattccaactctgaacagaagaataacaataaatgatgtgtgaattcatatgtaaccttacatatatatggagcgaaatgaataaagcttagacaccatcataccttgattgttatagtcatctcacttttttttcagcatatcctgtgataataactctcatgtctgttcccaaacatattctggtctagataatgaatcagatagaagcatcattgcaaagaaattcctcaagaaatcaccaaagcagaattgacttgcatccaccaaactgtcaatgtaaacttggtcatcatcaagaataccacgagcaaaacaggctgttttataagatgagtagacaacaccattgtaggtcttgatatcagcaaaacacgttggacctctgacaatgttaagcataactcttagaaaatattcatcttctaatttccttggaacataatttatacgtcccaataaaaatcctcttgatcttttgttccacattttatttattccatcccaagtaaaatacgctgggatgtctgcatataagagatcacgtgcacgttctccatttttactaacagcatcattcctgtttaatgtcaaccaagcccaaaatagagaatcttggttggcaatacgttccaaaacttcttttatagactctttccttttaaaaaatgttggtt

SEQ ID NO: 23867 - DNA, 528 bp, Arabidopsis thaliana landsberg
tgtacccaccataaccggaatgggagaccacatctcaggtctcgtgaggggatatgtctgcgggcaggttcactcaggtactaggcttaccgatttaccatatttctcggtatgtgtttagtacgttcaaacgcttgacacaggtatccgcacgttaatccttattccaatttcccatctcgtcgacaaccaatccccatggattgttgtccacagactagtatcatgaggatatgaaagtgggtacaaccaattcctgatctcgcgcgaatgctagaaaaatcactcgacttctaccgagatcctaattaataaagcagctactcgacctagcatactagtattcatctcaacaggattcctgagatcatgcaactagggtttcaaacaactcctacacctaagtgcacaatcaatcctacaatcattaagtatattaagatagcataaataacaggttatgcataaaacaggggcttgcttccaaggctgtggcaggcagatcctctagtgcaggctcgggtgctg

SEQ ID NO: 23868 - DNA, 609 bp, Arabidopsis thaliana landsberg
  unsure (1)..(609): unsure at all n locations
ttaattatcctacaactctctttttttaaatggaacctcacgcgntctgantaaccannaggagacgggggaatcttctatgtaaaaacgtaataatcctcataatccgtaatcaataattttcttattttaaaattctagatattgcaaaacatgttgaaaatattaggcatagggatctgattggttttctagagattcttagagaaaataagcatttgcatacaaatgatattaatggggttgcatttgttttgataagtttctaatttgacgacatgttttgcaaaacttggatgtgataccatcaaaatattgagcaaaatgtagtacatataatatataagaaataaatcggtgagatggaatattgaactcgaagaaaaagtaaaacaaagccaaagaaaatgacagcttcaataaacaaactatttgaaaagaaaattgtattatcgtataaatatcaatgcaatacgtagaaatagaattgagttgcaatattttgaagcataacatattgttctgctattttataggtaattaaaaaataagttacaaaaacatagttaaaacttgaaagtagcaaaataatattctctctggttcata

SEQ ID NO: 23869 - DNA, 378 bp, Arabidopsis thaliana landsberg
actttgtcagaaaggactgacacgcactccctcgagcaacacatgttatcatcctgtcactacaaccaagcaaaaactaaaatatcatactacaaaatgcattatgttcctaacttacagactattgaaatatacatattacttgagaacttacagattgtctttgagtgtaagtgtcacatatctggcctcaaagtctgtttccccttgacgacagacatatggaaatcttgacacagttgagacacttgatatgactccaatagcatctaacaataacagcagagcaatcaaataacttataaatcttagtgctaaggaaatagaatagagagaaagcatcaactatatagataagtcttagattaccagttccat

SEQ ID NO: 23870 - DNA, 268 bp, Arabidopsis thaliana landsberg
aggagatggttacactcactttgatgtctctgaattcttacaaccagaatcaattagaagtgcacaagtggatttcacatattctacatatatgccttcaaatcttgagaatatattggaaactcgaacttgaattcgtaatcgacaagcacatcaacaattgaactttgatttggttgaacatatatagaatttttttagcagaaatcaatagttaaattttatggtttcatgtatgttttaatcttttgcactgacatctatgtca

SEQ ID NO: 23871 - DNA, 357 bp, Arabidopsis thaliana landsberg
  unsure (1)..(357): unsure at all n locations
tgcatttgctttatctaaaagtggcttaaaatattgttttggttgcagtacatacaatgcagattttgatggtgatgagatgaatgtgcattttccacaannnnnnnnnnnnnnnnnnnnnnnnnnnnnnnnnnnnnnnnnnnnnnnnnnnnnnnnnnnnnnnnnnnnnggcgagccacttcgagctttaattcaggtttaacttccatgctatttcttcaaacctttagtttgcttttatcattggcttgatttcacgaattgcgttgtctaccagagatatctattgactctgtattttcttaaataggatcatattgncagnttcggcttgcttactaaaaagggacaccattt

SEQ ID NO: 23872 - DNA, 1213 bp, Arabidopsis thaliana landsberg
  unsure (1)..(1213): unsure at all n locations
gaccagcgagggatatgcaagtatagacagcgcctttgttttatgtattttattgcacacaagttggcttgggactttgggcagattgtgtatgagcatatcgtgcatctcgctttgaaagttgaggcaaagttctattctgcagcttgctttgaaacctgaggcaaagttctacattccgcttccgagtcctgtgtatcaacttcttcagatgcagcatcctgtgaagtttgttgagaagccagagcccttagtccagactaagaagaagactgcaaagaagccatcaacccaaggagtgcaacgctggtgactccactgatggttcagaacatcgtagagcaatgaaactggccattgaagttctgcagactgctttagatgcaagtaagtgttattctgttttcctttgaaatattatatctcagctaatgatgtttgcgtgatttttgactaagtcatgccctaagcaggaggagatatgtctgaatctgatgatgggagaaactaatttaagggggagcttgatgtttttaacgtttaaaatcttgtttttgacaagcttgtttttatttcacaccatgcttttatttttgttctttttgaactgatgatatgtatcctctgaaaacttgggtctgtaataagttaaacacagctgcttggacgaatcttatcttttgataggtatgctagaaacgtttctagattttgtcttgttgctgtgtttgggtttccttctgtttgactttcacgtcccgtcaaggagattgtttgattcaaacagctggtggaagcaaacccggtttggctgcagtagtctgagaagtggatggtcatcaaagtgtgttacgatacactgatttcaggtaagtattnttaactacttgtcctgatgtacatcttctgtaagtagttgtttttaactgagttgtgcactcaagcagggggagatgatgctgcgagaactgcggatatggatggggagtttgacttctaaatctaagggggcacatgaattgtgggggagctataggctgttttaaaaatgttctttttgtgacttttgttgttttgagtggtttgtagttgactgggtctaggtttattcagatcagaacaatgtttgctcgggtcattctatcattccgagtgtgtaataagataattcaaacttattatgtttatgttgattgatcctaggttctggttt

SEQ ID NO: 23873 - DNA, 1638 bp, Arabidopsis thaliana landsberg
acggcaacagtttcttctgccttgtagaagggcggctctataacccaatctcaacacatggtaacacatgataaaaggaatcttatgtttttaaattataaatatcgacaggattctgaaattatattttatcaacaatattctcctaggattatagagtacaatgtctcgtaattttattaatggaaagttaagttgacgataaaaaaaaaatcgagtacgataaacaaccgtggctgttatacaatactttcatgctctatatttttggatgcttattggagtatttgtatatatacttatattagaaattatgtccttttgatttaatatggattaaattattacaatctacgtttcttcctttttcataataattattatgtgataaacaatttttacatatcctatgattatttctttatgttacattgtggaggagaagtcctatataatttattttttaaaaggaaactatatgaaaaggaaacttaatatattttatttgttgcatgtacgattttcattggaaaagtaagatcactccatttattcatcgaaattattctaaatattgtagttaggctcttgtttatccatctagatggatcatctagatggagatgaaaaatgatgtttgtttttgataatttaacagatcatttggatgaatcatttggatggtccatctgaatgactttgtaaatttagactaatttgtgaaactcatttggatgaacttgatcgaaccatttggatggagatggtttagtccaaatgaataaatgacaaatataacctttgcaataatactaattttctataaatttttatctaatatttttttaaattacatattgcaccaaaaaaatctataaattgggaaatcacggactattattttacgttaaaattgtattcaatttttccaccaaaatcgcaaaatcatattttcccgacaacaccgtaaaatcatgtttttccgctaaaactgcaaaatcatatttttctctcaaaaccgtaaaatcatattttccgccaaaaccgtaaaaacatgtttcccgccaaaatcgtaaaatcatgttttctcgccaaaattgtaaaatcatatctacgtgatggacttttatataattcatatcttattataccaagattcttttaagaatcttcataaatgttcttagcatatatatacagagtagaggaagtatgatcttcacttattagtgttagcttgtttctttgcagttcaatttacaattgaggttgctttttctcaggatgttgaaataaagttgcaatatatgtccttataggccggttttgtttaggattttgggtattgtttagtttgtattttcttttctaccctctctaattgagaattttttttttagtttagatcctaaagtttatgaggattagataatatgttactaaacctttccctgtattatgctaaatgatctcctccccttgaagaaatagacggagaccatgatttccaagagaagtttgcttgcccattttgtgcagagtcatatatatgataacattggcttgtactgacacatatgtgatgaacattttatgaagtcaaataacaggttattattaacacattaatggaaaaat

SEQ ID NO: 23874 - DNA, 537 bp, Arabidopsis thaliana landsberg
tgttggcgagcaacggtcgagtataaaggatccaaatcatcaaatttactcgactacagatcctcattagcatgtggccagtgtgatcgagtgacatcttggagctccaattgaaaccatgtttatgctcgattgcacacagacaatcgatctctacggcatgcggtcgagtgaatctctgagattggatccattacacttaaacattggcggttatctcctgaaaacactagtaaaacgcatcaaaaataacaaagaaaacaaaaaatatgtacagagaaaggcatgggacttcctcccaagtgaccttgttttaagtcattagctcgacaccattactcctttaatcatcaagaagttccgggagatgaaccgtcgtcacctctggaaagatttgatctgctaagtatttcttgagcctttgacaatttactgtgaaattttcactcttaccagcaagagtgactgctccataagggcggacttcactgatacaaaacggaccagaccatctagacttaagctttctggaaaaag

SEQ ID NO: 23875 - DNA, 432 bp, Arabidopsis thaliana landsberg
  unsure (1)..(432): unsure at all n locations
tgttgatgacatagacgccccaccatattttgacgatccagagaaggaaggtaaagcatagctatatagcaattttgatataataaaatatttagcacggtactatctatagctaccgtattcgataagcatttgtttaacacgataactaactatcaataactaaagtattacctgctatattttctctgcnnnnnnnnnnnnnnnnnnnnnnnnnnnnnnnnnnnnnnnnnnnnnnnnnnnnnnnnnnnnnntggtcggatttaaaaaacaaagaggactatgcaacgaaactagcgattcacgcaattcgccggaagttccatttcatctaggcaaaatcaggaccgnnnnnnnnnnnnnnnnnnnnnnnnnnnnnnnnnnnnnnnnnnnnnnnntatgcaactaagctgcaagatagcgatcggttcg

SEQ ID NO: 23876 - DNA, 570 bp, Arabidopsis thaliana landsberg
gttagcactgataaccagctagccgatatctttaccaagcctctagatgagaagaccttttgcaggctgcgtagtgagctaaatgtcctagattcgcggaacttggattgaattgtagcatacatgtgtttatgcctttgatcatgttccttatgcattctgtttcttattgtggtgctcaagttgtacaaacactccctggacctcacaagtcctttttgcaagtgatgcacatatttagggggagctgtgctacaacttgaccctttgagactaaccatatgcttgagtttgcttgttttagtctcaaaggaggtttgaaagggaaaaggtggacttggaccatgaaagacttccactgcacttcgatgagagggtaacttattccaagttcatctcatgtactcttattgcctttgtgttcttatttgaagattttggtgaggcaatggggttaaggggccgagattgatcccgttttggtgcttgatgccaaagggggagaaaataaaggccaaagcgataaatggatcagctaccacttgagagattttgaaaatagtagaatag

SEQ ID NO: 23877 - DNA, 3573 bp, Arabidopsis thaliana landsberg
  unsure (1)..(3573): unsure at all n locations
ttcaaccccttatacagctagtccactttagccaaacgggacatttgctgagtatgttgatgtgtactcacccttgctttacacaccacccccagcccaggttgtcccttgtattgagtgctcaggaggtgatgctggcaacatggaggacttcgaggaattccaggaatacgacgagttttagtttattttagtggcaaccccagtcagctgcctgtgtaggcttatcatctacgtttcgtttctccacactttgatatttatgttgaacattatggctatgtattagactctgtggatgtctctgacatcttgatgtaattaaagtacctttccgctatttactttgagctatgtgtgatgatgtccaattatgtaatcgctttgtacgtgagtttctgatccaggcacgtacatggttcgcattcagtttgccttctaaaaccgggtgtgacataagtggtatcaaagccgtgctgactgtaggaccgctaacctagagtagaatggccgttctaaggactatagacctctgtccctaccttgactttgatatctcttcaaaagttggtcctaccgacccaacctatgttctactatatattataccttgctaaaaaattgtgtttcattctgatccttcatttacttattacttgctggtcatattaattctgttctcacccttttgcttgcgatgtcttttgtagatggctcgacttagacacactgcacgaaagtcagtcatccccttcttaccctcccgccttgctgagcgtccgcttcgccgtcccgtggccggacagtccagccacttggagagactacaccaccgcctgcgtgaggagcaggagcgtcgacgacaggagcagcagagctcttccttctcgctccaccaggagatagagtctgtgaggagctgctcccctgtgcttcctctggagccgccccctgcatcaccactgggcgccccagcttctggagtagctgctggaggagacccagacgacggagatggcgatgacagctcgagccacgacaccgacttctctgctaaccttgagccggaaggatgggttgctcgacccatcactcgcgacgctgctcgcgggtgtcacttccatgatgcgctcgacaccctgctacgtcgggcatttgaccggcatacttggtccgtcgagtatcgctgtgtggtctaccagcatagtcgcggggtctacccggaccgctgggaggcgacttgcttggtgcgctgcccggaggacagtctccagggtgcagaggcctgttcagagcactattctatctctgagcgggactcagctgaggcagccatgcaagatgctgcacggcgtgccgtttcgcactactgctcggttttcggtggggcagctgacggtcttgacctgaagtattacccccgccgtccatctggcagcacaggaggcgtgattgtctcacctgtcggtgagggcaatcctaggttgagcagcacagtcaacctagccgccgtgctaaacacggagctggaccatgcattagacgagctgagtagggctcgtgctgagatcgcccagttgcgggctgagcgcgcggaacgtcgtcacttggatggtggttcccccgctcccgttgggactcagcacccgtaccgctcacctcagcgtggacaccagtcttatggcaatcccgactgcaagaccaagataactctagaaccatagatcgttagagttggatcttgtaattaatacgaaatatatacatagaagcttcagtcttagcgttagtctcggtcttagttagtcttagttagacagggtagtttgctatatcctgtgcatttatgtttgtcatgatgaaccatgtttggtttggatctttgtaatgactgtcaccagagtgtgggtacccctgcattttggtttacctattatgttaatagagttagttatatagttgggaaaccctttcattccactttcctttctatctgagaagctgtgtggtctgtgttggagatcagtgaagatgctcatctgttcagtgctgttgaataattctattctcttttcttatgctgcaagacttgccagatcagttctgatgtgtggttgcattctgtagatgtcagagaacaggcgcagaggaggaaggcgtgctcagcaggagcgagccggtcaacaagatgaggcgccccagcagcagcagctgccgcccccgcccccgatgtcgatcgagcagatgtttctgatgcaaactcaggcagttcaagccatcggtcagactttggccgccattcagcagcagcagcagcaacagcagcaagcaccaccccagcctcagatgcccagagacaagcgtgctgaattcatgagaggtcatccaccaacgttcgctcactcttctgaccccatggatgctgaagactggctgcgcactgtggagcgggagttgcataccgctcagtgcgatgacagggagaaagtcctgtatggtccccgtctgttgagaggagcagcccagtcatggcgggagtcttacctcgccacccatgcccaccctgacgccatcacctgggaagagttcagaggaagctttcgtcagtaccatgtccctgcaggtctgatgacagtgaagaaggaggagttcctggccctcaagcaagggccattgcctgtcagtgagtaccgagacaggtttctgcaattgtctcgctatgctcctgaagatgtcaacactgacgccaagcgacagtatcgtttcctgagaggcttggttgaccctctgcagtacaaactgatgaatcacaccttccccaccnnnnnnnnnnnnnnnnntagagcaatcatgacagagaagaagtacaagaagatggaggatcgcaagcgcaagattggtggggctcagcctagaagcagcaatcgcccccgtttctcgggcaacccacctcagtagttcaagcagaatcagcgtccgcccttgcagcagttttagaggcagtacccccagcatcagcagcagaatcgacaaaacagtcagtcaggaggaagtcagttctagaggcagaatcagcaggcacctcgtcttcttgccccagcaacccaacagaacagtcaagcagccctagttcaaggcagaggccgagcatgtttccactatggagagcaagtccattgggtgatgcaatgtccgaagaaggcagcccagtagcagtcaagccctagtgccccagcaaagcagaatgtaccccaacctggagcaggcaaccgctcccagccacgctacaaccatgggagactgaaccacttggaggctgaagcagttcaggaaacccacggcatgatagtaggtatgtttctagttgactcccatattgcagaagtgttatttgatactggagcaacacattcatttattactgcatcatgggtagaagcacataatcttccgataactatcatgtcaacacccatccaaattgattcagccggtggtaggatccgagctgatagtgtttgcttgaatgtaagtgtggaaataagggggataaattttccccactaatctcta

SEQ ID NO: 23878 - DNA, 541 bp, Arabidopsis thaliana landsberg
tatcatttttcggcatcacgtacgagcagcttcaggctagggtgtttctttctgcaggaccttcggcgacgaagcatgatcccaacaattttctttgcatttaatatcagttataactatgacaactaatttttagtcgttttggacagaaaaatatagattggtcaagccgtttagtaaagcaacatatcacacatacttgcaaattgttttcacatcttaatataatatatatccgtatgcaaattagcaagtcaatttttatagttcatagctattggttcagaactttatacgaaagaatgttgtctcatccctttcctataggagggtgaaataagttttaccagtagcgtcgtaccggaggtgccagtagccttagtgtatcagtcgctcctcaaaatggactcactagcaacaaaatgttctctaacgagttgactcgcgtgctcgactgggattgtactttgtctctttgtcaactgagctatggtgaattctatcgacatcaacgttagcacgatggttcgccaactgagca

SEQ ID NO: 23879 - DNA, 1154 bp, Arabidopsis thaliana landsberg
  unsure (1)..(1154): unsure at all n locations
tcattgttctcctcttgaggtggctcatcttcttgatcttcttcttcattgttttgagcctgatcctcatcttgagttggtggagatgcttgattggaagataatggttgatcttgtgcttgtggaggctcttcagattccttaggacacacatccccaatggacaggttcctcagcgcgacgcactgagcctcttcatcatctagctcatcaagatcaacttgctctacttgagagccattagtctcatcaaacacaatgtcacaagaaacctcaactaatccagtggattttttgaagactctatatgcccttgtgtttgagtcataaccaagtaaaaagccttctacaaccttaggaccaaatttagattttctacctcttttaacaagaataaaacatttgctaccaaagactctaaaatatgaaacattgggctttttaccggtgaggagttcatattatgtcttcttgaggattcagtgtagatacaaccggttgatggcgtacaggcggtgttgaccgctcggcccaaaaccgatccgaagtcttgtactcatcaagcatggnnnnnnnnnnnnnnnnnnnnnntctattcttcctctccactacaccattttgctgtggcgtgtagggagaagagaactcatgcttgatgccctcctcctcaaggaagccttcaatttgagagttcttgaactccgtcccgttgtcgcttcttattttcttgatccttaagccgaactcattttgagcctgtctcaagaatccctttaaggtctcttgggtatgagatttttcctgcaaaaagaacacccaagtgaagcgagaataatcatccacaataactagacagtacttactcccgccgatgcttatgtaagcaatcaggccgaataaatctatgtgtaggagctccagtggcctgtcagtcgtcatgatgttcttgtgtggatgatgaacaccaactttcttcccggcttggcatgcgctacaaatcctgtctttctaaaaatgaacatttgttaatcctaaaatgtgctctccctttaaaagcttatgaagattcttcattccaacatgggctagtcgcggtgccagagccaactcatgttagtcttagcaattaagcaagtgtcgagttcagctctatc

SEQ ID NO: 23880 - DNA, 850 bp, Arabidopsis thaliana landsberg
tctaattctgtgataccacataaagaactacactcaaattcatcgatcaacaattttgtaaaattttcctcgaaaaaagtcaattgcgaaagtacaaaaattttgcaaaattgaaagatatgacacaacagttgtacggtacatattctgaatttttcatttttaattttcttatatatgtatatatagtattttaacgaatttatattttaattacgaattatattatatttagttatacatatgttttcaaatataatagatattttttacacttttaaattattaatgtcagtctctcatcattacatccattattgttttgctatacaaatgtagttagctatatataaaaaaatagataaatttgacgttcgtactcatgatatacatatcctaagaagggttaccctaactttattattagaagggtacataatttttcctggatctcttcctctctttactttaataatctctttaatttaatgatgaaaacttaagacttttaattatatagtaagatgtacatttgtttagcctaataatcattattttaatttgatatatatagtggaatggaaattcaagccacaatatgggcagaacaattggaagataaatattgtggggtgggaagcagcgataacattgttctcatcatgacaagtgttcttattaagccatatcaaagtgcaatttgtttgtcagcttctctaggaaccaaactctatttgaaccttgactttgatcctgttacaaccttttggaaaaggtactttattaaagttttttaattttttttttatctaattagttaaaaactttaagtgaaatatcaattgcaatt

SEQ ID NO: 23881 - DNA, 568 bp, Arabidopsis thaliana landsberg
aaaatatttgattgcctcagatctgcaattaatttatatgcacatttacagctatttcattgctctttgtcaagcctcttgaagggcctctatcaactcgattgttatcagaaagtaaaccggttagcattgttgtcgttaggttttagaggaaactgaaacggctacattttgtagaaatgtttttggtaggcgtggacaaaatacccgaacccgaagaatcaaaccgaacctgaccctacaaacatgatccgaatttaaacccaaaattttaaaatactcgaccgaatcctaaactacaaaacccgaacccgatcaagtttccgaacatatctgaaatatatatacataaaagtaatttattagtaataatcatatttacaactattaagtgcataaaatatttggattttaggatattttgtatatttttggatactttacctacttttcgatagatttggatagaaaatactcaagtttttaaagaatttttttgtgtatttttcaagtaatttaaatatattttgatccaaaattttgagttttggatattccgagtgaatcc

SEQ ID NO: 23882 - DNA, 730 bp, Arabidopsis thaliana landsberg
  unsure (1)..(730): unsure at all n locations
tgtcggcgtgggtctttcgtatctgggcgtcatgtagtatgggcttttgtttgagtgttttgggcttttgttccaggtattgttctctctgtttcggttgggccttgtggccgtcatgggcttgttggccttataatccgtttttagtttaattggaaatttaaagttgaaaaaaaaaaaaaaaactagggttcccaagtatcccactatatataattttagtcgaagaagttttcttctggttttctcttgcaaagacctctcagcagccaacaacagttatcaaagcttaagccgttttagggttttatccttttgcagagatccaatcatggtgagttcttcagtctcaatatctgactgaatcttcttctctgatttacatttttcgattgctgaacaattaatggtgaatgttgtaggcggatgttgaaccagaggttgctgctgctggagttcccaagaagaggacgtttaagaagtttgccttcaaaggagttgatctcgatgctcttctcgatatgtctactgatgatcttgtcaagctcttctcttctcgtattcgtagaaggtatatatcaaaccctagactagtctcatttttagattctgagattgatgtttgacttcattttgactgtttgtgaaatgttcataggtcctctagaggtttgcaaggaagccaatggctctgataagaagctgaagaaagcgggnatcatttcatttc

SEQ ID NO: 23883 - DNA, 1318 bp, Arabidopsis thaliana landsberg
  unsure (1)..(1318): unsure at all n locations
ttccagatctttcatttcgaactcttctttcattttagttcttgcatcatcaatctcctttggaggtccaatgatatttaggtcatcaacataaacaacaatgatcacaaatcccgaaggagatttctaaatgaagacgcaagggcagatttcattattcacataccctttcttaagtagataattgcttaaacgattataccacatgcatccggattgtttcaatccgtaaagtgatcgctgtaatttgaccacatatatatctttagactttgatgagtctaatgcctcaggaagttttaatccttccgagattttcatatatatatcattatcaagagatccatataaataagttgtcaccacatccataaggtacatatctaaattattagataccgaaaggctcattaagtacctgaatgtaattgcatccatgacccgagaatatgtttcttcataatcaactcctggtctttgagagaaactttgtgcaacaagtcgggctttatatcgngtgatctcatctttcttattttttttttgcacgaatacccacttgtgcccaacagactttacattctcagatgcagtgacaataggtccaaagacattttttttgttaaggaaatgctactcaacttgcatggcatttttctatttctcccaatccagccttttttggcattcggataatatctttggatctagatcatcattctgataatcggtctctttagataaagaaaaggagaatatcctactttcatcatcaatatcatctctatccaatatgataccatcataggcatagtttgttgggtacaaaccaaaggtctcatatcggaagtttagaaaaagagtttctaatatataagccaagtccaactccaactagtatgaggccttttgggaaggaacccaataacaaatccttgcgggcttgatcatgtaagcccaaagaggaaaatatcatactaaatgggagttggaatgagcttagaaagcccattaaatggtatcacaacctaggttgaaaaagtggacctagggcttaggatatgatcggtgtgggagaatctctcaaacatgacacgataagaaggtgcctcaagaatttcacgaataagaaggtgcctagttaagagtgccaaatttttgtttaagaggaggcccaagttcgtggtctttggtttgaaggggagattgttgggtacaaaccaaaagtcccacatcggaagattagaaaaagagtttctaagatataagtcaagtccaactccaactagtatgagaccttgggaaggaactcaatacg

SEQ ID NO: 23884 - DNA, 504 bp, Arabidopsis thaliana landsberg
catcaaatccttacatctattacaaataacaacatgctctacacatgaactagctttattaactttctctagcttagcatttaattcatcatttaaattctttaaactagagacagattcatagcaagcagacaattcagaggatatcatttcatttcttttaatttctaaagcaagagatttttgaacattaacaaacttgtcatgttcctcatacataatgtcctcttgcttttctagcaatctatccttttcatttagagcatcaattaattcattaaatttgtctacctttgctctatctagtcctttaaacaagtcagtgtaatctacttcatcatcgaaagaatcctcatcactagaagaagagtacttaggagaatctcgaatacgtaccttcttctccttagccatgaggcaagtatggcgtttgttggggaagagcgaagatttgtcgaaggccgaggcagccaatccttcatcgtcggagttggatgaagagca

SEQ ID NO: 23885 - DNA, 981 bp, Arabidopsis thaliana landsberg
  unsure (1)..(981): unsure at all n locations
tatgtggttgttctctgcatcttgaagcatcctcagcccatacttgtctaccccttcctcgtgatgatccagttttactctctgagaagttgcgtgtcgctgaagcttgtattgcaaatcaggctgagaagatcaatagcttcggtgtctactttgactaccttgccgacaaggatccagtgtttgctgcaatctttcgaggcgcatcctctacaaggactaaacctactagcgccaatccaagacctgaggtggctaatctgagacctgaggtagctaacctgaggtgggcaacgagacaccaattgctgctgtgggcgtggcgctagaacagaagccggtacttgatcctctccatcagcaacattctaacttctaagttaatgttttccatgttttttggattatgttttatgactatccatcacgaataaaaacaatttcaatgattgtgatttgtaacggtattgctatgtaaaatttggtttcaaatttgggttttaagattgttttagaaaacataatgagagtttaaatatcagattaattagctaactcgagattaattaagccctaattacacagttaaacaacgataaacaaacatgcaaacgaagagcaaagtcctagcaaactctgtgatggatttacaagaaaaagaacacagaatcgcaattccctcgtagaagtgctaggactctgcgaggacaaaaaaatgttgactttgtgaaaactggtactgtttaccgattgcgatgaaaacaacgtagtaaatccatcannnnnnnnnnnnnnnnnnnnnnnnnnnntcattttccaagtaatttaggacannnnnnnnnnnnnnnnntatgtgtgtaatttgcgaggcgaattattcttcgcaagttttgcgagggaattgcaatgttttcctttttgcgagacgtgatttgcgaggaattcttctgtgtcgcaaattccttgcaattgggtttgcga

SEQ ID NO: 23886 - DNA, 560 bp, Arabidopsis thaliana landsberg
tttctctttatgtgagtttgatcgtcatgcatcatcatatgtgaacaccatctttaaaaacagttaataaaaatatataccactaaattatgcatcatgctggatattattttgtgtgcatttggtgacaatatataaatagtgtgacaaaaaatatattaaagtcccaaagtggaatttaaaatataaaagataatctagaatttagaagtggagaaagaaaagaaaatgtgtatacaaaataaatattataaataaaggaaataatagtatgtgcaaaattatactcttaatctgaggaagctttaccacagagtaaattagaattttgaatttcaaactcaaaaggaaaacaaaaacagataataataatagagataagaaattggaaacagacatgaaagagaaaatgaaaaatcgtcgtctgggccgaatctccctgcgctggcccattgccgcatggccaacacccccatccgcacactctctggctggaaaatgcattgagtcgctgactggtgggccctatcgtcaggatattcttctcacagcatagacgc

SEQ ID NO: 23887 - DNA, 650 bp, Arabidopsis thaliana landsberg
atttcccattattatgaaatgtttctcgcatttttttttatttttttccttatttttaaacaggtttgaaagttgtcaatgaatccaaactgttgtaatattttttttttttgttgattagtcaatttaacattagaaaaacaattagtcaactaaatacttgagtaaaaacataatttattgaacataatcacaaatgctctacactgtattactgttaatcatatcaattgaaagaagctgttaaaaaaaaaaaaaattgaacataatcacaatttcttttggtatatatatcgagtgatcgaatttttacaaatacaataagcaaaattttcacatccttctagaagcattctgaattaaaataaataatcttacatttaggacgaattccaaatttatatataatccattctgtattaaaatatgtatcatttaaaaccttgtgcaactaaatttgtttggattcacattttaaaatcctcacatttcgcataatgtttcaatatataaatctattcattgcttgatcattatacatttctgacgatatcttttttattctcacttgaaaatattttcaagaaaccaaaatcaaaatttattcccaatccaaacaaaactcataaccctaattccatagatcattc

SEQ ID NO: 23888 - DNA, 1064 bp, Arabidopsis thaliana landsberg
taccaaatattttgaacattctaacgtaaatgtgttaacaaaaatacttttatggctacataatgattcacaatcttccccttaaacatgtgagtattattctaatctttgattcgtaactatgatttttctacttgctctccaagatattttcaaaccgtcaaaccgatgcaaccaaaaccttagactctgctctataaataaccatctcatatcgaacaattaccataacaacaatttgcctcagtctaaatgatccctcaaaattctcatatagcaaggtatttcttatgcatacctctagagatattttgctatacagaatatttatcagtgtttgtgcgacgaatttaatagattgagtttgtattttttttgtttgtagagctttatgagcaagctattaagtatgagaaaggttcgtttattacttctaatggagctttggcgacgctttcgggtgctaagactggtcttgctccgacacacaagcgtattgttagagttgcggctactaagtatgagctttggtggggaaagtgagtattcttaattcttatctcgattttgattgatggagtttttatcctctgttttgtttttttgttttgattttaagggttcgcccattattgaaatggatgaacatactttcatggtgaacagagaaagagctgttgattacttgaatttcttggaaaatgtttaaaatttgaaaactttaatcaatgtttttgagtgtagaacgtttgatataagtttatgaaatttctgttgttgttgggatttttaggtctttgtcaatgatcaatacttaaactgggatccggagaacacaatcaaagtcaggattgtctcacctagagcctaccattcattgtttatgcacaacatgtaagtcacaatgtcaaaagtttggcttaaacagtagcaatgagtgttatgcattaccttagagcctaccattctctccattcattatggaagcaatatgggaaaagatggagatattgccctcttctttggactttcacgtattgtagtctcatcaccaaagatggtgt

SEQ ID NO: 23889 - DNA, 607 bp, Arabidopsis thaliana landsberg
  unsure (1)..(607): unsure at all n locations
acatacattccacaaatttaatataaaaagaacagtacaccatacaataaaatataataaataaacagacgctcggtgaagggctcacacctacgactaagcgagaaagagagagtgtaacggtcgaggctacggccgaagggcgatcacgttacgcgattataaatcaaagtagtcgtctaaacagaatggtattaatttggccatcgtgctatgcataggacaaagtcatgttccatatttaatcattataaacagatcaaagtaaatttaaaaggattgccacgcggcaaaacgcgcgacacaacacttagactgaattgagaataaaacgactcatcgcgtgacggagcgtgccacgagacacttgaattaattataaaaatgacgtcaagcgtcgtgcgatgaagacacgacggcatacgtcatctaaactgaatttaaaacgaaacgtcacgcgactggacgcgtgacgcaacacattaattattctgaaattaaaatggatnnnnnnnnnnnnnnnnnnncagcacattaatagaatctgaaatcaaactaattcgccacgcaacgaagcgtgtgacgcggcatgttaattaacaatgtt

SEQ ID NO: 23890 - DNA, 584 bp, Arabidopsis thaliana landsberg
  unsure (1)..(584): unsure at all n locations
tgccgtcttcggaatgtccgaagtcggatcctgagctgatgataacctgacctcagatcgatcttgtgagaacacactggctcctctcaactggtcgaacagatcttctattctgggcaaaggatacttgttcttgatcgtgacctcattcaaagctctataatcgatgcacatcctcttagtgccatctttcttctccacaaacaagacaggggcggcccaaggcgaagtgcttggccggacgtaacctttctctgacagctcatcaatctgcttcttaagctcaaccaactctggtccagatattctgtaagctctcttagagatgggggcggttccaggaagaagctccatagcaaactcaaccttccgctctggtggcatacccggtaaatcctttggaaacacannnnnnnnnnnnnnnnnnnnnnnnnnnnnnnnnnnnnnnnnnnnnnnactgctatcgacagccatctgatagcaacttcctttctttggctcaggcgggactaactcggtcaccacttcctctcatagtggggacccaacttgattgccttttacacaactgataactgctgata

SEQ ID NO: 23891 - DNA, 566 bp, Arabidopsis thaliana landsberg
tgggaatattctggggatagtccaggtgcccgaggcataaacgtccttacattgggacgttggacactcgggcacctataaatacccccgtacagtacccttgagaggctggattaacagagcaattgccatctcgagttaaaccttgcttgcgctctttccactcccccgttggatcaacttgcccaggagagcaagttccaacatttagcgcccaccgttcgtgctacgaacaaaccacccgcgatggcacccaagagagctagttcgaaggcagccccatccgtcgatgaggcagcgaaggcaacatcgctagccgagaaaaagggcaaggccctcgcagataacaccccccaagaagcctgcgaagatgaagctctcagcaagagacaatgcaacaaacaacccactcccgaaggcaccctatgcacttgcagcttcagaggaaaaccacaagcacccccaggcttcgctccacgagagggcgaggacacaacagaggacgacgaagtcatcagcgtctcagcagaagaacaactacagctacgggccctgcacatcaagaa

SEQ ID NO: 23892 - DNA, 577 bp, Arabidopsis thaliana landsberg
cattactggtgtgtggcggaggtatgtcacaaaatgacaagatcttgctattcaaagtccagctttcgtcgacgtagtgggcagtcagagttatataaccttcaccagcaattgctgtccaacaatcgaaagctaagcatatcctactctgaatctttgccaaatccatcttcagcttgttcttctcgctatcccaagttttaacaacatctgttgcttctgtgtttctagtgtagtagctataatctggattcagatattgaaaaaaccttcgcagctcttcatattcaacaacagaaaaaggaagatcatgccaaattataaccctactaaacttctctcaaacaacactctaatcaatcttcattcttcctagtctttccatctccatcaattatcatatcagcgacatgcctatattttgacttcttaatgcatctttgatgatgacgcttcataggagatgttcatgtggtaggttcatacacaagtttttcaccacaatagttacatttaactcgattcttgccatcgtcaccttttccagcttgagtaaaatgtttccacatttctgaag

SEQ ID NO: 23893 - DNA, 1171 bp, Arabidopsis thaliana landsberg
  unsure (1)..(1171): unsure at all n locations
gaatctactcgccaggaagctggactgatcggtctgatgttggaccgattggtcggtttgtctctggtcgctggattgatgcacagacctagatgtgtgacgttggaccgatcagtccgtctttgtcgcctgatcagtgcggactgatcggtctaatcatgtaccgatcggtcggtccgtctctgtcgcccggatcagtgtatggactagaccgatcggtctggtcctcctttgtcctcgattcaacttctctcgtcctttctcgacccgaacaagctcaaaaccatcttttcacctcaaaagttcctaaaacctgcaaaagactcaagacacaaccgaaaacacacaaaagacggactatgacacgacaaataactcanaacgaatggactaaagacatcaaaaacacaacatatcaacttctccagacttaggtctttgcttgtcctcaaggaatcaaaaacctgtatcaggagaagaggtttgaaaacacgagaattcacattttcttcgaggtcatgctcttatcaattgcctgcaaaccattcatcacaaaactcatcaacccgtactagactgtacttcgccataaccgtagcgacaaaattaaatcccaagatctaaaagaactttcagagtcatagaacttcatcttttaacattcattagcagaggcgtatactctcaccaagggggtatcgaacacgttatgggcttggtcaaaaaggctaatatatggtggttcaaagtgtttcggattctcaaacaatataaacggatgcatgtcattagcgaaatcacagtgagacacagaccaattaggtggtacatagcttcccttaagttcggatcaaaccaaccaacacatactatcccaatcaaatcaatgagttcctatgatgcttaacaatataaccaataataactcaacatatctggttccttgatctcctttcccgctctttctctttttttcgtttttttttttttttttattctcttgttttttttagagcggaggagtggaaccggtgtctcacaaaaatctgcattaggaaaactcaacaaatgtaacatcacatacccatgaatataacaaatgcacaacctcaaaaccataatggctaaatatcaacacatatgaacaaccaacaaactacaactcactatc

SEQ ID NO: 23894 - DNA, 1308 bp, Arabidopsis thaliana landsberg
agaccgacaggaaaaagagcagatgagaactcttaatctttgagcactaattgaaagaagaaactaaactgatcagagagaaatacagcacccaaaaagacactcaaatataatgctcaacatagaaggttaaacaaacacaaacaaacttcatatcaactttcaacatactcaatatacacagttcctacataataaaacatacctggttgcatcggaagagcattcttattggcagccggaccaatacgcataggccttgtcgagcagtattgaccattcatttcagtcatggcacgcatctgctcattttcatccgcaaacctaacaaacccataccccttggaccttccagtggtcctgtcaagcacaactttagcccctttgacagacccatacacattcttgaatgtgtccgagagcatatagtcagtcacctcaggtgccaagtcacctacgaaaatggtatggtcaggcccttcagtctggaatcgtttctctccagccccagcctgagcccagttgagcctaaacgtctgttcagtgctcggcatgggagcaccattgtaagtctgcaaaacccgctctgctacagagtggctgacgaactcaatgaatccataaccttcagattgtcccgtcagcttattacgaatgactttagctgatgtagcctgaaaccaccaaacaaaaacaccaagtattcactaaccataaaaaatgaagatttatattgcaaagaacaatacttaatcaatcttctacatgataagcaaaagactatgttcatctcgattttgataaacagtcaagtaaaattacctcgccagactgagcaaagacgctcatgatgtagttctcgtccatccattgctgcaagtctccgatccacaacgacttaacatcgctagcggatcctggattctgagatccaataccgtactgatgttgacctagtggcgccgcagacaactgcatctgctgctgctgctgctgctgttgcatcatcatccacaattgctgttgtcctgatggtatctgtccagctccggcggcgtttgacggtggttgctgcatcactacgacggacaaaaaaaccaaaacctaaactttcgcttcgaaaataaagcatttttatagttatgatatacagttgtaggcttttttataggcccaatttttatatcagcccattagttgttctaccattgaccggtttggttttgaaccgggccatgatattgagtaattgaacatggttagtgttctaaggtaagaatgatgacaacagaacagtaaattggatta

SEQ ID NO: 23895 - DNA, 880 bp, Arabidopsis thaliana landsberg
  unsure (1)..(880): unsure at all n locations
agttaacacctgtttcttcttagatttcttctctcgctctgctgcttctcttttggccctttgttcggtttctgccaaccacgcttgctcttcgtcacgaataagttcttcctgcctttttagcgcgatagcttcttgatgtgcaacttcgattttagtgctgcagttctcagagatatggaagtaatatatgtaagcacatcaaggaagaacacaatggcataccgtatagaaacatattacacattgttacctgaagatatgggaaagaataaatatctccacagttcgtctacccaattcagttaaacgtctctcatcacgctcatcggcttccttgttgacctcttctccatcattgccatcctagatttgcatcgaagaacaaaaacaaaattttcaatacaagtaactttctagtgaataatgccagaagtcctctgaaacggaataatggatcagagaatgacaaaaatgactgaagatatgataacagataatggaattacggccaaaaattattttataaccaatttcagccgacctttgtacggttctggcgacctttttcatcttttggaggcaatggctcaagagcagctctctctaggagtaacagcacatcatcaactaatacgaacatatctttgtccacgctaacaannnnnnnnnnnnnnnnnnnnnnnnnnnaaagtctcgacctagctttcatgttcttagtttggccttctagagccttcaacccactatacaaggaatccatcaccaaagtggatgaaacttctttctctacgaaaaagtgttttacaactccttttaggattacgtccactttctctctacacatccgacgcctagagttttggtccatccctaacca

SEQ ID NO: 23896 - DNA, 781 bp, Arabidopsis thaliana landsberg
gagcatcatgcctagtgatatcccaacattaatttctctgcaagataaatatggtaactgattttagtaaatatgtcataacaagctaaaatgaaataaaaatctgttacaaaagttagtactattctattacaaaaaatcatggaaaaagaaaactataaatcggtcaccatatggattttaaattataaatctgtcgtaacataaaatatctttaaggtcattctcgcaatttattttgttctttataaaacctgccatcaaatgacagatttatggtaaaataaatttatctgtcacaacacaaaacaactctgtcataacacaaaacattatattttagaaaataaatctgccatcaaacgacaaatattgtgtaatattacaaaaatctgttataacataaaacaaatatgtcataacattaaaaaaatcagttatcgttagacgtcattctagtaattaattttttgacaataaatctgttacaacgtgacagattttcttaacaaaattataaatctgccatgacttaccgtaaaaaaacatccacaaaaaaataagtctgtcaaattatatgaaagtctatggtcgcataaactaaaaacctgtcaattaaattaaatctgctataatttataaatctgtcatcactatcttctaaaaagtctatcaaccaaataagtctatcataaaaaatctatcgcagttaaaaatgtctgcggaaaaaaaagaatccgccataactaaacgatagacttttgtaaaaacgcttgaattt

SEQ ID NO: 23897 - DNA, 772 bp, Arabidopsis thaliana landsberg
gttttatcatttactatggataataatactaattaaaaaggatcattgaagtttaaaataataatataatttatttaacattaatttaattggataaaattatatttatcatttgtaatatagtgttttcatttattggttaaatcaaaacataaaaaaactatattgtattaaaaatagaaatgtatttcaaatttaatacaatcgaattaaattgtatttgtattatgataaaagtatatatttaaattgtatcgcaaaatctaatttgtaaaattgaaatttggtttaagaaaatactaaattaaaaatatgaaaaagtgtatgagttactatttaaaattcaaatatcaattataaagtggaacgtatagaattaaaatgtagtttattatgctgaaatagataattaaaatgtataataaaatcaaatgtgtatgattaaaatttgtttaatacaaaattattaattaaatattaaaaatgtatggataactatttactatttaaattttaaatattagcgataaaaaattaaatttatattttacacttgattatttagctgggttttatttagttattcataattatatattttattaaatagttttgtgttaatgatattttcgctttagccacaaccaaaaaaaaagaaagacggttgctcaagtaaataaacgtcgtaatcgccgattcaattcaattcaattcctagggtcaccatcgctctatctcattctcgataagaagacattaggtatattatttc

SEQ ID NO: 23898 - DNA, 710 bp, Arabidopsis thaliana landsberg
  unsure (1)..(710): unsure at all n locations
ggctcacttgtctcaggtggtagggaggaaggtcagctgatttcagtgttacaagcaatctcagttctagttccggaaacacacggttcacgtcatctcacaaccaatacaatgnnnnnnnnnnnnnnnnnnnnnnnnnnnnnnnagattcaagggggaagagtgatcttgaattcttcgtgtgttaacaattgggaagatgcaatggagtgggaactgaacttacttaagtctgtcaagttattgggatctgatatctgcaatcagatcattgatgaagtcagtcttacaatccgtcttagacatctgctgttggctcagggctatattcggatggaagacgagccaaagattgatacacatcttgctcgatgtgaatcgatcaggtttcttctaggatgtgcatgtgcagcacagttctatgtttatcagatggtactcaagaaagggatcttgagtagtgaacctcagagggagtggtttgagagtcatccaagagcattcagtgtttcgggacatccatactcggctaatagattgaaaacaactttctactgcttaaagcagcttccggagatatactatgagcgtttgcccatgtttcttgaagaaagaggttatctccaaagtggtcgtgacaagaggttgtttgtttggtcagacaacaggggagtgttgttggtacaactgtatggagaaaatgtattgta

SEQ ID NO: 23899 - DNA, 1041 bp, Arabidopsis thaliana landsberg
tttgtcgttaacattttcctgtaagaaaaaaaataatatatatatatatatacttttttcatttcttgcttttaagtaatatattaataataataatatgaataaatgttttttgcactttcgaataattgagtctgttaaaataataacggttatttttttacattcgtgtcttttcatcgtaaataattatgtctgctaaaatattgacagttgcttttttacatttgtgttttttcatcgtaaatagttgtgtctgttaaaagtgacaattacttttttacatttgtgtcttttcatcttaaacaattgtgtctcttaaaatattgacgatttatttttacattcgtgcatttttatcgtaacttttggttaacattgacggttcttttttccgttaatgtctttttaaagcaacttctcgtaaaactgtcttttcatcataaaaagttgtgtcaattaaaatattgacggttactttgttgcattcgtgtctttttagcgtaacttttggttaacattgacggttatttttctgttagtttctttttatcgcaacttctcataaaactgtattttaatcgtaaacagttatgtcctttaaaatattgacggttaccttttaacatttgtgtctttcatcgtaaatagttgtgtctgttaaaatattaacggttattcttttatattcgtgtctttttatcgtaactattggttaacattgacagttactttttctgttagtatttttttatcaaaacttctcgtaaaactgtattttttatcgtaagcagttgtgtctgttaaaatattgatgggttactttttgacattcatgtctttttattgtaactttttgatatatggtttttttccattagtgtctttttattgcaattttctgtaaaaatatttaaagttattgttttgttgttgtgtctctttattgcaattttccgttataatattgacagttatttttttcgtttgtgtctgttcattgtatatttccttatgaatagttttctacttaaatatttg

SEQ ID NO: 23900 - DNA, 1021 bp, Arabidopsis thaliana landsberg
cctccaagaaagacccaaggtaattaggcatatgcagcttatatttctctatagtttcactaattacaataaaatatttagtattcatccatctcgttttgtatattgcagaagcgaagcgtccattgttatgggacattgcgagttgcccgagtccagatgttatccaattaggtgctattcatgcacgctttatgattctcttcgttttcatggttcacactctattattgcttatggtgatgcgaaaaggcttttagatgatgcaagacctaacataattgagttcaatcaagtacctttaggtaaattttattccacactctcttgatcgttctagtactttgtgtcttgaatcttaactctgtttatacgtatatactagcaagttgtccacaatgagtgaattatatatattcagttttatttttgaatatggaatgatatttacataaaattatatatataatttatctataattgttaatataacgctcgaaaataattaaaaatattaattttgaagtttacaaattatgatgtgtttaaaaaagacactttagttgcgcaaaagtctgcaatgcactaaaattgtttttattttatttttgttaaaatggtttgttttactctataaaaaacttaaaattttcagtattactttttattttaattttgttaaaatgatttttcctccaaagttgtgtatatatatttcttatagtgtaatttcttctgtttattattttaaccgagctaacattagttgatgcattgcattgacaaaaaaaatatagaagagaagatgaaaaccttcatgaaatttgagaatttgcaatatcatactttattaaaagagttttttggttattttttttatttttttttatttcaactttttctaatcgactaaccaaatggggacgtggtagtaaaagagatatgatatggagagtctctttcatttgatacaaaacacatctgtgtaaacaacttaaaccgagtttatcttttacttatg

SEQ ID NO: 23901 - DNA, 495 bp, Arabidopsis thaliana landsberg
  unsure (1)..(495): unsure at all n locations
cagcgggtccacgtttgtcggcaacgcaatatacgtatccataatcgccggcgctttgccttctctgatcacgggagccgttcatggcaacaatctgcggcggatcacagtccctatcataacgtttcctaccggttaaaatctctaacagcacaactccaaagtcataaacgtctcttttgatgtccaaattcttctcgttcgacgatgtcacgagcccgaaatccgcatctctcgccacccattccgagtccaatagtacattcgaagacttcacatcgccatgaatgattctcggctcagcttcattgtgaagatacttaagaccctttgcgggttgcatagcgattatgatccttaagctcnnnnnnnnnnnnnnnnnnnnnnnnnnnnnnngatcgtgaagcgtaccgcgaggcatgtactcagaaacaagaagcctctatccatttcggtggagcaaccaaggagattcacagtgctgcaatgcctaat

SEQ ID NO: 23902 - DNA, 793 bp, Arabidopsis thaliana landsberg
cccccccccccccggggccctttcaatgggtgttaccaagcgccctactccaatggcttcttctataagctttcttgaagcttccgtagccatcttttgctttctcatccttcattacttgttcaaaacaacaacttataatggccggttccctagaaactggccggttctcgggatgctcccctgtctgctcgtggtgctccacaggatctatgactatatcgttgagattctcgaaatctctgatttgacattttcattcaagggaccgaggttcgccggaatggataccttgctcacggttgatccagctaacattcatcatatgatgaactcaaacttctcaaattacatcaaaggatctgatttcaaagaagtttttgatgtcttcggagacggaattatcaccacggactctgagctatggaagaatctaaggaagtcttatcaagaaatgctccatcatcaagcgtttcaaagcttttcattgagtaccacaagaagtaaactcaaggacgggcttgttcctcttcttaatcattttgcagaggaaggaacaactgtggatttgcaagatgtgcttgggaggttcactttcgatacaatcttaatccttataaccggttctgatcctagatctctctccattgaaatgcatgaggatgaattagctaaagctctcgacgttgttggagaagggattttctttaggcatgttaaaccaaagttcttgtggaagctgcaaaactggatgggatttggacacgagaagaagatgattgaagctaatgca

SEQ ID NO: 23903 - DNA, 412 bp, Arabidopsis thaliana landsberg
tactttagtgttaaaaaaaattgcgatagtaatacgaatgagcagaaaaacattaaaaatgaaaacgacaagaaatatgtaaaatgggcctaacttcctaggcctgaaaacgaaaaggccgtaaggtaattagtaagcccacattagaagacaatttgtatggtaaataattaactattcattggaaaacaaataaccacttgcactataagcgagttatcaccacgcgccacaaatctgtaggtctgcgcggaaattaagcgcgtctgcctgattagccatttttggatatttgaggatatttgaaattagccatttttggatatttgaggatatttgaaattagccaattaaccccttttgaaattagccatttttggatatttgaggaaattaagcgcgtctgcctgat

SEQ ID NO: 23904 - DNA, 674 bp, Arabidopsis thaliana landsberg
ctctccgcgccgtggtttggcttctcttttgtgatattaatgaactgaaagagacattattcgactattcgagaatgaacatgttatctttacaatatttttttgtctgtctgcgtgaaaagcaaattcctatgttcactcgttagctttttttcggatttgatttcaaccaagaaaaaagaacattatatgaataatattataaaatgacattagaaaaaatgttattcaatcaaacaacaagtgtacacgataatttttctataacaccaaacttattgatttcaaataagagtttagatcagcattagcacagaagacagaaccattgaaaacttgttacataataaaactgaaggatggtatggggtggaattgaagcagtagaacctagagttttaccaaggaaagtgttgctttgggagagaagtcttttgaatcttaaaaatatattgtaattatttccttaattaactctcacaaattgactttttttctgaaaagaaatatacaaaccatttatattgataaacttataaacaaacaaacaagatttgattcgtaacataatatacgaatctgtgactaaaaagatatctaattatagtagtcattttcacgtagagatgtgtgtacttgggactttatcaatcgtgttcgactgtttggtcatg

SEQ ID NO: 23905 - DNA, 658 bp, Arabidopsis thaliana landsberg
tccgaacaagttgttgaagaagcttaagaagaagactggcaaaagagtgaagattgtagttaaggaagagaaaggtgaagattctagtaaggagaacgaaaatgttctcgagattgatatggaatcgatttgtttaggggatcagtcgatgttcgggttttgtgattgggagatggagaaatttatggtgtttagtgatgaaaacgtcaaagccatttgttctatttcttagcctagttgaaacgagatataagcaatacacacaaaatcattcttgaatgtgaatgaatttattcaagatgttagataactataatatatccttcttctaagcgggttctctcgatataggttttttgtggaaagagcactctcatggagatcccgttactcccaaaacaatgcttctctaggtgttcccattaagttaagtgcagtggctgcaatgtgagacgctgtgaggccagcttcagctagttgatccattggtgatccatgttcgatatacctgtcaggtagtaccattggtctccacttttgtcaaaatgaaagaacattttaagacaggtaccaaatggtatacaaatgaatatttaagaatgtgtaaaaaattgttaatgtaccttgagcttttcatcaagaaggccatcaagtgcat

SEQ ID NO: 23906 - DNA, 1155 bp, Arabidopsis thaliana landsberg
gctacgattccatttgggtagaagtggatcggttaaccaagtcagcccatttcatacccgtcaagaccaactatagcagtgcagtattggcagaattgtacatgtctcggatcgtttgtcttcacgatgtgccaaagaagatagtgtcagacagaggaacgcagttcacctctcatttctggcaacagttgcatgaagccttgggtacacacctgaatttcagttccgcctatcatccgcagacagatggtcagaccgaaaggaccaatcaaatccttgaagacatgttgagagcctgtgcgttgcaagatcagtccggatgggacaagaagttgccttttgcagaattctcctataacaatagttaccaggccagcttgaagatgtcaccattttaggcgttctatgggagaagttgtagaactccgttgcaatgggatcatcatggagaaaggcaagtgtttgggccagatattttgctcgaagctgaagagaacatcaagatggttcgggagaatctaaagatagcgcaatcaaggcagcgaagctatgcagacagaagaaggagagagctgagtttcaaagtcagagattttgtctacctgaaagtatcgcctatcagaggagtcagaagttttggagtcaaaggcaagctagcaccccgctatgttggtccgtatcaaattcttgcaaggcatggagaagtggcctatcagctcagtttgcccgagagtttgtatgttgtgcatgatgtctttcatgtgtctcagtagaagaagtgcttgcgtgtgccagaagagcagttgccagtggaagctcttgaagtccagaggacattgacctacgttgagaagccagtgcagatcctcgaggttgcagacagagtcacccgaaggaagaccatcagaatgtgcaaagttagatggaatcaccattcagaagaggaagcaacctgggagcgtgaagatgatctgatgactaaataccctgagctctttgctagccaaccttgaatctcgagggcgagattcttttaagggggataggtttgtaacgccctgaatttgggggtagaatttttttccttcttttctcttaccaaattcaggcgttacccttttcttttctcgttccctcgctaaaccttgatctttc

SEQ ID NO: 23907 - DNA, 568 bp, Arabidopsis thaliana landsberg
aattaattgattataacattaaacttaagaattactttatctaagaactaatctaagaaactatcaataatgatggtctcagtggacgttttacattcatttgatataatgattctaagtttatttaactactacctcttcttcaatttaaaacgttaattttcatcagcgtcgatcaagagtacacgataccaattttaaattgctgattcatatatatggaatggagaaggagaagtaacaaaattgttgacttctacttgaatactatccaacatccatattaaattatatatatacatggataattctttcaataacatataaatttaaaagaagtctacttagtcaatgtgtatatatataaaagtatattgagatagctgtcattatgctcagattcgtcatgccctccatcaccactggattatttgaatgtttacaacattttaaatatcatagatattcaaagctcacaggaccggcacggtctcgatataacaagatgtaaattagaccgaaaattctatatcttcgacctcaaatcatatgttttaaacgcaatgtc

SEQ ID NO: 23908 - DNA, 538 bp, Arabidopsis thaliana landsberg
cccttatgtcacgcaaaatacaatagattattttctccttatctcacctacaatattcactaaatcttaatttcaaccaaaatttgaactatttgaattatttgtattaaatttcggcaataaattaaaacaaacattgtgaaacaaaccaaaatacatttacgatcccgtaaaatgagcaaacccaattatatgtgcacctaaaaacatttcttatcttggtttgaatattctatggaattaaaagtccataactttttcggcataaaatcacaatcccgactaattccacaactaatatttaaacttatataaaaaaaaatagatcatgagacgaaaaatataacggaacgagtttggattgatataaaatataacaggacgggtttggattgatataacacatgttaaatatttattttattattttatcatcaccaattttttagttatattattaatataaaattatataactttaatactaaactaaaaccattaaaattaatattattaaatgtatgaaataaatatttac

SEQ ID NO: 23909 - DNA, 924 bp, Arabidopsis thaliana landsberg
  unsure (1)..(924): unsure at all n locations
tcgatccatgcttcatcgtcaatttctgtaaatttcataagaccgatcggtcatgttcctttgacttctcttctccacgtctgtaagaacccaaaacgatcattgactcctcttatcactccaaacctctaaacacttgaaaataaattcagtaatacgaaaacacagaaaaaccatcttatttttattgaaaagcctaaaaaccgctttatattacatttgtaaacaacattcttcaggtttgagtcctaattaattttcggatgacaaaaaaaaaagactcaagatataaatataaaaaaaagttgaaaaccgataaaaacatgatatatcacttggcccaaattttgttatttgcaaatgtgtaaatatttagtgtattttaaaatgatatgatcaaaactataggtccataaattatatatctcaattttcctcctttttatcttcttactttgatctcgcttgaagacgtgttgataactttgcatgtactgaagaatgaagatgatcacaaacaaaatttacccaataagaagttactcatgaacaagattcaaaacacaggtgaattagtagtaatgatgatcaaaccaactacccatgggcataaatgtgtcttaaacacttgttggatcaaaaagaaaaacacttgttggatcaaagaagaaccacctaatttagatcgtcaaatcaccaccaaaaagcgatacatcagatcaagaacgaggagtaattatcctatctttcttactcacagcataattctagttagctatcactagaattacaagaactctntcagctaccattattaaaaaagaatacgattattattaattatagntagctattacgtatctatacataagtttttcaagactaaataatttcaatcaatatttatagaaaaataaacttacg

SEQ ID NO: 23910 - DNA, 1634 bp, Arabidopsis thaliana landsberg
caaagcgtgtattacacataactttttcaactttacattcaaattatacacttaactactttaccaaaatctgtaaaacacggatatatgacatacaatgatacaaatataacggataaatctgcattaaattctttgcttggactttggattttttttcatgccccatcgaatgaattcaagatccagatttttccttttaacaactgaactcacttatttagaagacgatacaatgtaatgatcatttaaatccagatttaactttcaattgtcaaatccattactaaataaagaaaggaaaacaatcatctcacatctcttcaaagagacaccaatctccacaccaccaatctcatccctcctcgctgacatagaaaagctattgttcttgtaaagagacataacatcaggattaactggtcttccccacccaaaatctgtcccatatatcccaaactggttcgacccggtaacagtcaatacttttgtaccaaccttcatgtttttagttccttcctcgtacacctcccaaactgactcaagacttcgtgaacccaaacctttgaccgaatcacttaaaatctcaacaccgttgacgaatccatcttctcccaaaaaggtcgtcgcttcatatccattaaaatcaattggtaaaacacaattcccaaaatatgttaaaggaaccggtggatctaaccggtttctaaaatcagcagcataaataaaccgaatcggtctatccacactgcccccatgcgccttaatcacacaagtcaacacataagcgtacgtgacgaatgatcatatctcttgtgtcctttttgtgggacaactaatctgcaaaaccattttagagttttcatatcccctttgaattaataatttgtgttaagacgaatttatccctataatttattttgaatgaataattagaataattaatagaaaacattttgaaaaaaaaaaaaacggaaaaagaaaaaaaaaagctcgagcacgagctcgacttcttcttcgggattcttcctccggcgagctccggcaagctccgacgagccgcattgtcgtttttctcctcctgcaagctgcatcaatctactaagtctaggtatgaagagagcttcaaaaggtttgaattacatattttgaggatttttagattcaatctaattagatttgggttattgtgttttagtacctacattagaagtttaaatatagttttagggtcgatttggcctataactgggtcagaaattgattttgaatgttgattcgtaatgaattgaactcgaaaccaaacgttgttcttgtcgtgaaaataatactggtcgaactagttacagttttaacgaaacaattgatttttatgtagatggtatgttttaatagcaccagtattacttagaacgtagtatttcatatatgtaatagtattactaacacatagtatttcgaaatgagtactagtattacttaaaatgtagtagaatcggtaatactagtaatattgactgagtatgtgtattgttttggcaggttacaatgaaagagaacgtgatcatatattttaaattcgaaggttgcatgtataatgtgatgatgaagacattaggggatcctctagagtc

SEQ ID NO: 23911 - DNA, 398 bp, Arabidopsis thaliana landsberg
aaattaaacataaaaaaaagcttgtaaactctttcttgtcgctctgcaatgcttccaagattcctgagaaagccgatcattcggttggggaagacaccatcttcaccaaatctaaaaaaaccacatcttggttgttgaaaccaatcatacacttcatcgcccaaagaagagcttcaacctctgtatgtaatggagatagacttcttcggaggttcacaggtctcatggttggcgtctctccatttgatgacgtacaatactatcctaatccagaaaacttattgctttctttccattatccattcacaaagcaacgatatccagaataattgttatcatgtgaaaaatctcttactcgattccgagtttccaaattcaaagaagcatgggtttccagt

SEQ ID NO: 23912 - DNA, 539 bp, Arabidopsis thaliana landsberg
gccttgctcggtgtgcattcaccatggtcaagtttgtgacttatcacagacttttcacatcacggaggggggctacattccggcagcacttccccttcattagatcccacacgagagaagcaatcgccatcgtgttagatctccatcatcgaccatctttccttcacaagagagaagcgaccgccagcttgtgaagccaccatctctatcagatacaaagctcaccaccgagtcttgtatcatcttggtatctgagcgcagttgcgcttcctttgccaggtttcatcgttttttttttgtctaccttactttctgaatcagtttctgcattagtctagtttatgttttatttaaattaaaaaaaatatatatatttcagcttcattttatttcgtgttaagtatttgtttctgagtttcgtaatattaatttaaaaaaatatatatatattattgtttactctggactacatcagcaagtgtgtcagaaagtgattcaacaagttctaggtttcttggttttgatctttctttctattg

SEQ ID NO: 23913 - DNA, 994 bp, Arabidopsis thaliana landsberg
ccatggacacttaccggatatgagttgtacaatgcagagactgattccgagctggaggctgagttgagaggacatgggaaaagccattggcttcgtttgaccggaaagaatttatgagtagtaagtagcatatctaaagtaaacgccatgcaaacaaagaaaacaatgatgaagatatagagagcatcccacattggggggcttttagcttatgttgggggagaataattttataatgtattttgaagataagagttttgataagagttttttttttttaagagtgcattttggctcttatataagagcaaaatcttaggggtgggcattttaaccaaaccgaaccaaaccgacccaacccaaccgacccaaaccaaacccaagcttagactcaaaacttttatatttcatttgttcttccgtttatacggttaaatgatttttttgaaccgaactaaatctcaatcgaactaaaaccaaaccaaaccaaactaaacctgacccaaacacaaaccaaaccaaattaacttcggttgagtatagttagaattttacaaaacccaaataaatcgaaccgaaccgaacccaaaccgaacccgaaattaaaccgaaacgcccatttattatgtcaaatcctaaatctaaaccccaatccaaagagatttgcaatgtggtcaatcctgtggtccaaattgatgataaatagccgaatccacgttagagaaatcatggactatttagttctaatcatattattcatactaagaaagaatgtggttgaatcaatgggaagcttgatcaatgtgaggtcattactccattgtttggccttttggtggagacaacatcagtaaatgcgtcgacaagttggccagcaaggctacctggatcatcctctaaagtctgcacaaatgtgctcacaacagattgctcctgagcggatgagctcatgctgaaccatgtcaagaaccctgaccctgaatgttgttttaat

SEQ ID NO: 23914 - DNA, 829 bp, Arabidopsis thaliana landsberg
tcatgcaatgagtacaagagattgcatccaactcctacagaaattgatttgatatttaaagatttggcaaatcagaaggtgtggcgtcaatgtggaaagtgccaatacatgaccgaactttcagaaggatgcatcaaagtaatttgcaggtaacttatagaattacacattctatgctattataattcttttaagattttgattatgtttttgcatgcgtaactacttcacatttgattttcttggttgctggataggtgtggctattcgttttgctacacatgcggagcagaatggaagcaaggaggttgctctcatcgagcaatgatgcatacaacgtatactattttagtttttgttctcattttaaataattgttttcttcttgttagaataataaaataacctgtttgttggttgttcatgttgctaaattttctactttgcttaatacatatgacacacaattccaaatgaaaaaaaaccccaccttttttagtttttttcttcaacgattctatatgaaagcgttatgtagtaaattatcaagtcgtcaaagtaacttgttatttttcttctccttttttttatttgtcgtttggaatttatatgagatttgtagcatcataaatgcagaaattaatagcaaagtaatgagaatctgtagataatagatgtaaatcttcgaaaaagaagaaaaccaatcaatactaaccaaaaacgggtgcaaatattactaatttcggagaatatattatcagcttttcaagtacggctacaatattctctcctttttcctatatatattcactcattaacattcccataa

SEQ ID NO: 23915 - DNA, 484 bp, Arabidopsis thaliana landsberg
agtgcaataaagataaaatttaattaaggatatttatttattataatatattcttagaatagatggtgtagggactaaaaactcaatagtatatacttttggacaaaaattttgccgggggatattttgtgcaataactcaattgtaattattcacaaattggatgttaagaaagcaaagtatttatgtaagtgtttaatgttgattgacgatttgtaagttttgtactttaaaatattttgtttacagattttttgtagggattaaaaactaaatagtatttacataaaggatttttacaaaagcttcaccaaaaatgtataagtagattaagattacctcaattctctaacccaaaggcatgattctctgtgttagacacatccccaccgacgaccgttgtatcaaactctgaaaactctttctcatgacttgcagagcttatcaacttcaaattaacgcatactcctaatttccgaaagca

SEQ ID NO: 23916 - DNA, 566 bp, Arabidopsis thaliana landsberg
gtatcattattacatagcagaagtcttacaaaaaataaattataataataaaatgaactaaatattattccttggcgccatcaagctgattgggagacgccacctagatcaactcatactcctcattatagggcggctcctcttggaccacctgctcttcacctgtggggggtttatatatcgtaagagtgagctcacaaaggatcatagttcaacaagttgtggggaataatgtgcatgaactcaccaaaggtgggagctcatgtgaagtgtaaggctgatcaacaaataatgattaaagctgagcattacttttaataagctggtcaaattttattagcagttactaaatgtaagtatataccaaaccagagtattaatagatcaaattaataataaaccacaatgcgatgtaaatgacaaattgaatttaattccataaattactcatatgagtgtccgagccgctcatgaccgtgagcacaactgatataccagttttacactctgcagatgttgcgcatctttcccacaagttatgttcccatctgccaagggatcgtgac

SEQ ID NO: 23917 - DNA, 660 bp, Arabidopsis thaliana landsberg
cggaccgtggtcttgcagaaaataggcttgagtagccaaggttaataagcttaagtagccaaagttaatataggcttgtgaagccataaagtaaaatactaaaactaaaaatgaaagtaaaatatattgttgtgagcaagacgcatgtttgtttgtttgattgttagacattctgaatctatgctaagtaatggttattgattatatttgaattttttttattgtatgtctagtgggcagagttgatctcctcactgagtaaacttgttttactcacccctttttccctaggttagtaagtctcaaaagttgagattgaagtttgttcgttggtgaattttaaataaagaaaagttttggcaagaccgaatgaataacatgctaatttggcctgtatagcaggacgggtgttataataggtttttcaaccatttttggttacatgttttgtttgagctactgcaaatgattacaaagtgtgaggttaaaaggagctaacaaatgatttaatggctttgtttcacttacttcacttttagatacacacatttcatttgtttagaccaaaaaaaaaaaaaactataaataaggacagagttttatacaagttcaggtcaacggtgtcgtgattttaatgttatgaaacactttttaaagaat

SEQ ID NO: 23918 - DNA, 479 bp, Arabidopsis thaliana landsberg
  unsure (1)..(479): unsure at all n locations
ttatgagaatggtcaaaagtatgaaccgcattttgacttttttcacgaccaggctaatctagagctcggggggcatcggattgccacagtattgatgtacttgtccaatgttgaaaagggaggagaaacagtgtttcccatgtggaaggtaaagacatatattacttctggttccttaaattttcatctaatatttcgatttcgtttcctgagtagcctcatttcagtttgatcacacattcttgtagggtaaagcaactcagttgaaagacgatagctggaccgaatgtgcaaaacaaggctatgcaggtaagatcactgtatatagcttgcttgatatagaatactgtatcctgaacatgcgtttggcttaattgtgaaagctcaacacaaatggggattgtagtagtttgattaaatgataatgaaaggtataactatttttccaaatgggatatngctctatctgatttatgtat

SEQ ID NO: 23919 - DNA, 860 bp, Arabidopsis thaliana landsberg
atccaaatataaacctaaaaatattagttatatatatatttgtaatacctcaaacagcgaaaattaaaattataaatccgaatatactagatatttttagtaattcatatacatttggatatatttgggataaaaataaccaatgttatagttttcttttagataatttaagtattttggttacatttggttatatttggataaaagtaaccaatatatttacgggtaatcgggtatttcggatagatttgggtatatatgagaaaaaacccgaacctaacccaaacctgaaaatattttggatatttttggttgtttttatatttttactaaaataaccgaaccgatccgaactcgaaccgaaaccgaaccaaatttttagaatacccgaatgattctcaatctcctacccgaatagacccgatatccggaaaaaaagaaccgaacccaaacggatacccgaatgcccacgcctcctaactataaacatggatttatatgcactccttcttgggttgttttctcttcatttactaaaatcagttgaccaataataagatataaaaaagtacccaagtctacgtagttgttacggcccattagagtaatgaagagacaaaaagcaagcaacacaaaaaacgacccaacttgagcaccgtcacaaaacggcgtcgttccaaaggatggtcaacaatggtgggagaatcggaacctctgcacaacaaagagactttcctcgagatttcttatattcgcctgctaaacgctgtcgtattagtgggtagatgaaaaagacagaaagggcaaatgagccgtgtcttccataattctcaacaagataagataaggtatggctcgca

SEQ ID NO: 23920 - DNA, 512 bp, Arabidopsis thaliana landsberg
  unsure (1)..(512): unsure at all n locations
acaccgccggagccatccgccgccaccgtaacatgaggcgtttttttcttctcttgaagtaaccgcctcactcctggggtaagcgaatttggaaacgaattcgagttaagtagccgtctcccctgaaccgggatcctagacttgcttggttttttgagaacctgcgcgacgatggctaagctgttgcttgtgaactctgtggaattaaccatggcggatttaagcttctgtgggattggtgagttgtagttatcttcatcaagcgtgtcgccacacgtcccgatatctgttacggcggagctaagccacgttatgagatcgccgatcgttgacgaattcaaattcttcttcccgccactaattacgtcatccaaggaggaaatagtatcgntaactgaatcaaccgcgaggtcgaacacatctgcgcaaacactaagcgccgatttgagtccctcatcattagtctctttcgcgagcttctttggtaaaccaacgatggcattgagttcgtc

SEQ ID NO: 23921 - DNA, 872 bp, Arabidopsis thaliana landsberg
atacttctttaactctacattattacccaatttttatctatttatattgtgatattttcctttaaaagtatattcaagataaaattttatgtaaaattgttagcaatatttttaaacccgacccgcataatgaaccagactactttctgggtcactaggtcatcgggtcaactaattaaaatcatatatatgaaagttggtcaactctttccatatgagtgacacatcatcacactagtgaatgtcatatgtcattctaaattaatattattaaaaaagaataaaacttagtgataaaaaattaaaagtttcacattgcattgaatcatccattaataatctcacacttaactatcttcatttaaaagaaaaaaatacaaaaaaatcattttaatgtatcaaacactactttcattttacttttcttattatgctatttttttaatagtcatcatttgataatgactagaaattttcgtgtattacaacttaactgtttgttatttaaccttccttagtttattaattttaacttaatcttttctttttattatatttttttgtttacatgatatggtctttttgtgtgtttatgataaattggtaacattaatactgacatgcatcttttgttaaatagtgatcttttgagatgttagatataccaaaaagttcaatatacgaccttttctctaatatggatatatgcaaatgcaaagagaaaaacctaaaagtgttgactcaaaatactatttaatttctgatttttttttttttttcatgtgaaaacttttaccacgcccatgagtagtttatatatttgttattcaaataatgtcaatccaatatttagccatgagcctatcatgatg

SEQ ID NO: 23922 - DNA, 701 bp, Arabidopsis thaliana landsberg
tacatggtatcttcttctccgccaaatggtacctgccacaaaccacgtttcaataacattttgactgccagattcgtgggtatttgaagagaaacttacacgctatctttttctaggccggtcgcgacttgattaaggaaatctaaagtaaacatgtgtaagcacacctaagaaatatgtaaaacagaactttggattagtaaggaaattcataagaataagaagaagaagaagaagaagaagaagaaaaaaggaatttacgttactccagcaatattgaagacgtcctgttcgttgattaatagcagaagccatagactgatcaagctcactatactcaactactgtcaacggtcctcctttacctcttctaacaaacactcctacctgttcttgaggatatgcctgttttttttccgtacagaaatataaagaagatgaagtcttaatcttaaaatctttctagaccagttagattgtatgatcttatataccttccgcacaacttttgcagccgaagcagcccctttatcgatgaagtatccaagaaaagtaggatcagctactcgaacctgcattttcaagattccatattataacaacgttgaggaaacaaacacatgtcaagactcaagattacactagagagctaaccaggacattgtcaacgccatagcaatcgacgtatttaatccccttag

SEQ ID NO: 23923 - DNA, 760 bp, Arabidopsis thaliana landsberg
aaattttaaaacattttgctttgattctacttattggtatatatttttaacatatcaatccaatgccactcctaaattatcatatacttttcgctatatgttatgactcacttgttatgaaaatatggattttcaccaattttagttatttattaactagaagttttagctcttgtgcaattttaaatgatatgcttttaagattggtctacttataatagttgtatttttaatataaatcttataacaaaactatatttgatattcaaaaattatttatttgctctttgtgaacttcatataagcctagagaaactttgaaaacctttcaacaaattgtatgtcgaataaagttttacaaatatttattagccattttgattaagactattgtgagcaaaaaattatttttttattaaataaataatatgtttaagatacaatgtgaggtaggcttcttatattttaaaacttaaatacatttatactgaaaaatagttagaaattttaatttatttggcttaagaacataaatatgtcaatttggcttaagaacttgggtgcgacaaccaaggaagatactcttgggtggcatttcacaaaatctggaaaatacacggttaaattatggataccatacaatgcgtttaggtactttggatgttaattcaggttttataggccccgacatcaaggaactaaaagtatactcatggaaagtgcaatgtccgcttaacctacgtgactttttatggcaaat

SEQ ID NO: 23924 - DNA, 1311 bp, Arabidopsis thaliana landsberg
  unsure (1)..(1311): unsure at all n locations
ctgtagctcagccgatgttcgattaggtagaatgagacttaaacgtctgtcgaatctttagctagaactgtaccatatgatgctaacccaagctgctcttgcaacgccgtctccattaattctagctctccattgacaaaggtcccatttctctctcttgcaaatagtgcactggctaaagacctatgaaaatatctaaccaccggactctttatttcgttgctctttgtcctagaggacgaaaacccatgtttagacccaagcgtggcccagaatgactgaagctctctcttatcaaaacaatgactcgtgccttttccgcttggatatccatacatcagctcgagatgctcgattggaagtcgatactctacgtcatacacacagaactccaagtatcccaaacttccgtctggcctgatttcatcgtcctctgactctccatataagaacaattccacggatgaaagaaactgggtggtctcttcctcatacccctccattggccgaaacatgtgaatattcaggctgcattgcttaaacatgtagtctacatcatcatagatgtcgaatctttccatggtctcaggatgagggcatcgagttcctaaacactcgttgcnnnnnnnnnnnnnnnnntactcgtttcgaattgcgcaattctcttattctaaatcatcaccaccttctttctctatttgatcagcttcccccgatgaagccatttcttcttcagaatcttcatctaccagttccaacctcctccccacgggcttctttcctctagtaatggctgccttattcctcgagaactcccttgctgaggccttactcgaccttcgggatcaggtgcttttggcaggagagttgaaagtttcttcttctcgcatcgcttcctcttcttggcttgattcgctgtgatcgatcttgaaacttgcttgttctctcctgctcgaccccatgggtgatggttcagagagtccttgagctgctgcatgcgaagaaggtgttggacacctctttgatggggagagagctctgtttcggatccttgacaagagcgtgcgcctatttgtcattgagaacaagaatgggagagactcaaaacccaaatttagtaggttaggaaatcgaatgatggagaaatcaaatgaattttgcaaagtttttgataagaaggggaagtgaaggaaagagagaccgttatcagaattcgagaatgttttggtatgcgagaagcacacatcaggttgttgacttcgggaattgcgatagggaggggccccgcagtcattatgatgaaaccacaag

SEQ ID NO: 23925 - DNA, 576 bp, Arabidopsis thaliana landsberg
  unsure (1)..(576): unsure at all n locations
ttggattgttgcaaggaagagaatacagtgctaataaatagaccattgtnnnnnnnnnnnnnnnnnnnaaccccataaatatcagcaatgatttccaatatcttttatatttccaatgccggcgggtgtatcttcgaatatatcttcagcatttaatgttgtcgcagctacactataaacagttatcgttaattcggttttgtaggtgtattttcggcataaattatgtcgcagaagagagaggactaataactaagttatcatgcctagtttcttaattttcagatcatatgagcatattaatatagcccttttgaaaacagccatacatactaatttgagaggatttacaataaatcataacgactttcttaaattcacccaaattcttcaaaatcatataaaactcaaaataactcaaatcactcaaaataaaatattgaatacaccccttaatagtgtattagatggtttcaagcaattatttgtaatgataattttcacttatttttaataaaatggttataattgactttcatttctttattaagggtttcaacttataaattaaatagg

SEQ ID NO: 23926 - DNA, 442 bp, Arabidopsis thaliana landsberg
attaagcacatgcaacgctgagaccaagcagaaccaacctctcgaacaaactttttttttttttcgctttttcacatatctaccacattattctaagattagaaaactatagtatatataactaagaaaatataaagacagttttaagagactacctcgttatgaaccattgcaggcagttgaagctcatctcctattagaacagcatgacgaagtccagaaagttgcaaagcagcaactgattcacattctttaagctgagccgtctaatcaaccacaagaagggcgaacgatcccgtccttatcggattgatattcgcagcacctgaggctgtacagaagattatgtccgcattctgttgacaaaacggttttggaatattgttttccagcatgtttgaaaccttaaaaacgttaggaagtaaacgtagaatccgaaggc

SEQ ID NO: 23927 - DNA, 1014 bp, Arabidopsis thaliana landsberg
ctaatactgcgaggggctactgttgggggccttagtcctccaaaggtcctcaaaaacgtaatttaacaatgacttccaagcatgtcttatggataggtaccttcggacttagattaaaagcatacacgatgagaagagcatgatcatgacgaaggttgccgctgctccgaagctacgcgcaagggagcttcggctcaatcgcgaaaaaaggaaccgacttaaaggggaaaagcctatctagtcctcatatatttttctataagtaaatagtaaatgtaaagggcataactgtaattcctcacaggctccgtcctgtgcctataaatagatgaacactatcctcgtactgttcacgctgacttgtacttgctcatgcgtcacacttgtactttttaccttctcacgagctgaaggtacatctgtaatttgatatcatttctatttttccatcataataaaatggaaatgagtcgacaataatacacaactgtttatgttatcttttatgtttcatatgattccttcttcattattatattttaatgctaatcaaggtatgcccttcataaccttcgtccgaaaatcattatatccttagggaaataatgcttcgaaggacgaaggatattaacatttaacattttgtgttgccttgttcttgattcatagcatttgagaacaagtccccaacagaaagctacttggcgtccattaaatcgacgaaagcaactagatcctgattttgattacgattacgattgacgagtatggatcatgattttatttcatattttatgattttattgcatattttattattttattgtcgatttatgtactaacttgttttttgttaaaatagaatgtcacagaaaatgaagtcttttgctcgtagtttgcttgggacgaggagcagctcgaggagcagctcgaggggtgaggatcagttttcagggcaaggtctactatgacagcggagacgttgcagacattgcgccacagatgtagtagtgt

SEQ ID NO: 23928 - DNA, 1707 bp, Arabidopsis thaliana landsberg
gaaaagtccaataaataaaagactaaagagccttgaatttgatgaaaaaagtttatgagtgtgtcataagtgtttgtttactatcgtgaaagttgttagttttgaaaagtgacgaaataactcaaagagaacttacatatgtattagaaaacatgtgtttttactttttaacaagacaatatatataggccttgtctttcagccgcaaatatttaagaacccaatttttatctcattgtatagagattaattttattttacatctttaaattgacaagatctaattcataactaattcttactatatggaataacgggagttagtggagtcgaactccagtaaaaaagacagagtcaaatggactataccgtatttcatgtatgttagttattaataacactaaaaagcaggtgagatatgatttgataaataagcatcgtcttcaatttctgccttcatatatttaagaaccatttcgtatcatattgtattgagagattcaatgaagcatttataccaagataagaaaaagatatgtaacttgtacgatttagctcgcttggcctccaaaaaggaagaaaagtcagcacaaattatggctcaaataaagattttgtcaactaaataatgcgaataaaagattctctcaagattattaatcatcattgtattaaccaaagggccaaggccatgtgattattatactgtaataatcaaagtagaagactataggcataatgatgaaaatcaaagtgttaagtgataaatcaggttttgagttgtttttgacgacaggtttagttgttttaactattcatttttatttctaatatttttagatactattgcatgttttaatattttcatatcaatatatatatatatagatatatcatatttgatgaaaaaagaaaaaaaaaagatatatcatatttagcgtgaaacactatatattctttactgtcattttatctttttcttatttcaatcgttttgtaacgttgcatttaaggttgaaatggtaacattaggtgataaaaaagaggaaatggtaacaataattatatgtttaagtacaatagaaatgtatgtcagcaacaacctactaccacttaacaaaatcatatatacaagcagagacttagaaacagggaaaacgaaagttacaacgtacgtcgtgtatcataattcaaataattaaaagattagataattttatgaacaattcaaataattctacggctgagtcataatgatgggatcggaatcacatgaaacacaactaatcataaaattagtttaatgaataaaattcttaatgtcttcaacagttgctcaaccattccactacaaatagaggctaaagaactaagtagagtatcactcctctctcaaaaccctaactgtttccaagataatggcaaaaactgaagcgtctagtttggtggggaaacttgagacagaagtggagatcaaagcttcggccaagaagttccatcacatgtttaccgagagaccacaccatgtctccaaagcaactccagataaaattcatggatgtgagctgcacgaaggcgactggggcaaagtcggctctatcatcatctggaaatacgttcatggcaagtaaatcctatatatattttcctttgcataactagtggattcatgttgatccgtaaatctaaacctagggaagtaaaatg

SEQ ID NO: 23929 - DNA, 872 bp, Arabidopsis thaliana landsberg
ctcgatagagaaaaaatggcgtatcctgagagatttctcattgttgatcctagaagtggtttctgggaatcaagctctacattctatagcaagcgccaaccattaagtctcccgccaaatctttcgcttgacgtcaccacattcatctcctctcagccacaccgtggcaaaaccgcctttatcgacgctgccacaggccagtgcttaaccttctccgatctctggagagccgtcgatcgcgtcgccgactgtctatatcatgaagtcggaatacgaagaggcgacgtcgtcctcatcctttctccaaactccatctacattcccgttgtttgcctctccgtcatgtctctcggcgccgttttcaccaccgcaaacactctcaatacttccggtgaaatctccaaacagattgccgacagtaatccaactctcgtcttcactacgcgccagctggcaccaaaactccccgtcgctatctccgtcgttctcaccgacgacgaagtttaccaggagctcactagcgcaatcagagtcgttgggattttaagcgagatggtgaagaaagaaccgagtgggcaacgagtcagggaccgagtcaaccaggacgacacggcgatgatgctttactcgtcgggaaccacgggaccgagcaaaggagtgatctcgtctcaccggaatttaacagctcacgtggctagattcatatcggataatttgaaacgagacgatattttcatctgtaccgtcccgatgttccacacctacggtttattgaccttcgctatgggcaccgtagcattgggtttgacggtggtgatcctccggagaattcagctccacgatatgatggatgcggtggagaaacaccgagc

SEQ ID NO: 23930 - DNA, 675 bp, Arabidopsis thaliana landsberg
tgggaagagattgattggtcagatggagcatattattgttccttgtgtccaagttatgctattcattcaagatgtgcaacaaggaaagatgtgtgggatggcaaagagcttgatggggtacctgaagaagttgaagatgtcgagccattcaagaggaatgctgacaacacaatcaaacatttcgctcatcaacataacctcatgagcttcagcaaagacagtgaagaaagcaacttctgtggagcatgtgtttgtcccatcggttcttgcacgttctacaagtgttcagaatcagattgcagtttcattctccatgaaacgtgtgctaatcttcgtaagaagaaacgacattttctgagcccacaacctctcactctcgacttcgtaacaaaacgaaaagaagaaaaatgtggagcttgtcatcaaatctgttgccaagggttcatctactctacatatcaaaacgagaattttgacttactatgcagttcgattactgtgccttttatccatggaggccatgatcatcatttactctatatcaaactagaatacggtcaagtgaagacttgcaagaactgtggcatcgatgaagcagaagtcgttctaggttgtatcaaatgcaattattttttggattttcgatgtgccactctaccattaacggtaagtctt

SEQ ID NO: 23931 - DNA, 566 bp, Arabidopsis thaliana landsberg
agagtgttacatgttctcagagagtatcctagatcgatggcctttaaacaagctaatttgacaatgagctcttcaatccactatggcactcattcactatcatgacgaatccaccagatatattacaggcggatgcctgccaaaggtagtcgttgtgatagttttattttgttattcttctcgtaacaaattaagtaattaagattttgttttctttcttacttttgtttcatataggcctttcatatgcttgcatgttggatagaagaccctaagagtgattattttaaaaaacatcttgctcgagttcgcgaatacatatggattggcgaggatggcctgaaaattcaagtgggtgcttttttaattatgactcttacttatatactccgagctcaaaaccaaaatcctccatagcattaaagagctgcgttaacacatgtgcaacttttgtagtcttttggtagccaattatgggatacagccttatcgctacatgcattactagacggaattgatgatcatgatgttgatgatgagattaaaacaacgctcgtttaaggata

SEQ ID NO: 23932 - DNA, 649 bp, Arabidopsis thaliana landsberg
caaaacatatgaactaagatgacaacaaagcaagataacatttgagagcaatatgtaaacacaacagagcaggagctcttttagcttttttttgcacaataaagcaagagaacacaacagatgaactgagatgacaacagaggaagagcacacaagagagcaagcgaacacaaagaacacaattcttaactatgtttcacaatagagcaagacaacacaagagagcaagcatacacaagatagtaagcgaacacatgagagtaagcgaaaacaacagaacataatctaaccaagtgtacacaagatatcaagcgaacacaagagagcaagccaacacaacagagcacaacagtttactacgtttcacaatagagcaagagaacacaacatataaacttagatgacaatagaaaacgagaattaggttgaggaagagaacataccattcagtctttggtcgagtaataggagatagtacggtggtccacatttccctgccaggtaccataagtatgtcattgagagcccaggccaagtcttcttggagcttcgacaacattggaggagctccctcttgaagttgttgccttgagaagatggataactgtagccttagtgtttggatttggagacattggagggactaggt

SEQ ID NO: 23933 - DNA, 581 bp, Arabidopsis thaliana landsberg
  unsure (1)..(581): unsure at all n locations
aacataactgttattttttcgtttttgtttcttattgcaatttttgtaaaattatggacggttatttttcctgtgttatgtctttttgttgcaacttttcgttataatattgacaattatttgttgagttgagtcttttcatcgcgtttttccattaaaatattgacacttacctttttcgttcatatatttttatacttacttttagttacttattgacagttatattttatgtttgtatattttcttcgcttatttccgttaaaacatagatgattattttattcgtatttttttatcgtaattttccgttaatattgatggggttttttttttgactgtatcttttttttattggaattatttataaaaatattgaccgttatcttcccgnctatatatatatatatatatctaattatctatatatatttttttaaataattactaaaatttataatatactatntgttttaaaaaaaatattttttaaccatttttaaaatatcctccccgcgatattgcagggaatctgagtctagtgtttacaaaaatcctaactgactattttttaaaaaaat

SEQ ID NO: 23934 - DNA, 724 bp, Arabidopsis thaliana landsberg
caccaagtagacaaccaggggacgcctccaagctcgacaatgaggagatggccctaatcatcaaaagctttaggcaaattctcaagcaacggaaggggaaggactacaaaccccgttccaagaaggtttgctacaagtgtggtaagcccggtcacttcattgcaaaatgtcctatgtctagtgacagtgacaggggcgacgacaagaagggaagaagaaaggagaagaagaggtattacaagaagaagggcggcgatgcccatgtttgtcgggagtgggactccgacgaaagctcaagcgactcctccgacgacgaggacgccgccaacatcgccgttaccaaaggccttctcttccccaacgtcggccacaagtgtctcatggccaaggacggcaaaaagaagaaggtaaaatgtagagcctccactaaatatgcaacatctagtgatgaggatagctctagtgatgatgaagataatttgcttgctctttttgccaacctaaacatgcaacaaaaagaaaaattaaatgaattgataggtgctattcatgagaaggatgaactcttggatagccaagaggaattccttattaaggaaaacaaaaagcatgttaaagtaaaaaaatgcctatgctcaggaagtagagaaatgtaaaaaattaactagtgagcttagcatttgccatgacactatctataaccttagaaccgaaaatgccaatg

SEQ ID NO: 23935 - DNA, 517 bp, Arabidopsis thaliana landsberg
ggatgtgagctctgtatatctgtaacaggacatcgttctatggaacaacatacgtgttgtcgcattgtaatttattcttcttgatgaaacgaacattatctttgcgtctatatattggataaccttcattgtcaagagacgtgttctcaacatgcttctttggataaaacttggaacatttaccattttcgcatggagaattcaaattcaccaacatacattccgagacaacttgatataactctggatctttttctttatctagaatttcagcaaagataatcttgtcaatttcatcagctgtaggaaacttgtatctaggattcatccaaacgatgatgtgagtatgtggaagacctcttttttgaaattctactgtataaataaatgaacaaacataacaactataagttaatgtaacatgtaaatgaaaatacattaaatatatgatttaaaaatatgaaatcatttggtacctgttttgttttttccatagacatgattctttggtagatca

SEQ ID NO: 23936 - DNA, 580 bp, Arabidopsis thaliana landsberg
tgtgccgagtgttcagcactcggtacaaggggctctttgccgagagcctaactttaccgagtgcggctctcggcaaagccgtctttgccgagtgcccgacaaaaggcactcgcaaaaaatacaacactcggcaaagcttggattccggtagtggcacgacgatggcggccctgcccagtgtcacggcacacagcatcgaaccgagcgtggaggccttgggcccttccacctcacctccacggcgacgacggccctacgcttcacggcgctcggtgccttgcactccagcgaggcctgctctaccacgacctggcattatcccgcgtgcacgacaaccagggagaggtcaagattggcgacatcgttctcactctcaccgccatcctccacaagtcccacaccgtccactgcgtaggtaagtcaactaattagaacactagccagaaattgtgttgtccgatcactacttgtagtagctgtgcaatgatgtgttgggtcggttggaacatcagagtttatggcaccagaagtgtacgaggagtcaactagctggtggaaatccacttgtttgtaatgtccg

SEQ ID NO: 23937 - DNA, 1307 bp, Arabidopsis thaliana landsberg
gaagaacaggaagataggatactgcttgagctacatatgcaaatgaagaatttcaagagtgaaatcaaggactacaaagacttatgggagttgtatcaattgtagccacaatagaagaagttgatgtcaaaaggaagttgtttagtactaccacaatacaagagaagacgttgacgtcaagaagaagaagtctagtactaccagagtaagaagaagagaaagggctaagttcatttgataagaaaggtaattatcaagtactcgagacgaaaggaaccgcgagaagaaatgggaaggagtagggctaaatcaagagatgaagacatgatgtagagactgaaccacgagcggtatgcagaagagatcagaaagtatggaagaaaaacagaagggttgaagcaggtgtacatatgatcttgtcaccaggagatgatctataaactacaaggagcttttgacaagaagagaaacgtacacgagtttagaatgtggatgagctataaaccaatggagagaacccaaatgcgaggtatgatcaacctagagtagagaggagttcagagtatctcgtcataatcttgtagaattcgaggacgaattcttttaaggggaggagaatgtaatacccctgactatgactaggaatccgtcggacggtcgcgaacatagaagtgcgatcgtaacttaggaaaattttcgataagaaaatttagacggagttgtgagtagagattttatcggctaatgttacatatcaagaagactaggatcggctattattagcaaaggcagttaaggctatcgaggaatttattaggactatcaaggttattattaaaggatttcttatgggcaatttggttgttgaaaagatcaattttgccgaagaaaaataaaggaagtgcggaagactagtttttatcggagaaaactagttttatcgaggaatagtaaatccaggccgagacaagcaagcggtgattgaatgggattggatgcggacacaacaagatttagtggagtacttaaatgacttagtcatttatttttagacaataggtaatgatcattgtccgcgtacaatggtcggagagttttcggtacgggcgtgtaccgtgagcgacataacgaatggtcgttaaggccatgtcgttgaggtgcttgtggcataggcagctgttccatgagcttggcgtgtgttgtgcatgatcatccacacgttttatattagaatgggcgtttagataaggataagaacaagattggataatgataagcttgaaagtggataagataaggataagcct

SEQ ID NO: 23938 - DNA, 2445 bp, Arabidopsis thaliana landsberg
ttgtttttaaactttggaaaacttaaggcttttcttctaaacttatagcatagagggcgttttacccctttctttgaattacaatgcctaactttctttgagttccaaaccctttactagactaacactttcttttgtatcccctttaagaactctaaactcttactcttttttgtttttttcttttcattcccattctcttttctattcattccatacacaatcccaatcccaaatacaagtctccacctagtcctagctaacccaaaaagcatgggctaggtctacatgaaagactgctcttgtcggctcatacctaacacgttataccaagctcaatctgaaaaagaactcacaatcacacacaaatgatctttggcttcaaataaggttaagttcagggtatcggaaactgctctaaagatgagagtaggctacttggattaacagagggtggtgaagtgaataagataatccaagtatgtatatggtagccatgagttcacaaacaatgcatagacatgataattgcaaattcagttcaggttctaatacatagggaatggcatcagataagcgagtttcgaatcaaagtagtatagtcaaggtacaaattcaaagcatggtgcagccttacttcagagatacaatcggttatgcaacagagaactaacaacctcggcattgaacttacttcattgaatcgaaacatgcttatcggtttgatatcataattatcccctatgcaaatgagcaatcctaaatgcaagcacactatataaaatcctaaaatgaaatgcaatctacatgacactctgtttttgatgaaatcattttctgaattttttcaaatttttatggttttttctatgccttagatgatgcaaaatttgaaataagaaaagagaacacaatgttaaacatgtcttgaacccagtcccttgtgtaataaaaatctgaaagagaattcaagaccaaagcacaaaatacacaaataaaaataaaaagatgctatggtatatacaatggttgaggtggtgttacctcagttgtcagaggtaggttcctgctcgttgatgccgtgataagcatcccaatacattcccgagtactgcccatcttgatcccactgattttgcttgacactctactctttctgaacccacggatcctgctcgacactctgctcgatatcacgtcgagtatcttggtcgagtgatcttctattggacataagaaggtccttgctccttggctgaaccattcttgtttttctccttctcttctggtgcggggtgctcatgagatgaatgcttgcaggggcttgatggcaacttacctctcgttgctcataagtagattgtcttgagggtgaaactgtatgccttcttgaaaccacttcttcagggcggttttctctcaccatggtggcgcctgaagatgaacagcttagtacagcctgaattgcggctatggccttgccacatttttccaacatcctgtcttgaaacttattccaagcactcatcgaaccaatgttcttatgtgcaacagtcagactcttactcactcttggtggcggtttgtgttcctcaaaatggaatctactagcattgtagttctcccaatccttctcctctgcttcttcattctcagctccttcttcactctcaaccctttcttcaatgtctggagcctctctcgtcgggggtgcactttccatgaagaaaatttcttcattaggcgggttgaaatcgatgttacctctcactgcgatggttgttagctcttggttgggtaagagaagattggcatccatttacgtcctgttctaaaacttgagaacatgcatccccttatgactctaatgctcaataaacaaagcccatctcaggtgaagaatgtcgatccatctaggggtaaagggagtcgactgaagtggcaccccacaagccattagtataggtgttatcactcctcctatagaaattgttcccttcagcttatttgctactgcccatttcctgaaaccacaaagatgattcaataaacgcattgatggtgaagcatcgttggtgtcacccttcataggcactttgtttttggtgtagactatgatatcttttagggcaatatccagcagctctatctcgccattgttaattggtccggtcttctcccttgcgtagaggacgttagccattgctttctggaagtaccgaatgcaggggtttcggattgcgttgctcttggcacttgaggacgagaattgggcgtcatcacctattgttacccaaagaccggaaagctcctctttcttgaacttgggtttaacatcagtccctctagggaatccgaacatgtcttcaaaagttttgatagccaaaacatcgtcttttccatagactgcaaatgtgatatacccaagctcttcttcccttgctt

SEQ ID NO: 23939 - DNA, 660 bp, Arabidopsis thaliana landsberg
atcatcgcgttaaccatcgaatccagcaacttaaactcaacgctttttgtgtttatcatcggaataatgtttccaagagaaggaaaaacttacagaacgttgatccaacggttgagttacccgattcacgagtttgtccttccggtttactttggttacatcggatttagattcagcgtcaattcgttaaccaaacgccactacctcgtccttggtatgactgtggctttaagcctactggggaagcttctaggagttttattcgcttgttcattcttgaagatcccaaagcagtattggcttttcttgtcaaccatgctttccgtcaaaggtcatataggtcttgttcttctcgactctaacttgatgtacaaggtattacaacaaattacgacttctcgttaatttaggtttcaagtcggttaataatcttcatctccgtgttattgattttctctttgtagaaatggtttactccggtagttcatgatatgttcgttgcggctctagtgatcatgactttgttaagcggagttataacatctttgttgcttagaagtcaagaaaagagtttcgcacatataaaaacatcacttgagttatttgacactaccgaggagctacgagtgttgacgtgcgtctatggcgttcgtcatgctc

SEQ ID NO: 23940 - DNA, 752 bp, Arabidopsis thaliana landsberg
aaatcgtagtatgattcaggtaaaaccgatctcaaatattaacatgcacaccattatcattcatttcacatctactatgtttatatgtattcgtgtacgtaacatctttacataatttaccgggtacatagttggtagtgtacgtacaaattctttgataaatgtattagtgtatgttaacttcgattttatagttgtaaattagggtagttagaatataaaagtctaattataaagcctaaatagttaagtatataactatattttggatatccattcagatctctgtttgctttggataaaattttggtttttcaactatgtttcaaattattcaggtatagaaatttaatatcattcgaataatttgttagttctgagtttagttcttatttttcgaaataggttcgtttgattcttaggtttaatatattttcaggtgtaattagtacattaattgtatattttgtttttatattcaaaaattattttaaacatagatataaaatttattcgatgtttatgtacgtatatgaacacaaattacaaacgtgtacgtacaaatgagtacatgatatttttaatcttaattatctctgatgtaaaaattaataaataaattattatttataataaaaataaaaatacgaaagtgggtcttaaatgatagaaaaatcaaattataactaaaagttcaaaaataataaatgcttataacatagaaaagaaaaaaaactgaaaaactaatgaga

SEQ ID NO: 23941 - DNA, 3544 bp, Arabidopsis thaliana landsberg
tatcgatcagaaattttggacctatcaaatccatctaattacagtgatctttccaaggtggtattattagtagtttattattattagtttttcgctttatgcttgcctatagttatccataaacctataaaactggttgtaatgtggatccgtatatgttcagccaattggtgcactgaacccggagcggctgaaaaagtttcaagaaaaacactctagctttgaagatccagtcatccccaaatttcattatggttcacattactcaagtgctggagcagtaagttatcttctctatgatatctgccatagtttttatcatttcttctcttacattttcttcgttttaaaactctgttcctcctaatcaccaaagaaagacaataactagtattttgatttgcaagaggatagagttttcactaaatactaatgatggtctaataatttgttatttcttgtgtgtaggtgttgcattatctagctagagtcgaaccttttacaaccctttcgattcaactgcaaggtagaaagtttgatcgtgcagaccaaatattttcagacattgcagccacttggaaaggagttctccaagatatgaataatgtgaaggagttggtaagacttggttcctcccaaaaacattcaaacgagtatccataatcgccgtcctttgctttgcaagtgaagagcctagccatatttattttgcttcctcattttctcttataggttccagagttgttctaccttcctgaggtgttggccaacgagaacttggttgaaaatcttggtatgattttatttctagttcctttccttgtccacacaaaatattactcctgaaactgggaagtagaaactacctttttgatattgttctttgccaatcagattctgtaaaacttcctccttgggctaaaagcccaaatgattttgtacacaaacaacgaatggctcttgagagcgagcatgtctctgcacatttgcatgaatggattgatctcatttttgggtacgttttcttcttgaaccagcatcttgtgtaaaacttggtgtgaaaacaaaatttctgtgtaagatagttggattttttttatcacttgtgttgttcttatgaacttatgtatgtaggtataagcaacgtggtaaggaagctacactggcaaataatgttttcttctacactacctacgaggggactgttgatattgataagatcacagatccagtaagttatctctgcctgttggagtttcaaaaatttggtattaccttgtttctgaaatattcatgtggctatttgatgaaggtaaaacaacgggctactcaaaaccagatagttaatttcgggcaaaccccttcgcagctatggactgtacctcacatcaaaagaatgcctctaaaagatgttcttcatatgcaggtaaatgcttgtattaaagattcatggctcttcctctgtgttaaatttcaccattcaaacttgacaaacactttaaattcttgtttagaccatcttccggaatccaaaagcgataaaaccgtatcctgttccagctccagaacactgcaacttacctgctgcagccatcaaggcatcttcggatactgttgtgattgttgacatgaatgtgcctgcagcacatattgcacaacacaagtggcaaccaaacactcctgatggccaaaatactcctttcatctttcatcacggaaagccgagttcaactggcggaacattgatacgcatgttcaaaagtgattgggaatatccccaagcacaagcatttgaatcaccaggaatcagaagttcatctgtcacttctattactaacgatggagacattatcactggtaagcagttttagagattatgatctgtgtgaaagtttggtgattgataatatattcatcgttttattaaaaatccatgtatgttaattaggcggacatgtggataatagcatcaagatagtctcatctgatgaagcgaaaacactagaaacagcttttggtcactgtgctcctgtaacatgcctggctctgtctccagacaacaacttccttgtgacaggttcacgagatacaactgttttgttgtggagatttcacaagggattcacttctcagacaagcgagcctgagcagacaacaagctctgcaacgccttcctccgcaagcagcaacaacttggcgaacaaagccaaaaagcatcgcattgaagggcccatacaagtgctccgtggacaccaaagagaaataagttgttgctgtgttagctcagatcaaggaatcgtcgtttcgtgctcagagtcatcagatgttctattgcattcgataagaaaaggtcgactaataagacggcttgttggcgttgaggcccatgctctttgcatttcttcagatggagttatagtagtctggagtagattagaaagttgtatcagtacgttcaccattaacggagtgctcatttccaaagcaagacttccttcctcttgtaccataagctgcatggaactatccatggacggacaaaatgttgtgattggcgtgaactcattttccgacattgatggttcaaagagttttaatatccttactggtgaagaagattcatcaagtagaagcaaagaagttgagagattgaatataccatctccttcaatttgcttcctcaacttatacaccctccaggtatattcaaacaatctattgatgtgaaacactagattgctcttgatgtcgtggctattgtcttttgacaagccaaaaattcttcttctgtaggtatttcatgtgctgaagcttggtgaaggccagggtataacagctatggctttgaatacagaaaacactaacctcttagtttccacagaagataaacagttgatcatcttcaccaatccagctgtaagtgatgttacactgttcgcatttgagcttcttcattaattgccaccatctactgcagttataacaaccctgatggttttgttatcgttaattttgtttgaaattgcttgcagttaagctcgaagttggtggatcagacagtgaagcctggctcggaatgacgaatggatctgactgtttcgataaactcaacagcaactcaccatgaaatgactcactccaagatctgcagccgagtaacagaggattcgcagagggaagagagttggctaatgatggaaaagaagaagaaaaagaagaagaagaagaagaagaagaagaagaagaagaagaagctaagcaaggacttttggtgcattttccaggatactgaattcaaaaaaccaactccgacttcttgattcttaagcttttttccatctttttcccatgtaaagcttacctttctattttgtcaaaacaattgaacagttttgctgctggaacatagaaatcccgtagattttgaagaagataataaaggttgatgtttattcgtatattatgagtttatagagcaattctgagactcggacctatcaattgggataagatcacaagacacataaaatacaataatagatcg

SEQ ID NO: 23942 - DNA, 532 bp, Arabidopsis thaliana landsberg
  unsure (1)..(532): unsure at all n locations
acatacatcctacaaagtcggaagtcaattttagttttttgtgtgtaaatactaatacttacaagcatatactaaacgcnnnnnnnnnnnnnnnnnnnnnnnnnnnnnnnccaacaaatgagaatactccattatctgcgagaaatttgcaaatgttataatacagtacacacaaaaaacaacaaatacttacaaacacaggagaattagatgtataacactaacctcagccatcttctggagcatagtcataggctcaaatataacaacaggaagagtcaccattgacgtaatatccgaacctatatatttctgcatcatcttccagtaactatctcgttcctattaaatacaaaaacataagtttcttcgggtaagtagagaaacatagaggaatttaagaagaannnnnnnnnnnnnnnnnnnnnnnnnnnnnnnnnnnccttccaccttcctttctgagcttcctcttcaacatcttccttgccaccttctggatttaagacctcaactccttaataacttgcacgct

SEQ ID NO: 23943 - DNA, 888 bp, Arabidopsis thaliana landsberg
catgatccttttgatcagatgtcgagtaagatgaaccccactaagcccaacactgtactcgacacgcgcgccgagtatgtcggccgagtatcgcacgtgcgaagtcaacacaattcaaattcaaatttgaattggaatctactcggccccacacatctatctgctcccaaggccatcaaagattcttttgcaaacagtgagagcttgtctccttgaccaaatgaagggtggagatctagagtgtttgaagagctaggatcaaatctatttgcctataaacccacctcaacaagctaagacactcactctctctctttactcaattagtttcgcaatttgctacttctctcaagaaatttcaagtttttgctctcacttctctttagaattcccagaaactgaaccataatcttatactttctttccatacaaaccatttcaaaacctcttaaaacttcaatttctcttctactttgacctacctttggttattttgtggtgactacctgcagtaaaaatcatcccaaaatcatgaatcccgaggaatcaagaaggagagcttctgctcgagccgtggcaagagggtttgagatgattaatgagaagaatcagtcaaggaatcaggaagctgcgagtcgtggttttactcggatgacaggccgagtacaatggccgagtatggccccagagtcctctgtgggtcgttctgcggctgctcgaaaggaaatagcaagaggcaagtgggtctgggagtccgagccggttgcagaagaagaagtgcctgagatagagaaggaagcatctgaggaagatgtgcaagttgatgaagaggtcctgatagttcctacaaggagaagaacgaacaccatgaggagaaagaaagaccta

SEQ ID NO: 23944 - DNA, 554 bp, Arabidopsis thaliana landsberg
  unsure (1)..(554): unsure at all n locations
taaaattgtttggtcaaaacttctaaactctttcaaattctcagcacccctatttgtggttatgttgtaaagatccactaataaccaataaaacatgtgagtcttgtgatatattctaaaacatgttcgttataaaattcacaaccacattgtcgaactttgtttatattcccttatcataatcagtcttactattagcataatcaactgtttatgtactgatgtcttctaattagaaaacttaaaaaggtaaagaaaaaaaagaaagagctcagttaagaggccatatcaccagataaactggagaaatgcaaaggacccaacctttacagaaaccgatttcatcacagctctattgcaccagcnnnnnnnnnnnnnnnnnnnnnnnnnnnnnnnnnnnnnnnnnnnnnnnnnnnnncactggtgctacttgtttaaatgttacttcttcagttatttatacataaactctcatagttcacanttaatgagaatatctaatgtggcaggatctattctccactgcnctatgtaagtgtcatgaaccaaactct

SEQ ID NO: 23945 - DNA, 1008 bp, Arabidopsis thaliana landsberg
aacatatatacataagtggaaagtatcaatttgatataaagctagtcaatggacttctaaggataacatatatacataagtggaatgatacttaaaagataaaggataagtacaaaattaaaattgattaatacgaaagtaggtcaataattcagatggttaaccacaacaacataatattaatgatgatgataaagttgaatatggatgatgatgtaaatttatgaaaaaaaaataaacttttatatatatagaatttggtttaaaaattttccggcctattgaatatcaaatacctaaaagtcaattaaacgaataaaagatttaaagtaatatatatctaactaattcttctgaattttttctttttgaataaacaatttcttataagttgtaacaaatctttaatagttttatgtagtacgatgataatgtattacaatgattattttatgaattataattattttagttgatgatgatttatagatgtcaaaataaagtgaacaaaagaagtcaaacaatgcactcaaaattgcagagacattaatttctgatcatttgttctaacacatttgccggttcctctccataactgtaagcataaagcggtacacgaaccagcaccacaattagttttccggtaaaatctcatgacacattgcatattgtccttgaatctcattcaccatcgatcctgtaaaagtaatatttgaaatacaaacacaaagtttgtttttatggcagtaaaactgtattattttataactgaaatagagatggtaaaaaaaaacctaaaataaggatgatgtagacaaaaagaaaggcggatttactcattttatgataatttgagatttcaaaatagtgagagtagtaagtctcgttcatgcaatttcacacagagagagagacacccatatatttatctacattatggatattatcattctcgatataaaggtagtaaaaaatatggttagttcttggaacaaaatatttttttag

SEQ ID NO: 23946 - DNA, 846 bp, Arabidopsis thaliana landsberg
tgccgtttcttcgcagaaaacctcgtaggtcacgccctcgattggtttgctagcctcgaagggaactccattgataccttcgaccagctcgccgccgctttcttaaaatagtattcggtacttatcgaacacaggacgtctgaagccaacctatggagtctcacacaacttcagaacgaatccctgcgatcttacgtcaaaaaattcaaagcaatcaaatcgaaaattgcaaacctaaacgaagaggtagctatagaagcccttcgtaacggcctttggttctcctctaggttccgcgaggaactcactgttaggcaaccagtctctttagacgatgcccttcacaaagctctccacttcgccaaagctgaagaggagctcgccatgctggccttacgattcaaagaatctataaccaaaacgctccccttgcaattaagaaacccttcaaaaaggaaaacaaacgcaggggcagcataccttattcgcaatagacgaggcagctgagctcgagagtcccagagcttgacctcggaaaatattgcaagtaccacaagaaaagagtacattccaccgaggagtgtcgcgcagctgggggaaagactaaaaaaggttcaaaccccaaagttgaaacccctcctcccgacgagcaggaggaggagcaaactcccaagcaaaaaaaacgagaacgaacacccgatggaagttactctcccccacctgctaggagagaacgcatagacctagtctttgcagaactcgatctaggtggcgggacagtaaggtcagtcaccacacctccccccgccccgcataagaaaaacatgaggttctccaccacgtctc

SEQ ID NO: 23947 - DNA, 1490 bp, Arabidopsis thaliana landsberg
acatgaccatttgtttgtataggatgctctctaatagagaatcagctagacgatccagaagaagaaagcaagcacacttgagtgagctagagacacaagtatgttactctcgcagcgttcttattctttctcctttaactttgtttagctcccttgtcagttgtgacaatctccatttcgtgtaggtttcgcagcttcgtgtagagaattcaaaactcatgaagggtctcactgatgtaactcaaacattcaatgatgcatctgtagaaaacagagttttaaaagccaatattgagacactacgagcaaaggttaaaatactttgttttctctctctgtctaccaaaactcgctattgaaacatgtttgtttttggcaggtgaaaatggctgaagagacagtgaagagactcactggctttaacccaatgttccacactatgcctcagattgtttcaactgtctctcttccttcagagacatcaaattctctagacactacaagcagccaagtgactacaccagagatcatcagctcggggaacaaaagcaaggccttgatagggtgcaagatgaacagaacagcttcgatgcgtagagttgagagcttggaacatctgcagaaacgtattcgaagcgttggggatcagtagctgttaaagaagaatcttgatttgtaacattatcaagagagttattcgacaaatgttgtatgttttgtaaagaattgttttcagattattttaaactttttttttgtcttcttgtttttaacctatttcttcgttgatggtttgtgttgaacttctaattttcattgtacatgtcttttgttaaatttctagttttaaaaaagattaagaaatcaaagatataagaattactctcttattaagcttaggaaattactcaaacctaaacaatctcaaaatcttaatctctctaaactcatatggttcaccacaactttgggactcatatatatagagattcaaaaccaaatcacaataggattagggttagataactcctaacttatctcctaagatatctccttaagatttaatctaatcctatatttaaataacttataacttaagtcattatcttcaagcttactccaacattcacttctttaagcttgaagtcttcatttgacaaagtcttgaactccaatgagatctctcatatccttgaacttgatcttcgcgagtgccttggttagtatattcgctctttgcttgactccgggaacatgttctaccgagacttgaccattctctacacactctcttatgaaatgatacttgcgatgaatgtgcttgcttcttccatggaaaactgggttctttgtgagtgcaatcgcggatttgttgtcaactcgtaatgtaactctctcacatggtgttccaataacttcagcaagcaggtcttgaagccaaatggcttacttggctgcctctgtagctgccataaactcggcttcacaag

SEQ ID NO: 23948 - DNA, 890 bp, Arabidopsis thaliana landsberg
  unsure (1)..(890): unsure at all n locations
gttctaagctcactagttaatttttcacatttctctacttcctgagcataagcattttcaccttaacatgccttttgttttccttaataaggaattcctcttagttgtccaagagattcatccttctcatgaatggcacctatcaattcatttaatttttccttttgttgcatgttaagattggcagaaagactaagcaagtcatcttcatcatcactagaactaccctcatcactagatgtagtatacttggcggtggttctagcttgtaccttctttttcttgccgtcctttgccatgaagcacttgtggcccgtngtgnngaagaagangcctttggtgacggcgatgttggcggcgtcctcgtcagaggaggagtcggtggagctctcatcggagtcccattctcgacacatgtgggcatcgccgcccttcttcttgtagtatctcttcttctccatcttcttatttcctttcttgtcgtcatccatgttactgtcacttgtatatggacatttagcaataaagtgaccaaacttaccacacctatagcaaaccctcttggagcggggtttgtagtccttccccttcctttgcttgaggatttgtcggaagctcttgataataagagccatctcctcattgtcgagcttagaggcgtcgattgggagtctacttggtgtagactattccttcttctcttccgttgctttgaatgcaacatgttgcacctcgggtgtggaggtggcgccttgctccaagttgacaatgtgtttggagtctttgatcattagttcaaagctcacaaacttgccaataacctcctcgggacacatctgtttatataatggatccccacgcattagttgatctgaattcgttgacagaca

SEQ ID NO: 23949 - DNA, 1311 bp, Arabidopsis thaliana landsberg
aagcaaggtaaatattttcattattatttcttacttagattttatttcttatgatcaattttttgtttcttaatgaagttcatcaactgtttcttgaaatgtctcgtaacagtttccgacgaatatgaagctgaagttctctactattaaagatgaaacacttctaagagaaaagaaggggaagggagtagagactggaactagttctggaatgcttatgaagcctgatgaggtacctaaagagaagcgtctagctacactagatatttttgctggatgtggtggtctatctcatggactagaaaaggctggtatgtatttatattctcatgtcatgcatataattttatcttctaaacacttgaaaacttttattaatatgcatgtttttgtgtaacaaggtgtatctactacaaagtgggcgatcgagtatgaagagccaactggtcatgcgtttaaaaaaaaccatcctgaagcaacggtttttgttgacaactgcaatgtgatccttaggtaaaatagccaatggttttttctactcttgttggtttcagttgattaaggtttattaattgtagggcaataatggagaaatgtggagatgtcgatgattgtgtctctactgtggaggcagctgaacttgcagctaaacttgatgagaaccaaaagagtaccctgccacttcctggtcaagtagatttcatcaacggagggcctccatgccaggtatatatatctttaaatactttctataatttttgtaaaataagtgaaaagcttcttaatgatttgaaaatttggcaggggttttctggtatgaataggttcagtgacggctcttggagtaaagtacagtgtgaaatgatattagcattcttgtcttttgctgattatttccgaccaaagtattttcttctcgagaacgtaaagaaatttgtgacatacaataaagggagaacatttcaacttactatggcttctcttcttgaaataggttaccaagtaatatttcctttttgtgtcacacttgattaatgctctttagtagaagttagcatatgcaatatatcagcaatggtttttaaaatacaagatttgttgaactatgtaggtaagatttggaatcttggaggcaggtacatatggagtttctcagcctcgtaaaagagttataatttgggcagcttcaccagaagaagttcttccagaatggcctgagacgatgcatgtctttgataatccgggtagtaaaatctccttacctaaaggtttacaatatgatactggtcgtaaaactaaattggcgcaccg

SEQ ID NO: 23950 - DNA, 562 bp, Arabidopsis thaliana landsberg
cccgagttgtgttagtaggagttccagtagttatccaggatacgatcctaccggcaaaccttttgggaatgccgatggaaaggtttgaagttatctttggaatggattggttgtcaggatatcatgcccatttagattgtaggcggagcagagtagcgttcgaactaaggaatcgaccacgactcacttactgtggaatcaatccaagtaagattgcttcgttcgtgtcagcaccgaaggttgagaatttactatgggaaggagaagtctaccttgtcactttaaccgccattggtggagaagttgaaaatgacccaaggattgaagagatctcggtggtgaacgaatttgaagatgtgttcaagcccttggaaggataaccttcgccgaggaatcatccgtttaccattaatcttgaacatggggcgactccaattgcaagggcaccatataggatggcgccagccgagcttgcagaacttaagaaataactgaaggatctacttaaaaagggatttattcgtccaacaagaaataactgaaggatctacttaaaaaggga

SEQ ID NO: 23951 - DNA, 524 bp, Arabidopsis thaliana landsberg
agagatctcatagcatatagatccagaaacatcctattaagactaaattgtttagtaagaagtcaactaagagcacgagcccataactaaccaaataaggtgatcttcaatgtttaaactaaattgattagcaacagggcatttggtctagtggtatgattctcgctttgggtgcgagaggtcccgagttcgattctcggaatgccccgttgacctttttggataccagctaagagctatcatggcaaaatatgttctatagtgcattttctcacaatttctagaatgtttaaattagaaaactatttcccattacgcatgtttggtataaactgctgaaatgcaacaaataaatgagaatcacaacgcaccttggctttcacgtccattgacttgatcacattgtgcagcaagaaaacagtttctcgatgtcagaatgaaccaagaacatcactagctgaatgttgccaatttatccaagagataactgcaggaagtgaaaaaagaacacagcttaaaactgg

SEQ ID NO: 23952 - DNA, 1130 bp, Arabidopsis thaliana landsberg
gaaagcagcattaaggaagaaaaggaggcgtttgtagtcacaagatccccagcgctagcccgagatcgtggtgtcactgctgttgaattaccacctgttaaaagacgaaagtcaaaggaagcaaccgtgcctaagcccgctgtgcaggaaaatgttgggatcgaactaattgaagaagtcatctccggcgctaaaatggaagctgaaactgatccgtgggttggcgaggatatactagcgccaaatgaacatcccgaaccagaagctgtggtgtttctcgaagttgaccaaattcctgctaaagattggggggcttattgtagggagccaatacagcattacatcgtgacaggcgagctcccaaagaataaatggcaagctaggaaaatgagaatcgttagcgcgaaattttatctattgaaggatgctttgtatagacgaggtgtcagatccttatctactatgcatttgtggacccgaagtcgagatcgttatgaacgaagtgcactaaggtttatgtggcactcattcttcaggaagggctatggctttcaagattaaaagaatggggtattattggcctactatgatcacggattgtgttaagtacgcccagcggtgtaaacgttgccaactccacgcacctctcatccatcaacctacatacttattctcttctatttctgccccatacccgtttatgagatggtcgatggatatcattggacaagtcaacccgaggtgtacaatatctcttgattttaactaattacttttcaaagtggattgagatcgaagcatacgtaaacatcaatgactcagcggtaaaaacctttgtttggaaaaatatcatatgtcgacacggcgtcccgtacgagatagttagtgacaacggagcacagtttatctcacatgagtttgaggctttctgttcggattggagaattaaagttagttactctactccgcgatatccacaaggaaatggtcaagccgaagccgcgaacaagacaattctaagcaatcttaaaaagcgtttaaatcatttgaaaggaggatggtatgatgagcttcaacctgttttatgggcgtatcgcacgactcctagacgatcgaccggagaaacccca

SEQ ID NO: 23953 - DNA, 4803 bp, Arabidopsis thaliana landsberg
  unsure (1)..(4803): unsure at all n locations
taataatttttctgacactttaatataatcaaacaaatcaagtgtctaatgatatttaatgccacctgattattaaaaagaaagcacttaattaaagttagcatatgcttttatgataaatttaattttataaactcctatacatattataccgatgtaattttaacgtgttaattatttaattttgatatgttacctctaaaactaagttatattacattaaataaatataaaaaataccaattaaaatggctgtgatgtcaacgattgaatattttggaatattactctgctgatctcataaaatcaacgaattggtctgcttcgcgacaccacagagaacatgcaaattatagtccgaacacgtatacacttaatggacccacaaccgatattatttcaaccgttacaacggcactaattaattaacccagagctctaaaataattttgaaattagactattaacccagtttaattagaaaatagtaaaccggaattgaaccggtcttcatatctcgctctcatcatcgtctctctcccatggaggagataagagggtttatgctagggttttagcccccatttacagatacatagattacgaataaaacgaggttaataattcaaatgcggagatcgaccacgatctcaattgcatcaaaagcaaataaatttctcaatctgtgtcttctccagaaaggtaatcctgtaattgttcctttcattagccgtttctggggaagaactttttctactaagagatcgagtatgaatttagaagaagaaattgatttgttctgtaaaatgattcaatctcgtcctcttccttcaatagttgatttcagtaaagtattgagtaaaatcgccaaatcgaagaattacgatcttgtgatctctctgtttcaccatatggaagtttgtggaattggtcatgatctttatagttacaacattgtgattaattgtttatgtcgatgctctcgatttgttattgctttatctgttgttgggaagatgatgaagtttggttacgagcctgatgttgtcacggttagttctttgattaatggattttgtcaagggaatagagtttttgatgctatagatttggttagtaaaatggaggaaatgggatttagaccagatgttgttatctacaacacgatcatcgacggttcttgtaagatcgggttggtgaatgacgcggtggagctgtttgatcggatggaaagagatggggttagagctgatgctgttacttataactctcttgtggccggtctttgttgttctggtagatggagtgatgcagctcggctaatgagagatatggtaatgagggatattgttcctaatgtcattactttcactgcggtgatcgatgtgtttgtgaaagaagggaagttttcggaggcgatgaagttgtacgaggagatgacacgaaggtgtgtagatccggatgttttcacttacaattcgttgatcaacggtctttgtatgcacggtcgggtagatgaggccaaacaaatgcttgatttgatggtaactaagggttgtctccccgatgtagtgacttataatactctcattaacgggttttgcaagtctaagagggttgatgaaggaacgaaactcttccgcgagatggctcaaagaggattagttggtgacactatcacatacaacactataatccagggctattttcaagcgggtagaccagatgcggcgcaagaaattttcagtcggatggattctcgtcccaatattaggacgtacagcattttgttgtatgggctttgtatgaactggagggtagagaaagcattggtgttattcgagaatatgcaaaagagtgaaatagaacttgatattactacttataatatcgtcattcacgggatgtgcaagattggtaatgttgaagatgcgtgggacttgtttcgtagcctttcttgcaaaggacttaagcctgatgttgtgtcctacactacgatgatctcaggcttttgtaggaaacgccaatgggataaatcagatttgttgtacagaaaaatgcaagaagatgggcttcttccattataacatatgaaaactgtatattatttgtaagtaaaaaacaaattctttattttgtattcatcaccatttgtaattttgtattattacaaaagaaatacaagtaagctggagtttaatgtaaagtctttgaaaccagaaataaaagaggcaagaaaagggagataaagacaagttttcaaaacattgctctccatgaataccacttgagtttaaactgaaacaagagtggaggaacaccaagaactcctctttgaatcctgggatcaaacacatcgaattgtactttatttaacgaatccagaagaacttgtaccggcacagaatgaagcagtaccggtttagcttctgcaggaacctttcccgccagttcacgggctttcaggagatgtgcattggcaacagatgcaatctcaaacacgacattgcttagtccttctcttgaatcgttatccagaagaatttctaatcgtccaccttgtttcacgagcaacccgtgcttctcagcgagatctgcagggatgtaactctggtgacggtttctggtacagtggtacggtaatgatttaagcagcaagacaagaccactggctttaccaatgtgtgaagctgcatgatcagctgttgttgaactaattccgcctgcttggagtgtattgtacagaagagtggaaactgtgtcttctgcgtatttctctagctccgcaatgctctctggtatatcgtctacttctctttgggcatctcggattctagcgtcaactgagcgttttagccaaggtttactgatgttatgttctgatattgcccaagacagagcttgtgcagctggatggtttatgggctttttggtgtagagtttgtcaattgcttcttgccaccaaagtaaccgcatcaagccgattttgggatcagatgcaacatccatggctcttgcggtttctacattaaaagcccggagagcaaatgctgctttacgcatctcagttgggagttcaaggagacagaggtagtgatgatagtcatagtttcgtacttgctgcacacaataggacaatgctgaacgcaaactactcgagcctcctccattcatcagtataactccaactgtgtttctttctcttatcctacaaccatataaaccacaaacaagatcagttcataaaaacaatgaaaaactctggtttcttctatcactccattataaaacagtaacacagaattcatctacaaacacaagagaaaatcctccaattatcaccacttcaaataaatatactgaataattctcactaatccagaggttttgtgaaccgttaaactcattcaggaattaacacaaacacttggtggacaaagcactggaattggtatttaacaaacaaaatgagaacttttcaacattgcttaacacacaatcataaacccaataatcacacatggataacaaatgagatcactaaagttcacagaaactttccaattagtaatgtaaaatcgctggaaaccattaatgtcgtccaacaataacgaaacgagcaaaaaacaccttaccctaactcgaaaaactctgagattcaagtttcctatgtttaggaactgaatctaccatccaaaatccaaataaaatcaacctttcgacccgaaaatggaaatcgaactctgaacaatcgtgccggagaagaagcgttgggtcaatgtagagaaatacgtcgtcgattaatataaaaccactaatgttattacacgacgtcggttctgctacagtgtaacaggaagtcggttttgttataaaatgacacgacgacgtttttatgtaaagaactgtttaatgaataaacgtgattaggatagtattaacccgaaaccaaacactcttatatcgaacaaatatatatacactcgtatttattcgcctaaagccaaaaacccattagcccctcaaggtatcttccagaagcaacgagaagacctgcaagagaaaattttcagattcaactatggcggacgaagcaaaagctaaaggaaacgcagctttctcctccggtgacttcaattccgccgttaatcacttcaccgacgcaatcaacctaacaccaaccaatcacgttctcttctcaaaccgttccgctgctcacgcatcgcttaatcactacgacgaagctctctcagacgcgaagaagactgttgaacttaaaccagattggggaaaaggttatagccgtctcggtgctgctcacttaggtctaaatcagttcgatgaagccgtggaggcgtattcgaaagggcttgagattgatccaagtaacgaaggtttgaaatcaggtgtagctgatgcgaaagcatctgcgtctaggtcacgcgcttccgcgcccaatccgtttggtgatgcttttcagggaccggagatgtggtcgaaattgacggcggatccttctactagagggttattgaaacagcctgattttgttaatatgatgaaggagattcagaggaaccctagtaatcttaatctttatttgcaagatcagagagttatgcaagctcttggagttttgttgaatattcaaatcaggactcaacaggctggtgatgatatggagattggtgannnnnnnnnnnnnnnnnnnnnnnnnnnggagcctgaggtagagaagaaacgaaaacctaagcctgagcctgagccggagttggagaagagaagcagaaggagcttgacgct

SEQ ID NO: 23954 - DNA, 668 bp, Arabidopsis thaliana landsberg
agatcaaataaataccgatttaattacttaagagtgatgaaattacaagttaaaatcacaacataaacattgtttgtatggcgaaggcattaggcccaaaagtacacgattctaaaatacatactttaagttttacaaaaggacactaaaaactactccgggttccttagcgttcaccagtccctttaatcccctctaaggttacatgcaaaacaagtagaatcatgagtaatctagcattactcaatgagttcgggttccccaaggaaaagttagtctaaccccacccataatccccacatgcataacataaacaatcagagtaaacgcagagaaggtagtaatcaatcacataaaacaatcaagaaatataacgttttcttaaagttttactagggtccgatgcactgccttcctccacacaccgtgaacacccgagttataaccacaaaggcatataaccggaacatcaccttggctacacagtcgtgtaaacaacaccggcccttgggtagctaacccaaactctccgggtcctttgatccccatgatgcctgtttcatctcgtcaagcaaacctcacgaaaaagcggaatcacaaggcaaggctagctacatcccacttgactgtagcattcttatggatcaacttgataactttcacaagct

SEQ ID NO: 23955 - DNA, 969 bp, Arabidopsis thaliana landsberg
  unsure (1)..(969): unsure at all n locations
gaggaaataaagaaaaaggttgctaatgcaattggtttgatgcccttgggaaccaaaaaaaggtgattttccccttgagaatatcagagtcccagtgagcagagagtttgggagatctcttgcgataaggatcgctgaagttgtcagggtacaatccataactaagctcgtatccacttagtaactcgatcaaatccataaatgatcatgcgaagtagcctctcgtgtctgatccattcctacacgtagtaatgtcttttgtttatttattacacagccaagagtagagaagagaagatgcagtaagaaacactttacttacctaacggctttgagtacagcaccaatgtaagcttgtaagtactcaatcctacgtgtgtccttctgttgcagctccaaatctggcttcatcggtgtacctattcgtttgcaatggcaaaagaaatgagaagacttatacaaaaaacaagagacatagatcagaatatatagagaaagacagtgatcataccattctcaagaatgtagacaggaggattgccatagctctgctttatatactccagcacaacttccatagcccatggagtattagcatacttgtttaaacaaaaacaaaacaacttagtaacactattctctatcaagactaaagaaatcttagcctcaaaactcctacctgaaaatctaaactttttccaaaatctgtctctcccaagaaagaaagaagaagagatgattagcaaaaacaagatatcataaaagagaaaaaatcttgttttgttatttaaaagattgagtttgattcatacaatgaaaagatacacccatgtatnnnnnnnnnnnnnnnnnnnnnnnnnnngaaggtttggatttgatgttagtgacagaagccgcatgatagtgtatgactcctacacagtcacatgagcctttaactcgttctgattcttctcagaaaaactggca

SEQ ID NO: 23956 - DNA, 341 bp, Arabidopsis thaliana landsberg
ctggatgctgtagtcattaaagcggaagaacttcagtcctacaaggagaaatagctctgaaacttgttctacaataaaaacataacataagtaagatatatcaatgattcaagtacctattgctgacccaaatatcatcaaacatataatgtataatgtggatatggcgagaaaataagcgtaggttatcatccaataaggaccatttcctaggccaggctttttaatattattcttaaatgctggtggttctcatacaccaacgagttcaagatcacctgcgtagaaaatacctcaaagtaattaaatcacatgatataatttggatcataaaagaaatt

SEQ ID NO: 23957 - DNA, 919 bp, Arabidopsis thaliana landsberg
atattaatgacaaagttacgatgaaaagatatgaataaaagtaaccgtcaatattttaacttaaagttacgataaaagagacagaaccaaaaagataaccgtaaatattttttacgaagttacgattaaaaaaaacaaatggaaactgttgataataacagaaagtcacgataaaaagaaacaaataaaaaattgcgataagaaaacactaaaggaaaaaataaccgtcaatgtaaatagaaagatacgatgaaaatacactaactaaaaaagtaattgtaaatattttaacaaaatgttgcgataaaaaacacaacaaaaaataaccgtcaatattaaaatgacaaagatacaaacgaaaaattgcgataaaaagtatttaacggaaaaaataacagttaatgttagcggaaagttacgatgaaaaaatatgaacgaaaataataactgtcaatattttaacagaaagttgtgataaaattgaaataatcgaaaaaaataaccgtaaatattttaacagaatgttgcaataaacagacacaaccaaaaaaaaataactttcaatatttttatgaaaatttgcgataaaaaaatactaaaggaaaaataacagtcaatattaatgaaaagttatgatgaaaagtcactaacaaaaaaagttgcgacaaaaaagacactaacgaaaaaaataatcgtcaatattaatggaaagctacgatgaaaagatacgaataaaaaataaccgtcaatattttaacggaaagttgcgataaaagagacacaaccgaaaaataatcgtcattattataacagaaagttgcaataaagagacacaaccaagaaaaaataacagtcaatatttttaccaagtaacgataaaaaaaacaaacggaaaaataaccgtcgataataacagaaa

SEQ ID NO: 23958 - DNA, 799 bp, Arabidopsis thaliana landsberg
tgtggaggtcctggaaatcaaagcaagttacaaacattagagaagataagactaaccaagagaggatgaacatgcgacctaaatatatttctccaactgattggagaaaatttgtgaagctcaaaaccagccaagaatttaaggtatgcatttagtatttgtaagtttatttattatataatacactagaaattaacattcatctaataggttgtaagcaatagctacaaggaaagaaggcgcaatcagattccacatactagtagtcgcaggggaatgcttagacttgccgaagacatggtaacagttgtacacacttatattgttcatattgctcagcctttttccaaagtccaaacacttatgtattaactgagatcatttttttggtttagaaaactgctagtgcagacccatctgaagtgacaaggctaaaggtttgggttaagtcacgtactaagaaggatggtacaccagtgaatacgaatgctgctgaaaagattgtgagttgttttgtttcgtttgatttgcattttggcattttgaatcacacttaatattttaaaatgtatcttatgagttttaaaaaaaggcagaagagattgttaacaatgataatccatcagcaaatgaagcacaagattcactaagccaactgttagggcctgacaatcctcgtagactgagagcaatgggtcgcaatatgaataagaccaagttagcttgtttctaagtgaagcacacgtgtatggcttgaatgcaagagaatcagcttcatctacaaaagaaggtcaatgag

SEQ ID NO: 23959 - DNA, 558 bp, Arabidopsis thaliana landsberg
gttcactttgagatttgtagttacttgtgtcaatgagttttcgaatttcgggtaccatttacggtcatagacgtcatgggggaacctgcacaatcaatcatgtatatatgacataactaatctgacatatggctttctatggtttcaaacgcaccaattattgacatgtgaaatattgttttaatattattttgtcaagaagtataatttatttttaaacaatttaagataatatatagtaattgtcaacacaattttatgttgcactttctttattattatttttgctatttttgtatgaatgtaaaattatattcaccaaaataacctaagatagaataaatgcatctttggttgaaagaatctttaaggataatttcaattatttttgcaataaatgtatccgatgcatacttttgcagtttttgctttcacgtttacaacgtataacgaaaattttcaatataaaaactggcaaagtcaattttagatgacatatgtatgaaaaacaactatcgagatatatgcttatataacatgaaattttcatgggatctt

SEQ ID NO: 23960 - DNA, 878 bp, Arabidopsis thaliana landsberg
gactcatccggtttggattgaacgaatattgccatatcacggatttaaacacagatccactgcctatataaaagtttgagcctgaagcggactacaaagcgttcttccgagaattgggtgtgccaaccggtgaaggtcctaagttagaagaacttaggcaaggcttagtaatgtgcaaagcatggcctcctgaaaagcgtagatgatttgggttattgattcttctagccattagattttatggcttgcatcctaactctaggataccatttgagagtgccaaaagagttgttgatgacgaagccatgaagacttatccgcactacaagaaaaaagggataataccacaataatatagttgcagtaattcatcaaaccgttgcagatcgtgagattacaacaaaattgagacacattttgcatttttgcattttggacattgcaaatttatagttattacacatatgttacaaaatttacaatgaactagctttttgctatatatgtcgtataaatgcaacatttttgttgtagttattttgtcgtacaattgtcacgtacgtttgcaacttaaattgttacaacctattgccacataaaatgtatagcaaatatcattgcaaatttacaatgtataagaaaatattgttgcaaatttgcagtaattatttttccacataaggttgttgcatatattttataacgataatcaaaacaaaaattgtagtaagtatgattactacaaattatctttgtcgtattattacgagaaatgtatagtcgcagttccattgtatatttgtaagattgcagttattttggtacattaatttttatcattgtaatttacttttttgattgttttggtaggcaaaata

SEQ ID NO: 23961 - DNA, 519 bp, Arabidopsis thaliana landsberg
tttgattatgtcataatttgcaataggtgtaaagatttggatattgatgcttgtagtgaacacatagcttctatcgcaaagttaaatgatgaaatggctagtcttaatgcccaacttaagactagcaaaagtgaatttgataagctaaaatttgcaagggatgcctatacgattggtagacacccctcaattaaggatggacttggcttcaagagggaagccaagaacttaacaagccataagactcccattcccgccaaggaaaaagggaaggcccctatgtctagtaatgctaaaaagaaccatgcctttatgtatcatgataggagacattctagaaatgcctatagaagttatgatacttttgattcatatgctatgtttgcttctagttcttcctatatgcatgatagagatatgtctaggataaatgttgttcatcatatgcctaagagaaatggtgttaatgttcctaggaaaattaatgaaccttctacaatatatcatgcttgcaatgct

SEQ ID NO: 23962 - DNA, 654 bp, Arabidopsis thaliana landsberg
gaatcagctggtctaggttaacgaatacatgttttgatgtgtggtttttgtaggaaagtgccgcttcaagcatgcatgcacaccgcgccagaagacaaaacgcaacgtggatctcagtggcccgaacaatggccagcgagattagagaaagcaccgttctggttatcaagttcccagactggagtttacggaaaagcagcaccagaggatttcagtgctgattatgagcactggaaacgcgtagtgaccaaatcataccttaatggtttaggaatcaactgggcatctgttagaaatgtgatggacatgagagccgtttatggagggtaagtaaaacatgctttcctctccgctttcaattgaattcaaataatataaggtcaatcaagaaacactgtattgatgtttcctgcatctttaatgtttgtgttgattctcttgttgcagttttgcggcagctctaagagatctgaaagtgtgggtcatgaatgtggttccaatagattcaccagacacacttgcaataatctatgaacgaggactctttggtatctaccacgattggggcgaatctttcagtacatacccgagatcatatgatctcctttccgccgaccatcttttctccaaactcaaacaaaaggtttgtttgtg

SEQ ID NO: 23963 - DNA, 595 bp, Arabidopsis thaliana landsberg
  unsure (1)..(595): unsure at all n locations
ctcaggaatttaatgaagtggaggctaaggtttgagataaagactttgaaatggatgctgatttactagcggatgaaaataatgaagtggaggctgagttaggagataaagagaatgaatatgctgacaatgtagtgaatagagaaagtgaagaaccagttgatgatgctgctgctactgacgctgaagatcctactctgaatgttgctaaaacagctgctgaaccaaagcgtaaaaggaaatgaggaccaacgaagatgaaacacatcgccaaggacccaaatgaaaaggttcacgttgattatactatcatgggagaaccttgtggtccagggtcaataccttttgcatcctatttaggaacaatagtacgagaacatgttccttacacaattcttgattggaggaaagttagtgaaaatatcaaaactgttttgtgaaaatctattgaggtattctgtaacttacttttaaatggtgtttctttattaacttacatctgttttgtgtaacttgcgattttgaattttggatttgaatgcaggcaagattngatcttgaccaaccatggaaacatactacagcgtcaggtcag

SEQ ID NO: 23964 - DNA, 1035 bp, Arabidopsis thaliana landsberg
gctcccactcacaaagactcttgttgaacactaagggccctagggaacaaggtagagtgaaggaacctagatcatctagcttctttagtatcaccttcctttttatgatagcactgcactcaaagctcaattcaactatttcctgagcttcttggggtctttccataatcacttccttgggagtatcaaccaagggtaccttctcttctaactctttgatgcacttgatgaacatcatcttctgtttctagaagatcctttcgtcaatctgcgcaatcctttctggaaatggcagtttaggaacatagggcggtggaatagggattgggttgctcgggtcatgtgctcgttcgacaagtcgagcaaagaagtctagttcattctcttatcttgatctcggtctcaaaacctccccttcttgaatctcactgtcctcagtgtcagaagtatgaactgtggagatagcatgggcatactcctttgggttttgaacagctttgccaggaagttggccagggtgcttaggagctgaagtagaagcaatgtgtccctccatgctcttgactctagtgttaagtgcatcaatcttgattttcaagtcgttataagagcaatcaatcctagtggtgagctcagctagcttcttatccatggtcatggtacatgaggcttgtcctggcacaagttgttgaagtagagtcttcatctctgagtcttgtgctgaagtggtatgtggttgcggtgtgaagcctggaggtccaaagttctgcttttggttgtagccttggttgtagggtacaaaagcttgagtctgttggttctgttgagggtagacttgatcttctgggtttgtcacattgttacttctgtaagagagattaggatgagggggtttgtagttgttgaaacctttgttgtagccaccttgattctgtaggtaactcacctccttaatagtaagactctccccatcttggaggtgtgttagctctttttttgtaatgtagtggaccattctaagttgaaccaggcccc

SEQ ID NO: 23965 - DNA, 666 bp, Arabidopsis thaliana landsberg
taataatctcaaaccacataagagagtagttcaaccactacatgagataccaatagtgtttcagcttgttgttcttacgagaaaggggcacatgaaaatctaccataggcttgaaaacatttcaacaaccggtggtgttcaagagagattaactcaatatctccggtttcaacccactataacactgcattccatctgttttttgccaaaatatgaaactaagccttgaaacaatcttagcaaggtcaaaagaaatggatcaaactaagaaggatctaagagatagaggagatttatcagaaagttcaagcaaaaaataaaatactaagagaggacaaatagaatctctcacttaacctccatcctaggaacctttacacttcgcgacacagcggagccatgagtgcaatccagtcaatcctaaaatctgcaagagtctcaactactaaaatcctaaagcttgaaggaaaggtaacccgaaacaagccaaagatcgaatactaagaacttagaaatacacaagtggccgagtccaaactaattccgaagttacaaaacgcatccttaaactactgaaagaaacagactctttctttattcattcactatgtcacagacggaagatctagacatcgcgtcaatacagaaatacgaattgaggggagt

SEQ ID NO: 23966 - DNA, 899 bp, Arabidopsis thaliana landsberg
tttcctactcttattagatccaagaaagacgccacctccttcttcatgctcttgattgacacctacaatcatcttctctgcgtagaatcttgtcgaacggctataattgtacatcgttggagatctgctgcatacttgtctccattaatttgctaataaatcgcagtatcttggactcgaacccaaacttcttattttctaatatacacggttttattaagttcagatgtgatttcttcttaaaagattcaattcagattaaaattttctataacaatttatttttcaaaaaataactatgttttttgaaatatcatgttttttagtgaaatataacacgtgatattcaaatatcacatgctattttggaaaaattcactaaactgtcttgtatactgttgatcttgaaacaaacgaaggataattttgttatttcactttttctcacaacgtggatccatagctattttgcaacaaaaaaatttctctgctactttcttaatttgtgtatgtttatttggctattaattaatattacccttaattcaaagaaagagcaagccagaaaaatcagatttatggggtttcaacttttttttttgggtataaagtaacaaaatttatattgttcgctactgaaactaatgtgtaactagattttaattcgtagtacatcgcaggacgatttatttttaaaagattcatatgtataaaatgttgtaaaatgtatttatctataagatatttatatatttatagtttacaattattattaagtaattgtataccacgagtccatgagacaaatgttaataaactgaagatttagcgtggattaaactggcatattaatgatattttaaaattttataaatatcaattcaaatccgtcagtcata

SEQ ID NO: 23967 - DNA, 687 bp, Arabidopsis thaliana landsberg
  unsure (1)..(687): unsure at all n locations
aattctttgtccgacttgtgcctctgtcgtttcctctcgatcgaaaaagtaagtatttcccttcaaagactctccactgtgataacagagttcatccctataggtattatcatcaagaaccgtcctccatgaaacaaagctaaaatcgtagacatcaatatctcatcctcgactagttctgtttctctcgtcatcataaagaaacctcaagatcttgtggttacggttgttgttgtatcaaagagcaaaactttcaaatatgtgtaatgtgtttctgggtcgaatccatttagtttgccccaaatacggattccataacagaagacccgagctgttttttcggatgcatatgataagtgtcggactaagctaaaatgagaaataagcaaaaatagagtaaatgacgccgttgacgctaaataaggaagagaagataaattaaaagcttaaggttttgatgatatgtttgataaggttgccctaaagggaaatcaacctttaaatacaacttcactcttaaactgaaacgcatagttttgatagaataaagcatagtaaaattagaagcaaagcnnnnnnnnnnnnnnnnnnnnnnnncctccttcagtcactttttttcaaaagctttcccaagaacttctcataaacctttgcctttctttctactgaacgcattcttcttttaca

SEQ ID NO: 23968 - DNA, 1021 bp, Arabidopsis thaliana landsberg
atgtcgaaaatcttcgaatcttggtcatgcatatatcaataacagctactcacattttggctcatatggcaaatttggaaaagtagaaaatgatggatgcaaataagtgataaactttaaatcctttacagattaaacctttggatttatttaatttcagaaggtttaaggctctttaaaaatgaaattacttgatgaaagttatatgttcaaagtcgtaagaaaaaatttagaaaataaattagttgaaacatatatatataatatttatttttatttttattctgtgaaaataatgttaaattatattcaaagaaaaaatcgtgtttctacaactagtgcaacataattttgaaagatagtaattttacaatagaattctacacttaatttttgagaattaaatcaagcttgtaatcttttgtcatagcgtgtatttccaatgagtcgaattgtggaaagcctgctattaacatggaatcagtaaagaatgcttaatttatttcaactaaaatcagaatatttagataaataggaggcaatagtttattccaacatccattgtcagtttcttatatatagctatgtataacgtcttctttcattccaaataaacttggtggattttatacaaaatgtggaaactgataattggatctaaggcgggagatgatattcatttgttcagcaccaacaactatgttggaagacagatttgggagtttgatgccaaggcaggctctccggaggaactagccgaagtcgaggaggctcgtcagaatttcacagacaacaggtcacatttcaaggccagtgccgatctcctatggaggatgcaggtgaaatctttttgtagtgtataaacaccatacagttttgtctctacctcacaaaataatgttttcttcttttcttttcttttttggttttgtggacttaaaagtttcttagggaaaagaagtttgagcagaagattccgagagtgataatagaggatgcagagaaaataacgtatgaagat

SEQ ID NO: 23969 - DNA, 612 bp, Arabidopsis thaliana landsberg
  unsure (1)..(612): unsure at all n locations
ttatggttcaccttgtctcttcttttgtaaggccgttggttttattttgttaatctttcggaagcactacgataaaatcatgtaaaattggactttagaaaactatccatatatgtcattaaaccgtcgtaacgaacaagtgttgataggaatctataaatagttcatcctattgataaagatataagaaaagaaaaaagaatatgcacaaaatagccaaatttttgattataattaacaaactaactatatgctacagtacattatcaaaaacatgttggagagtacatatagttacctaatcttttataacacgctttctttgaaatacatccgaaaacataatatctctccttttatcatgttatttttttgtattacatgttacttataaaaagcaagtgatattttttggaaaaaatctattcagtttaataactctctttatcatgatattttgtagtaatacacgttttttaatattaaaatcacacgtgattactttataaatatattcttattttttagtaatacacgatttttatgaaaatcacatgntatttctttttaaaaagattctattcatgtaaaaaaattccccatacatgtttt

SEQ ID NO: 23970 - DNA, 575 bp, Arabidopsis thaliana landsberg
  unsure (1)..(575): unsure at all n locations
tgtgacaccgtcatggttcagcgttttctggtcaactctgttgtcccaagtgagcataccttcaactttagggtgccagtttttggtggccaaatgcaatggcgtgtttccatttgcatcttcttcattaatcaacttttccttgttcttatccttacaacatcttaaaataaatttgaggacttcgatttttccattctttgccgcaacatgaagaacattttgattttctctgtcaagtaactcaagtgcgtctggacaacgtttaagaattgccttgagaattttgacataaccatacttcacggccatatgaattggaaaggacccatcatcatcactgacataaacactgtctagagccttgtctaacagatagcaaaacccttcataataccctaaggatgctccaaaagaaagacaagtccttccttcatctctaaagttaataagacttgcatcttcactaagtatagcaacaagaatatctgctaaaaaggtattttttggcattggaaataactngaacaagacacataaagtgctagttaaaggttatcgaaagaacaaccttt

SEQ ID NO: 23971 - DNA, 751 bp, Arabidopsis thaliana landsberg
  unsure (1)..(751): unsure at all n locations
atttgatttaaacggggccaaaccaaaagcgagattgccactattttcatttgggagtaagtgaataaaatattggaaataagcacacaaacttgtacccaagttacttgtaagttattataaatttttttttaattggcatggtttcatttgctcgcatttctattaatgtttcgaatttaattgggacatatgagacatttttttacccaaattctcttccctttcctatactatgaaactaggatatgacccgccgtaccatatgttaaatattttattttataaaatagagtatttttttgtatataatgtttgttgttgtttgtgttgattaataatctcgataagattatgtacggtttttagtgagtcgtaactttacgacattaataactcaatattttataatctaagatttgacccatggtgataatattttaatttttattcataattaatttgtattataatttaaactctattacaattacacatttagatgtgtaaaaaaagagatttaacatttagaggtgtcaaagaagataaatacttattttgatatactataatgttgatttttaagacctacaaaaaattgttattgtttgttttgtttagtatttaaaattgtatagttgtaatttgattgctaattttaggattccgtcaatgatatatattgtcttatattaattaacatggatccanatctgtctcatctaaacccatgccgncatataaactcgtc

SEQ ID NO: 23972 - DNA, 1240 bp, Arabidopsis thaliana landsberg
  unsure (1)..(1240): unsure at all n locations
aggactcccccatatatccaaggtagaatcttagatttaactttcaatttacaactatataatctttaacactggacaggcaaataatagtagcatttaacaaatataattttaattttaattttaattttttagttagaaaaatatactttttattggtattttaaaaatcaacattattgtataataaaataagagttaattttctttgacgcctctaatgttaatcttctttaacacatctaaatatctaattataatacaaagttattaaattacatgtgttctaggggctaaatttaacaacacaaaaagtttaaattatgtaacttaaatacaaaaatttatgaataaaacatattatattaccttatagtgtatcatgggtcaaatcctagaagataaaataatattaaatttattaatatcataaacttacgacttaataaaaaccatatataatcttatcgaanaatttattacttaacacanacaccaatacacattatacataacaaattcttcatttataaaaataaaaaataaacaaaaaatactaaacccgtggtgtaccacgggtcacattctagtatgagttatatatagtctccacaaatatgtaactctaattatactgaagaacattctagagctagaatattcgctgcatctttatgtgttattgagcctttacttattattattttaaggcccaatgagataaaatatttgttatatgtgggttagaaagactaaatggtttgatcacacaccactaatgatgcattctctcatgttgaagatataaataacaccatttcacagccaaaattttaaatattttttatttttattaataaatgtatcaagtatatagttttttttaaaacaatcgactataagaaaacaaccaatcaaaatataagttgcaagtttcaaagagtatccaaccctatgttttaaatgatttgagtttttatgattttgttgatattaagtgaatttagagtagttgttatgatttgtttgaaaatcttcccaaattccacttaaatcatggtatttagatattatgtgttttcaactaagaaaatcctcaaaattattttaaatcatcaaaagagatgtgatggagtatgttgtgttttattcaaaagtcatatacaancctctcacaaacatatatttaattgtaaatttggatctacatatatgaaaaactcatgatttgtatgatgaa

SEQ ID NO: 23973 - DNA, 681 bp, Arabidopsis thaliana landsberg
  unsure (1)..(681): unsure at all n locations
tgaaccactctaaatcctcgcgtgttcctgagttcatcgtgcatctaccaacaggcaaaacgcttaagccccctcctcaccttaggatttagggcgggtgcactccgccacccggccggagaattccctctccaacatttggcgcgccaggtagggggcttggcattaggtttttgcttgttttctcgctcagcannnnnnnnnnnnnnnnnnnnnnnnnnnnnnnnnnnnnnnnnnnnnnnnnggtggaggaagaagttgtttcttccacgccacaggttcccaaccgcctagtgcggggcactgctgctgtgcactctgcgcggcacgatacaactgcacagacatcccggactccatcgagggcgactccgggggcactgtcggcagccagagagttgctgcgtcactctccaagctccacggcctcaccaggggccatgaagcagtggcgagatgacgtcgaccgattgctcggcatggcacattctacctcgaccaggtcgaggtcacggtcatcccggcgccaacatgaggcgtcggcgtctgtgcgctcaccctcagtaagggcgcacagaccaacgacctctaggctaaactcaaccgcagacgtgtgggagaatacgcccggatctctttggaaagggcgcgcgcgcactgaaaacgatcggtggtcgcaac

SEQ ID NO: 23974 - DNA, 769 bp, Arabidopsis thaliana landsberg
tcgcaaacgcactgttctggaattattgttttttgccaaggcaaaggtataaatatgcctaaacattatgttttgatatttaaattcatataataaaatatgtgaataatgttatttatttatggcatatctctctctaatacttcatgttttatattttatattatattgtcttataagtccgatcacgaaggtatgaccttcgtgatattttgatcatggtcttcgtccgaagttcattaaatccttggggagataatgcttcagtgaacgaagggcattaatatttaacattttatgttgccttgttcttgattcatagcatttgagaacaagtccccaacaatatgtgtagaccatgtaaaaacattcaggccaatacaaatagatttgatcacttagatatggctataaacactgcttactcagattttcaatattgaacagatttcagcacattgagctattcttcaaattgagtcaaacttgatatgaacttttttgaatacttccaaaagacatatatccattcaaaccacttctaaataaagtctcatgaatttttcaatgcaaatcaatccaaacttgattactaagcaaatagttcattcaatcatcttgtagcaacatatgcatacatctcattcaatcaactcatatgcatccaaatgaatttgatcaacaaagcttataccttgtgtacctcatgatcatccaataacaagcttcaactcaattcatttacaaaccactaaatattcctatcaac

SEQ ID NO: 23975 - DNA, 1923 bp, Arabidopsis thaliana landsberg
  unsure (1)..(1923): unsure at all n locations
aatctccggagaagcggggagtgatcggaaacgccttgaaacttgggagagagtagggtaatagcatctagggacacgggctacgatatcgacgacgatttcttcggggagtaacgaaatcagacatggcggctccggcggttgcttcttcggtgccctaattataattggggaagacatttcaagatcaatcggcgagagagaagaaacaaaaccctnnnnnnnnnnnnnnnnnnnaggaaatgaacaattatatacacgaagatccgattttgacttttggtatttattaaaagagaaatcagaaactcctgagatccttcttccgtttcagaaaagagaggcggttgtaaattttcaagaatttcttttaaccaatcaaagacgacggctcggttcggttcggttcggtaccggcttctcttaataagtaacatcgcaccgttttcaaaatttggcacagacaacanacaacatgcattcttaaacataaatggctaaatattagtttctctctcttctctatcatgtatctttgagagagagaaactttctactttgtttatagtttctgatctaaatcagatctacaaataaattttcgttttaacggataaagcttccggcgttgtccggtttatctttccgattagatcggattttttgtttgtgttttagtttttctttttccacatgtttacaagatcaattcggtttgctttcttcttcagaagaattctgctttcaccaaactcatcttttcctttataagggagtaatatcttcaccgtccattgaagggacctacaagataggtattaggtgaagctttcctttgaagactagatgataggttggaagcacctatcacgttcatgaagaagaagaagagatcaaaagggaggaaggctcgtgtttggtcgaagaaggaagaagaagaaagtggctaagagtctgttttgaagctgaagtgtgggagagcctctatttgagagacagggttcacttatatctaaataatgtcaaacgttgtagtttcttattacattagtggcaagtgtatgtaaggaaacatttcccctttctaggtttttttatcgaatgaaatcaaaacaacttctgcttcctatctcttctctccttcccccggtttgttctatctgtccctctaccatttatggttataaatttctttgttccggcttcagccctatcagagaggtgaactataataattattaaaaaattaatatgataatttagatatcaaatttaatttgttgattttaattggttacttttttgggaattaataatgtatttcgtttttctaattaaattaaattaattaaaatttagatatcaaatcttatatgtgattttgattggttattatttttgaaaattaataatgtatttcgtttttaattaaatttaattaattaaattagtatttgactttttaatccttaaagactctttaaaattttatttctaatggcatacctatgtaattacttacaaaaattaaggttacatttaaaatgtacttcccaaataatatataaaatgtacttcccaaataatataataggattgaagattgtatgttgagacattttttctttgatatacgacactctttgtcttcattgtttttaagtagaaaagtgaaaccatttcatacacgtttcctctaaccatggctttaacgtttgttagatacttgaaacggtttcttctttccaaaagtgttgtggggttcctttgattcggattaattaaagggtaagagataagaaggtatcagattcccataattgaaggatactcatcatgtggttgaagtggtaatctaaaactacttcaagtcctcccttcattttgaattggagtggaactgcctttacccttacttggatc

SEQ ID NO: 23976 - DNA, 530 bp, Arabidopsis thaliana landsberg
gagctaagtcgttgtaagccagtagaaacatcatacggtttgcctccacaatcaaagtgacattgttcttaacttatctttcttacagagtcatccctatgtttatttttcccaccaagggtagtgtgatttaagtctaggggttaatgaatcctttactactaatgctactctttattttgttgacttgagaccttttccacttttacatcaatacgttctaacaaaacattttttttttgttttcaaagtatcattgggccaaagatgatgtagggaacgatgaacctatcatatgatcaaaattaccattcaaatgtgctaacttattcgcaggatgatatacctcgatttttaccgattttagtaatgatttaggtactggttttagagtctttttgttatttctagagtcatttctagtactttccaggtttttatacgtttgagatgtatttggaaagtatggagaatttaggagcaaaacagaggacttatgttgcaaaagcgctccagagtcctgtttggcg

SEQ ID NO: 23977 - DNA, 1281 bp, Arabidopsis thaliana landsberg
aatccctcaacatttcattaatacattcgcatctaaatcacaaatcacaaaacaaggtaagtcttaaataacaagtttcacaaaactcaatcatctcattaagatccaaaagcatctaatagtctgaaaacaagtttatgtatcaagtttcacaaacaaaacctcatgccatgatcgctttgtcttcaggccaagcaataactgtcccaagggcatcttccataatgtctatttcatctgatttcctccaaacttctgcatcgctaactttgacaatgtcgacccacactttatctgcattagaacccaaagaagcaaagtgaaccttctggtttggatcatttgttgcccatcggccttcaacaacaacttgattcttgtcggtaatgtctatcaacatgcgcttcttattttcctttgaaccattttgcatgatacgctgccatgttacaacataaaacaaaagtcaaaagatttgacaaaaataaccagaacaaaataaaatagagtacttacctgtgatttccggataggagactgtgaatctggtatagatttctttactggagagcttggtcgtgttgcagtctcaataagtgattcagaacctgatcgtgaggatttagaggcacttgtctctgtagattttgtcccaacagcagttttagatcctaatggtatatctgttgatgcagaatgctgtctagcagatggattctcaaagctaactttattgacaggtcatgaaacaaaagtcatcaaacagtcttcaaggtaggtcatatccattgtaggcctccatatgaatgtttctggttgaagcactgaatcgacaaatacctttactgtctttggtccaagaggtagtccattaaccaatgtagtttcttcttgtgtctgccaacgaccctcaacaacaatcacatcatcattagacaaatccagcagtttacatttattcggagagtttgctcgtcggccctgtcacaaacataatttagaaaacaactccgcaaataccaactcataaataggttgagtacaacgaagcaacaataagaaatttaccaaatgcccaatgtcttctatttggatttccttgtccaaaagaacacacttagtcgctcggcatgcaataatctgtccaacaacttcctccatagtaaacatcttagttgctggtctccagaggaatgcatctgctttactagttgtttcaaccaacactttcagatctgtagggcctagacgacagtcattcactaagtcatgaggatcaaa

SEQ ID NO: 23978 - DNA, 621 bp, Arabidopsis thaliana landsberg
tgaagcgggaaaagtcatcaacaataactaaaccatacttactccctcctatgcttagataggcgacaggtccgaagaggtccatatgcagcagctccaggggtcttgaagtggtcatcacgttcttgctgtgatgtgctcctcccacttgtttacctgcttgacaagctgcacaaggtctatctttttcgaaatgcacgttagtcaaacctatcacgtgttctccctttagaagcttgtgaaggttctacatccccacatgtgctaagcggcgatgccacagccagcccatgcaagtcttagccattaagcatgcatctagaccagcctcttctttcgaaaaatctactagataaagtttgtcgtctaatacacccttaaacgctaatgaaccatcactccttctaaagacagatacatctatatttgtgaataaacaattatagctcatgttacataattgacttacagacaataagttgtacccgagcgattcaactaaaaacacatttgagatagaatgctcggatgtaatggctatctttcccaatccttaaactttgccttagttcccatctccaaagataatcgcatcctaggaatccttgttcttgatgtagg

SEQ ID NO: 23979 - DNA, 466 bp, Arabidopsis thaliana landsberg
caagttccatacataacaaatcaaagaagttaagttcttacaataacagtttcaaactctggttttacaggtctcccatccgaatgtgtatgtcctacaatccagactttacttcgtgtcaccttactagggtcagaactctttttcttgtacaagtaacaagtgaaataaaatagagtcaatctgttgtgtgtaactaatcagtgtgtaaatttcaacaaccataccatttcatgagctagtcgaaccattcctttccggcttgtggtgtggggaatctgattcctcctcaaattcctatatttttcacttattgcctgcaagtgtaaccaataaattaagataacaaatcaaacccctgaattcagattctaaaaagaaaagagaaatgtatatacacaaccttagaagctgtggatgttttactcttcacccaatttgtccaagctgtcactgattggatgtt

SEQ ID NO: 23980 - DNA, 849 bp, Arabidopsis thaliana landsberg
catgtgatagcacaatatattttttattatattattttttcgaattgcacgttttttatattttgcattcttgggaaaaaataacattctattcagtttaatatcacatgttatttttcatattacacgtttttttattaagatcacatgtgatttctttaacaaaatattatgttcaggttaaatttatccataacaatgttttttattacaaacacactatgtacaatgtttttccttaaaaaatcactatatttttttaaatatcatgtcttttacttaaatataacatataaaatttaaatgttacatgttattttgcaaaatctcacgaaactgtgcttattgttgatcttgcgacaagcaaaatatggttttgttatttcaccttttttacaacgtgtgtccgttactattttgcaacaaaaaaaaattctctgctatttgccttaacttttgtgttttatttgactattttttaaaattaccatttttttattgtttatttttacttttaataccctatctaaaaaggtttcctaatagcttcaaatatcactactacaaaaattgcttattttcaaataagattcttattaagattttatttttcttattgttcaaacttataaaaaatgtttagaataaaccgctcttaaaaagcaaaataaaatctaaacttacccattgagaattaagatgagaacaaataaattatagacaagattctacccaaaaaaatcacttcaacatgagcatgatatgaggtaaggctggtatgagaagcaaagcgaaaacgactatgaagagaagaatggcataacaagtccatttcctcgagctcttttg

SEQ ID NO: 23981 - DNA, 1074 bp, Arabidopsis thaliana landsberg
aatattcctaaaaatattcatttttagagtagaaaatagagatatacattggagaaaattggagaaaaactcatctttaaaattgagttactctattttagaacaagatatagaggtatacattggagatggtcttatgcttgctattaaattatgattacatccccggctatttagccttgataccaattagcaatagagtttccactttccactcaacctgataataaggcacaatcatcatgttttgagaaattaatgtaaaagaaacttacatccccggctattggtacattagtaattaatcaagtgaatatttacgattcaactaatctttactttgctgaacaacaaagtttctcaactaacaaaaacaattttagttttttttggactggtgaaaattgcaaggtgtctataagcagctgattttaaaacactggttttttggtaatgagctctcatgataacccttccattctcgatcttatcgaggaaaaagagttggttcagttgcaagatatagttgcgtataagttgccaataaccaactagtttccagttattcatcaggttcagtgtcaacttttttttgtttggcttttcatgcattttaatagaatatacattaaaaaaaagaagtaaatattatactaaataacctaaagaagatccaaaaggaagaaaaaaatcagtaaaacatgcaacaaattttgatgcgcagacgataaagttttatattttttttgtgatttaattagttcattcatgtctctacaagctaatagtactattatgttacactggtttttcttttgttaaatatcagaaatctttgtttaaaactaaaaattagaaactcttggcatgtcaccatttcttatatcaccaatcaaatccattatattcataaatttcctaactcaaatttattatgatggtatgaaagtaattagaaaacaatagcataaaatgtgacttacaaaaaacaagcatttttcaaaagtatgaaattccttttttgtttttttaggtagttgtcaaacattacatgatttccattaggtttgccta

SEQ ID NO: 23982 - DNA, 1013 bp, Arabidopsis thaliana landsberg
  unsure (1)..(1013): unsure at all n locations
acacggaaatccaaaagtaattgcatttggtacaacctatggcgactcctttttcatctatgccgcaaccctggcaagtcttgacgttaccatgttctagtttgaggtagagtaaatgatgatcatgactttcatggataaatggcacagtaatcgaactgcatagtaagtcgaagttctctcccaactcccacgagtaaatgaatcctttgcaaaaaatttgatgacaagcttcgcaaatttcttcgccaatatggcggcgttgaaggaggtcaaagctaagtgccagtggttgtgggctcaaaaaatgtcgcttcttcataggaagattagcacatgtttcatgaagaaagaaactgcaatctgaatctggacacttgtagagagagcaagaagtaccgatggggcaaagacatccactacaccagctactttctccacatcctttctcgaagctcattaggttatggtaatgatgagcaaaatgagtaattgtgttgtcatcattcctcttgaatggctcgatatcttcaacttggtcaggtactccatctagctcttccccattccacacatcgccccttgttgcacatagtgaatgaatagcgtaattaggacaaagagaacaagaataagccccatatgaccaatcaatctcttcccaacaaactccacatctccattctccaggaccaagaggatacttgtacgaaacacggtgatcatggtgattaacatgaatgacacgtggtaaacgagcacacttttgatggaacatcctgaaatcacattgaacacatacgtaaggagcacggtcgcctttcgtcccacaagcatcacaaatgaaggatatcaatcttggcatgagtgtgagtgtatgctcatggaccttgagatctgaaagagcgactggtatgggattttcaaccgcgcattccaaatccaaattgactttacaaatatcacaatggtatangtaggttccagtttcttttccacatatatgacaactt

SEQ ID NO: 23983 - DNA, 673 bp, Arabidopsis thaliana landsberg
gaaaggcccgagggccaataattcataatgtcatcccttcgtgggcctagggaagaacgaccagtgaagcagatcaacacaaggccgaatcggtgcgagcccaaacggcccaacaacgacgagcaagtaaccacagcagagacccgactttcccgcgctggagccccgtacaatggaaccaagcgaggatgagtcggcagaactataggaagatagactcaattagttcactatctcttaggtgcgcattgttatcatatccgcatgtattgcctcacggtcgaatatataaggcctagggggcaccccttcagaacgatcgatctcactactcagccatccaccccaactctctacgttctagcattagagagctcccttgtaatccaccacataaagcattatcgccaggacgtagggtgttacacatctcaaagcggcccgaacctgtacaccattgtctactgtttctcgtgcaccttgcacgaaccatcgagctacagtcggtaacacgtcctactcctaaaaacaccttgaggggcaacccgggtgtgcggtcggcccaaaacaccgacacttgtgacttaggacgactttttgtgcatcggtgactttggactcgtagtctgtggggagatatattcattatggcaaacaaagctatcaaggaatg

SEQ ID NO: 23984 - DNA, 1048 bp, Arabidopsis thaliana landsberg
agtttttctttgtgaaaggaagagttgctctccgttatggtggatttactagtttttgtccgttaaccactttgtcaagctgttctctcgtgtggtttggtggtaggtgagttggcatgtgtttgattctggttatattgcttgatgatggttcattgttcaatagatttttcaagaacaaaaaaaggaaagcgtaatagaaagtgatctgcatgcaactttagtacgaaagattttgtattataaaaatcatataaatgaaagttggtcaactctctcatatgaatgacacgtcatcacacaataaaatgacatgtgtcattttatattttttaaattaaaatttaataaaattaaataatcaaattaaatgtatcatcaatactaattttaattgatttcttcaaaataaaaaaaaaataaaaaaattatgttaataaattaagcactacttacattatattctttttattttactaatttttaatcatcaataatcactattctaatgactaattttttttatgttgtagttgtttgctacctaaccttttattagtttagtaattttattttgagtctttgatgacattaacattcaagttttttcaaataataaacctttaaaacattagacttaccaaataatttaatacacgattatttctcttatatggatatatgcaatgagagaagatctaaaagtattgacttaaatgatactttaatttttgctttctttttattttttcatatgaatattcttgaaatcttgttcagtttatatcaattctatatatttaatcatgagcctataacaatgttgttggagtattatatcaagagaatacataaaaccagaaatagtttgtttgtaatcaagttagacaattttcaaatcatccaagacacgatcattttctaatattgatatatgcaatgacagaaaatccaaaagtgttgacttaaaagatattcaatttttgccatctttttattttttacatatgaatatttttcagaatcttattcagttgatgtcaattca

SEQ ID NO: 23985 - DNA, 575 bp, Arabidopsis thaliana landsberg
gggggacgtttgtgaggaggccagaagcggatcaccacttacgcgtggagaaggcccacatctatctatggagttacttgaccaggtgcttgccccttctgtgggcttccctttgtgtaggggcaccaactaggattagtaagaactttacacggttctagatacctcggtaaaaataccggcgtgtccacgggagcttgcaatctcaacctttgctctttagcttctgcattaacattgattacttaagctgcaatctttactattcttagtctagaatataggtttgaaacttaggttgtgtaacttcttttgcggtagagatagcaacgcttagacaaaacttagatttcacattcttgtttagttatttgcatatgttttgtttagaagatttatttgtggcctagatttgcaagaattttagaagtcctaattcaccccctccttaggtgtatgtgttcctttcaattggtatcaaagcctgctttggttcatttagacccttttagcttaacttctattagagccaacactttttaaaggaagtaatggtgtacaccctgaatttgggg

SEQ ID NO: 23986 - DNA, 627 bp, Arabidopsis thaliana landsberg
gctagagcaaaatgatctttcggttgagaatgcagtgagaaagctttggctgtggtcaaattttttggcagcacaacgatgcaatagcagtaaatgttgtggtaacttcacaactaccagtctgtttatatagtgctgcaggagggaaggtgaattttcaggccgctcgcacccgttgaacagtcacccgcactcgttgaacggtggaccatagagcccaagaagctgaatcaccagatcgtgcatacccgttgcatggtgggaccatccttcactcggaatattttaatcgtttctcggcaatgagctcagtgaaggtgtttttcggacctttggcattccgaagcctgagagagtttttcacgggtcgagctcatcacgaaaaatgatccggcaccgtgaaggggctactgttgggggtccgcttcgtcgtcgaaggtcctgtgagaagaaacaccttcggaagatcaaaacagaagcaatgccgaagctatcaatcagggagcttcgtagtgtaccttcagatgcaccgacttaaagatgaaaagaccaattgacccatgaaattttgtgttatgattgtaaccggttgtaaaggacggggatcctctagagtcgacctgcagg

SEQ ID NO: 23987 - DNA, 548 bp, Arabidopsis thaliana landsberg
  unsure (1)..(548): unsure at all n locations
ctaagcaccagaactagctatgttatttcaaatttcacagcaatttcaatcgaacctaaaatcnnnnnnnnnnnnnnnnnnnnnnnnnnnnnnnnnnnnnngcgaagaacttgtggtgaagagaagagaagactaaccagataagaagagagatcgaaaatgggaggggagaaagacaaggaatcagcggctctgtaaaggacgaagcaggagatggagatggcagctagaaatagagcagctcggcggacggggattgatggtcccggagacatctcgccggaaccctcggcgaaggaattattagcggaagacgaagcctcgaggctcgccgtgtggaatctcgaaccgacacggtgagatagattcatcaccaccgaccatcgtcacttacgatcaatgttaggattttgcccaataattttaatttctattattaatcatcaatttttgcaaacataagcggttacaaatttaatgtgttccataaattataccccactacaaaacgctgcgtgtaaggaggataaaacgctgcgtttgaaggt

SEQ ID NO: 23988 - DNA, 560 bp, Arabidopsis thaliana landsberg
tcacatatatattatcatcagcatttctgtttttttactctgaaatgttaatcaaagatgtctaaatccaccattctcgctattttcatgatcgtcctcgttctaggtttgccttacatttaccattctttaaaacatttaatacattttttttggttttataaatttttttttaaagattatttaaaatatttgttagggatggtaacgaaagagacgcaaggacaagaaatgtgtcgtgatattttaatgaaagctaagaactgtgatgaaggcacttgtgatactctgtgtaagcaaaaatggaaaggaaatggatcgtgcttcccaaacgtttatacttatagaaaaagttgtctctgcacatttccttgcaaaacttaacttttatagactcaaattctaatttaaaatagtaataaaattatgataataaaactaataataatgataatgatcatgataatgataatgataatgataatgataatgataatgataatgataatgacaatgaccacgacaatgacaatgacaatgacatgaactaaaactaaact

SEQ ID NO: 23989 - DNA, 587 bp, Arabidopsis thaliana landsberg
tcaaaaacattataatgggttgcatattgacccgacccgaaatggaggcccaataccggaaccacgacggagacacctctttctctagcctccgtgtctacctcaactctctctccgacactccctcccgtttttcccgccgagccgtttccgtttccacctcttacgacgagatgagccgcgtccgcgccgtctccggcgagcagatgcgtcgtactctccgttggtacgatctcatcggactcggaatcggtggaatgatcggagccggagtcttcgtcaccaccggccgtgctagtcgtctctacgctggtccttcaatcgtcgtctcttacgccatcgccgggctctgcgctctcctctccgctttctgttacaccgaattcgccgtccatctcccggtcgccggcggtgccttcagctacatccgtatcacattcggttagtctcccgcgaaaatcatcactactcctccgatctgttcacggttttctgaaattttaatttcaaaatcaaaaaccgtaactgatttcttttctgttacatttccgttcccgtgaacttccagcatttttcaccggagcata

SEQ ID NO: 23990 - DNA, 1183 bp, Arabidopsis thaliana landsberg
ttcatcattgtatctgcttttgtgattgaatgattcgttttatttgttgctaacttgcgtctttttctattttcgcctaacagatggatgccaccacccccaaatactccaaggctaggtacgatgaaatcatcaaggaggtgtcttcatacctgaagaaggtcggatacaaccctgacaaaatcccatttgtgccaatctctggattcgagggagacaacatgattgagaggtcaaccaaccttgactggtacaagggaccaactcttcttgaggctcttgaccagatcaacgagcccaagaggccatcagacaagccccttcgtcttccacttcaggatgtctacaagattggtggtattggaacggtgccagtgggacgtgttgagactggtatgatcaagcctggtatggttgttacctttgctcccacagggttgaccactgaggttaagtctgttgagatgcaccacgagtctcttcttgaggcacttcccggtgacaatgttggattcaatgtcaagaatgttgctgtcaaggatcttaagagaggatacgttgcctctaactccaaggatgatccagctaagggtgccgccaacttcacctcccaggtcatcatcatgaaccaccctggtcagattggtaacggttacgccccagttctcgattgccacacctctcacattgcagtcaagttctctgagatcttgaccaagattgacaggcgttctggtaaggagattgagaaggagcccaagtttttgaagaatggtgacgctggtatggttaagatgaccccaaccaagcccatggttgttgagactttctccgagtacccacctttgggacgtttcgctgttagggacatgaggcagaccgttgctgttggtgttattaagagcgtggacaagaaggacccaactggagccaaggtcaccaaggctgcagtgaagaagggtgccaaatgatgagactttcgttatgatcgactctcttatggttttctttggttcttaaaactttgatggcgtttgagcctttttcttttttctctttatttctgtgactttctctctccctcctttttggatatctctgagactttttattatggttttcaattatgcagtttccggataattttgcttgaaacttatttaggagttgtgttacaaagttg

SEQ ID NO: 23991 - DNA, 1096 bp, Arabidopsis thaliana landsberg
gctatcctctatgaaaactgtgagtataaaatccattttgttcttcatctttatattcaattttgtagtcatctctttcactggttaattctgtatgctgttcactctccaaacaagactgtgccggacattaatatgaggagctcctcactctcgaaatatgaatctaaatactctcctaaaatctgacttactctcatacacttaatgaaattttaaaatccatgtttacccttacccaacataccaaaccgatcacggtttagtctcttaatcgatgcaatcccatttatttaattcataaattaaaaacaaaaacaaccaatttaaaacatacctctctttatcttcatcgagacaaaatcgatcccctttgcagccatcgtcgaatccttcgtcgtcgaatccaatcgaccaagctcatctttgttcttcgtctattattcaaagtgagctttaccattctcttcttatattcttcacatcttaattcatccagtcttgtgttgttgtgtttgtactttggagatttcagttagatttgataggtttgaaattgatgttgaaatccaaatgagaagtacttttgataaacgggtcgggttaaaattgaaatttaattgaaattaaagtcaaaatgggttaattaacgggtaattttacaaaccgggtcatatgattttagatcttttaatcattcccatcttttcaattaaaaaaaaaaattaaataacccaaaaacaaacaagtcgtaactaatacacgattatggtatcaatcaataacaatccctactaaaatggtaactaactttatttagttacctttaacaactttattttttcatgaatattgtttgcgggatccggtaatattctctaatatacttggttaaagatactaaaatctacataatctccaatcatatcctaacttactaccttaaatattctctaaactacatgttctacaaaatagtcaattatattccgtatttattaactatatatttcctacattactaaggaaatgagcacattattgacccaataatttagattctattatccttgactaactaaatttattctcaaaa

SEQ ID NO: 23992 - DNA, 532 bp, Arabidopsis thaliana landsberg
acgacataatatataattatgtgttttcgaataataattattaaacactttatcttagttggtgtggacatgcatagggagcactcgaaggttacgggttcgaatcttcagctagcaatttctttttaaaatataaaaacgacttcggttaagggtattttatacatgtcaacggacgttagataatctgttaacgactgataacagatagtttatttggcttggataacgaatgtttatggtttaaacgggtggttaacgatatcttcatgtttaaaatggccacatataaaattgtggtataaaatggccataatttgaaagttggagtattaaacgacatttttcctgttgtaatttgtcaacaccgtgaattttattgggtggggttatctttgtcttgtgttgtgttttcattggtcactaaaatttgacttttttcgtccaataatttttgaactcaattaaattataataaacttttttttttgtcatctgataatttattaaagaaaaaaataataaagtacat

SEQ ID NO: 23993 - DNA, 1058 bp, Arabidopsis thaliana landsberg
  unsure (1)..(1058): unsure at all n locations
attaaaatatttttgacaagataaataatattattttatcttttactaatgggaatttttattaattgtaaaagaagtattccattatagcacaaacctgcaacatggattcttcgtgacttgagttcaaacaaacattaaaccacaagggaaaaaatatggaaaagcatttcattttgtcttgtttgaatcttcttcgtctccatgaattgaagatccttgttgaaaagagagagaagagctcatggcgtctcgtaccgagaacagtagtagcaaaagaacccatctttcaaaaccttgtctctcctcctccattgatggatttgaagatcgtcagaatcgttcttcagctctttctgttcacttaaaggctctttctacgagtattaaattctggggttggaggtttccaaacaaaaagttcaagtcttgggctagaaaaatggcatctttgcacgaacccatttggagaaaagctgggatttttgaagctgttatagcttcaacatacaaaatccctaaagacacagatcttgttctgggtttagctgagaaatggtgtccagacactaaaaccttcattttcccttggggtgaagcaactataacccttgaagacgttatggtgcttttgggtttctctgttttgggtttgcctgtttttgccaccgtggatagctcaaggaaggagattatggcgaagctagagaaagaatggaagaagattaagaacgataaagtctgtctggtaaccaaattagcatggatggagagattcatgaacagtggtgatgagcttgagcatgttgggttccttgtgttgtggcttagctactttgcctttccatcacacttatttcatatctctgaagctattttgccagtcgctgttcatctttcaagtggaactaagatggctcttgctcctgctgttcttgcacacttgtatgcagacctaagtctcttgcaaggccacattagagttttcagtgaatcgcttattaaggtacagcttgatcttaatgcttttgttaagctggntcaagtttgggcatggg

SEQ ID NO: 23994 - DNA, 885 bp, Arabidopsis thaliana landsberg
tttggcgcaatgtcagacatctgtataagccaaaaagcttttttctgctaatgtctgaagctgtcgaagcgtgtggatgtcactgagttcaataggatatttctcaagatataaaacttaaacccaggatgtgctgcatatttagttgatttgagtaagtttgtttccttcttcataatattggtcatcaagcacagattgatatttactagttatagattcagttgtttacataaccctttatttttggtggatgtagggttttcagaatggattctttagagtgcattcaaaagtgcattcaaaaggtcggcgtttatagtgcattcaaaaggtcggcgtttcaatatcatggatagtaacatctgtgagtcatggaacaacgttataagagaggcacgggagtatcctcttatttgcatgttggagtacataagaacaactttgatggattggtttgctattagaaaggatcaagctgaagactgccctaccactttatcttcgttagtgcaggaaagagtataggaaatctatcaagccgtcatgtcaatgtctgttaagccgatttgcaactttgagttccaggtccaagttcggactggtgaatgttttattgtcaaattggacgagtctatttgttcttgcttggattttcagggtttagggataccttgtgcttacgcaatagccgctactgctcgacttggagttcttacagattcgttagcagcaaacgaatattttaatgagttagtgaagctaagttacgaggagaaaatctatctcgtggtgaattcaaggcaagttcagaacatttaaagagtacatagtccattctattttttaaaagctaacagcttctatacttctaatttgcagcgc

SEQ ID NO: 23995 - DNA, 648 bp, Arabidopsis thaliana landsberg
aacttttcattagattaatttcactcgttgcaccgtgatttgaggattaatgatgtagcatgtggtaagatcttctttaccaaacaagtgacgtgtcaacctttatgtagaaatctttttcatggagatacaaagagagatagaaagatagaggacagagaaatatataggggttaaggaatggagaaaaatgcagagaagaaaagaatagtgttggttccatttccattacaaggacatatcactccaatgatgcaacttggtcaagcacttaacctgaaaggcttctcgattaccgttgctcttggagattccaatcgagtaagttctacgcaacacttccctggttttcaatttgtcacaatacctgaaaccataccactatctcaacacgaggcactcggagttgtcgagtttgtggttacgctcaacaaaacaagcgagacaagtttcaaggactgtatagctcatttgttgctgcaacatggaaatgatattgcttgtatcatttacgacgagctcatgtacttctctgaagctacagctaaggatttaaggattccaagtgtcatattcaccactggtagtgctacaaatcatgtttgttcttgtattttaagcaaggtcaacacccagaaaatggtcttt

SEQ ID NO: 23996 - DNA, 609 bp, Arabidopsis thaliana landsberg
  unsure (1)..(609): unsure at all n locations
cctcttcttcatcaacattttcttcttcgatgttnnnnnnnnnnnnnnnnnnnnnaggtgcaccttcgtcaatagcttcctccatcacaaccaatcctgattgtctcatgacttcgaagatcggggctgtctcggtggcttcggcctcctctccttcacgggtcacccttgcggtcgagcgtactcgagccatctaatgatgattttcttgtagtttttacaaagctgatgtctttacagttttttgacgaagctaattcaagatgatggttcgctcgagaatttagtgaaaaagcttcggctatggttaaatttttcaacagcacaactgtgcaatggcaatgaatgttgtggtaacttcacacctacccgtctgtttatatagtgttgtaggtgggaaggtgaatcgtcaagttgcccgcacccgctgaacagttacccgcacccgctgaaaggtggaccactcggtgcttgggaggtgaatcccagaccgtgcgtaccgccgcatggtgggccactcgcgctcggaatacttaattgttctcgcaacgagccagggaaggtgttttcggccttcggcgtccgaagccttggagattttcacagatc

SEQ ID NO: 23997 - DNA, 587 bp, Arabidopsis thaliana landsberg
  unsure (1)..(587): unsure at all n locations
attcatcgatgtacaggcaaggttccagggggatgatggccttgtatatgtttcttttctcgagatattgacaatgtaccaacaaggaaacaaatccgtaaatgacttgtaccaggaggtagggttcttggtgggacattttgtgtgttgcacttcttagctctttggtttgattagctttgttatctttgcttgcaggttgttgcacttcttcagggtcatgaagatttagtcatgaagttttcaaacgttttcaagagaaccactggtccatcagggtcaaaatctgctagaagcagatgagtacattatagaagactgtctctgctttattttaggatgcttggaatataatgtttggggtacaagagacaaaaagagtacttctttctaacgagaagtgagtgtatagttatcatttgtagacatttgagattagtttgattcttactcatatgcttctatatttgagatcaatgagatgcataatggtttgggtaaatataagagactaaaacgagagtgtatgatttcgttggttaaatcttaccaagaagacatgagattttggngtcatcttagtctaa

SEQ ID NO: 23998 - DNA, 785 bp, Arabidopsis thaliana landsberg
ttttaactcccaaaactgtaatgaaaaatttcaatcatgcaacttcttttttagaccaattcaaagtcaatttaatagtgactttttttttttttgtgaacataatttagaagtgacttaattcattctttcttcggtacatcctctccgctaaggtttttaatttgtctctttgtttcttttatctcttcttcagacctcgatatgactacttgtgttactagaagaatctgttagaagactgaatggtacttgaatttgattcttattgtaaaatcgaggtttcatgaaatatggtggtgcatgcagaataatttgtaagacttaatttggatatttatgtaacgctccgacccccctaccagtgggttccacatcctctctcgggcttatgggtccacccatgtccgatggtcggtacgccatatctgggaggttttaaagacttgttactaaccctacaaattaccacatgatatttttccatgttttatcctcactcacatggttccgacaatcacttttcggaaggtcacccattttgagacgtttgaccgaaaagataagtgcaatttaatgacataggtgttcaaatcaattcttttaaacctctccgagtgcaccaccatattcctgaaatcggggtgttataatttctgtaacaccccaaaaattcaaaagaatttatgaagcattactaaaactaatataataaaaataccaaaacttttacaacatataaagttgaaaatctaccaagtctcgttttacaaccaaaaaacaaa

SEQ ID NO: 23999 - DNA, 398 bp, Arabidopsis thaliana landsberg
acggaattgatgaagatttacagatgaattcctctcatcgcctcagcttgagaatccatatgagaaattttcgccaactcttgtagcagccgctgaatttcatgtgaagttctctccagacaagttaataccaatcaatcattcttacgacccaagatatttttcaattggctacgcctctggcttgatctatatctatggtgatcgatacgtggctagacctctaatatgtaaccccaacacaggacggtatgtgatcttaccataacgttatacttatagaaaggcgtatagttttttcgggtttgaccctattgataagcaatacaaggtcttgtcccttgtttatccatctggtcatggtcataataaaatacttacattagaagatggagatc

SEQ ID NO: 24000 - DNA, 645 bp, Arabidopsis thaliana landsberg
tgcttattctgtaattataccttcattgccaaagctctattggtttcaagcaacatttgctctttattttgaagatccgagagctggtcaagcatgtactgtgtctgcaaacaatcatcataccaccatagtagttataattaaacaacacaaattaatctcatttgaatcattgattccatgcataaagataccttgatggaccgaacttgcttgagagagccgtccagttgacgctcaagctgctctaactcctttgaattcaaaggtcctaaatcctccccaagaagatttctgcaccaacaaaagccacacacacctacaaatatgaatctacatggatacagaattgagtaaatatatggaggtatagacagatatgtacctctgttgacgttgaaggttctcatatctacccttaagcttcagatattctctgtagctgttctgaaatatttcacgaaaacaaacttttaaaaaaaaagatctttcttgaaatgatatgataggaatctaaaatagtatttgaattaagaacacctcaagttctttggcaggtttgttgttgacttcaatggatccatagctgcatttctggtaccgatcaagtgtcttgagcatgctgaaaataactctatccccgag

SEQ ID NO: 24001 - DNA, 558 bp, Arabidopsis thaliana landsberg
tggtcgcaaggttgacgatgctggtatgctcacatcaacgtcctaaaccacacctccgcatatagatgaccaaacagcggcccagcacgggccgctaggcccgatgcccacggactacagcttcggcctagacacggcaagtcggcctgccgggccggcctgttagcccgtcagaccatttggttaattcagcagaaaatgttaataagaggtgcaggaggtggggttcagatctacgtcctcatggaagaagggcgggagacactgggttaagacagctaaccagtagaacatcatacttatgtgtttttaatattgaatataaattgtacatatgtatatacgattttttgtaaaataaaaatatataatcatgccggaccaggccagtactacgaactgaggctacggcccaagcacgacacaatgctcgtgctgggctggcctaggcactattaaaatgggctgtactcgggccggccgccaaacacgagcgcacaataattatggtcataaccttagttgtcgccactcattcaccatctgcttcttttctat

SEQ ID NO: 24002 - DNA, 585 bp, Arabidopsis thaliana landsberg
gattgctttttcaactctcaagcttttctcatccacgttctcctctacaatcttaatttctcaagtggggcttgattaatgatttgatttaggcccaaaaataatacttttgggttttctattttgtgcttttaagcgtataataaattttggttacccgaataaaacccgaataacccagaataaatttaattcggttaaagttcggaatcaattttaaagcctagaaccgacccgaataacccgtgtaccgaccgacccgaaccgaaatttatttcggtgagattcggtgaaatttttggtaaaccgaattttcccaaaaccgattaacccgacccgattaacccgacatgaccgaactcccaggcctaggaaattgtgttagcatacgcaaaacaataaagaacataaaaaatatgtgtgtttatttaaggtaacttttgtcaatgatattgtagtatttatgcatttttatataatttgttgaatttgagtaagttattcgtttctaattatcgattgaatttatattttaaaaattagatggaaatatattagatgagtagtccattgatctaatatttt

SEQ ID NO: 24003 - DNA, 953 bp, Arabidopsis thaliana landsberg
gccctccaaggattttgatgactttgttggcttagaagttcatctaaaagatatgagttttttgttgtgcttggattccaaggaagtgaggatggttgggatatggggtccttctggaattggcaagactactattgcaagagcgttatttgctcgactctctcgtcacttccaatgtagtgtgtatattgacagagcctttgtatctaagagtatggcaagttatagtagagccaacccggacgactacaacatgaagttgcatttgcaagaaacgtttctgtctacaattttagggaaacagaatataaagatagatcatttaggtgccttgggagagaggctaaaacaccagaaagttcttttatttattgatgatttagatcaacaagtggtgcttaacgccttggcgggtcaaattcaatggtttggaagtgggagtagaatcattgtggttacaaatgataagcatcttctaatatcccatgggattgaaaacatataccaggtttgtctcccatctaaagaactcgcccttgagatgttatgtcgatatgcttttaggcaaaacactccacctgatggcttcaagaagctggcagttgaagttgtgaggcatgcaggtattcttcctttgggtcttaacgttctaggttcgtatttgcgggggaggaacaaaaggtattggatggatatgctaccgaggcttcgaaaaggtctagatgggaaaatacagaaggctctaagagttggctatgatgggttggataacaaaaaagatgaagctatatttcgtcatatcgcatgtcttttcaattttgagaaagtcaatgacattaggctgctgctagcggatagtgacttgaattttaatattggtcttgaaaacttagtggataagtccctcgttaatgtaagatcaaatattgtggagatgcattgttggcgacaag

SEQ ID NO: 24004 - DNA, 818 bp, Arabidopsis thaliana landsberg
tgatcttaatatgtttgtttgatcatttttttttatgttgtgttttgatcaatgacattaaaaactatcggattttagtttttagaattagtttgataacatttttgttgaccggtaataacaacaaaggttatgtttggtatttataacttattatgaaagcatattaagtaaaagttttgaatatctgatatgcttatatagtttacagatttttttaatatttatacgtatcaaagcggatatccgcaaatatcacaaaaaaatccggatattcgaaattccggatatccggaaagtttcgaatcaaagcaaataataaaatcaagtattcggttaaaacgaatcgaataacaaatatcacaatttttcccgatattcgcttcgtgtccaggcctaacctccactgcacatgagactcaagcctggtgaatcagaaacgtcgtcggaaaatcaccggtcaacgagacttctttttaatcaccgattaaaagttacagaacaaacatcaatctcctaatctcatccgattgcaagaatcacaaaagattcggcaaaaatgggtaaaagaaattagagaaaactgagtagttcaaacttgtctaacaattaaatctcttgcaagaacagcaaaggcatatcttaattgcataggaaacgagctttgacctaaccttagtcgtggagaaattgaaactgtcttaaacacagtagatccaaacgaacctaattgtcgagaacgcacacatcgccggaaaactgttggagccaaaaaaaacagaacccaacggtgaagccaatcaaagcagaaagaaact

SEQ ID NO: 24005 - DNA, 1407 bp, Arabidopsis thaliana landsberg
aagaatatcatgctcgaattctgaggagaatgatgatcaagaatatacattgatcactgggttttgatgatctcgatcatatatatcattatacacttttgtattacctttgtccatgaatatgtagtagataccaaggaaggaagagttccattgtaaacatcaagcttcatagtcaaagggcctgcttatatacatctatagaattaaaacgagtaaatcctagacacacaaaaagtttatccatgtttatttttgtttcaccattctcataaagaaggccagagatggcagagcagccaggtcctccagttagccagagaagaagagggtcttcttttggattcctatcagacttgatgaagtagtagaacagttgcacttcctgttcctgggtagcaccaatataccttcatccacaagaaacaatatcctatgtcttttagattatctccaaacacagaacacagatttaatcacacaaagagattgaaaacaaacccggtttcgagcgcaaagggaaaccaggaagaaaattgacgatagaagcagaatcaagaagacaagatgaagaagcagaagcagcgacttcagaacagaggaaacgtagttgtttgccattccctgtttcagattctggttagcaatgtctttacggaaaacaattactgcatctttatactaaaacccaaaaaagtcggctaccaaactcttatcttttagttttggcttcttcaccaacgttgtcacattttttcatggataaaaatattaaaatctcgcaaccttgatccaatcaagtatactactgaatgatctattagtttttttttttcttattagatccataattgtacatcgttgtaaatctcctccacacttgcctccattaatctgcaaatctgctaataaatcgtagtagctgggactcaaaccccatacctcttagtgtagaagcattaataaacccttggtcaaccattaggccaaaggggcttccacatcttggcaattcatttttaatttttttttgtaatagttaacacatttaatctactaataataacaatctcaataaatgccttttgcacttctcaatgattgtgtcttttggtcgcaactttccgttaaaatattgacagttatttttttcgtttgtgttttttcataatttttcgtttgtaccttttcattgtaactttacattaacattgacaattatttttcggttagaatctttttatcttaatttttcgtaaaacgattgacgattatttttttttgggtgtgtctctttattgcaacttttcgtttcaatattgactgttagttttttcagttgtgagatcttttaacaattttctgttaaaatattggccattattcttttttttgggctttttcatc

SEQ ID NO: 24006 - DNA, 644 bp, Arabidopsis thaliana landsberg
ctagtttgatattcaatcattttttttttcttcataaatttccattaataaaagcaaagaaaaatacaaggcccgaaaacccaaaatgcacacaggcccaacaaaaagggcctaaaccacaaaccagtctaggacccccaacaaaatgaaaagcccaggaagttggacctaaataaacaagcagctaaaaggcccaacaggcggctaaagaacaaggcctaggccaagacgacacccacctacgcccccaacggcgagagagagagacacaaaacagaggcactccggatcctatcaaaccagaaacaactcaaaccaagtgatcataatagaagcgcgagaagcatttgagtgactaacacgagagagagggtccagctttgcacgaagaaggacttgaatttccttgatgatctgaggaggatcctgaaaatgttagagggaatcctacaattgcgctctctccagattagataaagcgaggcttggaagatgagcttgataaggagtgagagattcttggaggtagaagccgtttttaccaagtgaggatagcccaaaattatttggaggagacattctgccctctgagtgaagacttccaaatgtctgagctgacgggcgattgaagaacagtgatatgt

SEQ ID NO: 24007 - DNA, 806 bp, Arabidopsis thaliana landsberg
aaaatttcagctaagtttgatcggtgcattgagattcatttgctgcagtcaaaaacagcaaatgactgagagacacctttaaaaattgaagaactacaaaaagccatttcttaccctacggttctcgacaattctggacaaagaagaaaaagagatctttaggattcttcacttccctttatctctcactcttcgatctgcttctccattagcgttagctctcgatcttcttctccattagcgctagctcggttcttggtatacatatctctctctctatttttgattcttacttgtaatatatttctgggtttaatactagagaattgtttaaccgcaagcactctgatttgcgttcgataattgagcgaacatttggagtctagaaggctaagtggaggatattggatcgtaaacaccaaaaatatgagttgaaaaagtgggtgaaacttgtgacaacaactatggctctccataattttatcagaaattcatgtcaagaggatgcagattttgcacattgcgaagcattggaagaatatgaacatcatggtgatgaagtagtagaaaacgatgaagtagtaaaagatgatgaagtcgaggacaatgtttcaaacactgatcatgtaccgtacgtaccgactggtgctagagcgatggaagatgtacgtgattctatcactgaagagataactagaggatatcgacttccatattagaagttattgtaggcaaaaacaattattgtgttaactataatttatttatgttttatatttctcattgtttttctatgtgttttcttt

SEQ ID NO: 24008 - DNA, 484 bp, Arabidopsis thaliana landsberg
ttttcatcctaggaacataaacaatcctaaggatggaagtacttaaatcggaacttgggctaggaacaggtgatgttctgtccaagttaattaaggattggatgcgtatgtaggcctgttgatcaaggactatcttaactagccacatgccctggatatgggacagggtaagcttgaacccggctattccatacatgaaaagacaatcgcgcactgggagtggagagatggcgagagtggcacgtaccctcctggcaaaggaccgcctaaaaagggtggtgtgctctcgggtggcgcggacctgttcatgcagtggaggatccgtgggaatggtagacatgcaaggtttatgagaaacttatgtcgtgtggttagagatcctcagctgagtaaatcgattcggatcgccgttatatcctcggagagtggagacttgatctccgacctacaacctaagtcaggacgtaacattatgaataaaatg

SEQ ID NO: 24009 - DNA, 1277 bp, Arabidopsis thaliana landsberg
agtgcccattgatatacagtatcttttgaagcttccaagagcttcttcaaactgcaaaatccaagccatattttaactaaaagactattgactagtacttatggttttgcacattccttttgaatcactcttaagtcatggatgttaagtctttgtatttggtttataaacgcagatttagaaacaacattcatgaactttaagcaacttgaagcaatcatcgtattgtattatcacaatcaaatactaatatttcgagatttgacaataacactgattatatacattagtgaaactcatggacttaatctttgctaactaagtcatgatcatagatgctgattgaagaatcttcattcgactctcttccttaaaccttgcattctctttaatcctttgaacctccttctgaatcttctcactccccatctcttgtctctccattgtcacgagtctctccccattgatctcaccgattaacactttcctcctcaaatccggattgttactatctcccatgttgaacagaatcgaccggtactttgctttatgaggtcccatgaaacaacctaatttctcaaacattgcagattccactgaaacagccacgacagaaggatcacaagcagtgactcgtgtcttcatctctgtgtcaacaatctcagaagcgactttaaccagagatgtttgaagaatctcacgcactttgtctcgctttgaatctccagtcttcttcatcgttgcgtgcgtcggaatcttcacctgagtttctctattatcacggctcttttctctacctgaagcgtaaaaaaacttcatccaaagatcccgacgaatctttccttccgatcgaattttagggtttttgtgatcgatgaagaattccaaaccctgccccatggaggttttgcagaccacgtcacaaacaagtgacttgggtgcttccttcaaacgattcatggcatcgacaaacctcgatacctctggagaattctcatcacctttcacagacttagccgctctaagtgctgcctcgaacaactccatgaactcacgcttctgcatccttctctgtttgatcggtcttttgtgtacgtacgtgtttgatctctcgataataactagggtttcaaaagcaacgaaggagaagagaaattagtaaattgttgcgtatggtctctcgatctatctgatgttgtttatataaagactaagagtccaagaccagataggttttgttagtttcggatacttttaattgcttgctatcaaaacct

SEQ ID NO: 24010 - DNA, 534 bp, Arabidopsis thaliana landsberg
agcatttcgcgtggcaatgtatttcagggtgtctttctacctgtcaacgtctagcttacagacatttgggtaccgataagagttgcccccgttgcggtgcttcggaggagtcgattaaccatttactctttcattgtccaccttctcgacaaatatgggcactctcgcctattccttcctcagggagtcttttccctagaaattctctcttttataacttcgatttttttctttggcgtggccgggaattcgatatagaagaagatgttattgctctctttccatggattatttggtatatctggaaaagtagaaaccgctttatatttgaaaacgtcagggaaccccctcctgaaactctcgcattggccctccaagaagctgctgcttagaaacaagccatgctaattgacgaggatcatgtagatgcttccccctccgcctagcttcgcggaagcccccccagctgagctcgttgagtgtctatctgatgccgtcctggcacgctgaaaactttttaagcggctttggttg

SEQ ID NO: 24011 - DNA, 524 bp, Arabidopsis thaliana landsberg
  unsure (1)..(524): unsure at all n locations
caaggtttttgagattccgatctcgacctaaggaggaactctaacatgaggaagatatcccaatcaaagaatccatctacgagaaagaaaacccccaatcaaagaatccaagtacgagagacaaagagatgagagacgatcaacttttgatcaaagacgaaaagaaacttctcagannnnnnnnnnnnnnnnnnnnnnnnnnnnnnnnnnnnnnnnnnnnccatagcccgacggcggagatggcgacagagagagacgactgagaggagagatcaaaggattctcgtttccattgacgacgatgctggaggaagaaaccaatcatcaaagacaaagaagcttctcagattacgaatgaagaagacggagaatttcagacgagtttccaacaacgacgcaaggtgggctcacgctggtgggcttttttatatgggccctttctttgctaccaaatccaaccacggtatttctttattcattcttttttaaaaaaatctttttagtaaaactataattaaatagtt

SEQ ID NO: 24012 - DNA, 649 bp, Arabidopsis thaliana landsberg
ttaaaatggatctgctgatacttgagggttttttttaaaatgatttaccaatggtttgaagactttataagatcatagagtttgatctcattcttgcaatggatgaacaaaacaaacgtagaacaaatagtaatttatttaactttatagaggaattgtgtggttagatctgattagttatggagaattgtagtgaatatgagtttgaatgtttgatgtttgcagaggatatattgaaggcttacaatgtatagaaagcgagagggaatttcccgcctgatgcagataagagggtaccgtcggtgtttgtttgcaggactttggaactctatttagttgatagattttcattgacttttcaggttaagctaatgtgttcttattgcaagaaacacaatgacaagtttgttcatgatccatattatggtggagctcaaagttttgagaaggtaatttccattaagagactggagaagctgaatgcggatattaatttctggtttataacattagaggtgtttgttgttgtttgctggactttttttttttggcaacactcgtttttccattcaagacgaggaaagaaatcacggagagctcgttagcaagcacactgctgctttgttgaactctggagataaattaaaga

SEQ ID NO: 24013 - DNA, 1145 bp, Arabidopsis thaliana landsberg
gttcaatggaaaagcagttcaatatatgcagatcaaattattaaatttattaataaaataataataatttgatttgcccataacatatcagcaatattttctcttatattttgccatatgatttccatcagatataccacttctcttcggtcatcaagatcattctcagaatttatgttgttgatatttgtatctcctattacttcaacaaaattctcgtcaaaataatttgacattctgataaaattatgtagtcacattgtagtcgttaccactgttttttggacatcaatatcatatctagaaaattcataaagaatcctccattttttcttccaaactccaattttcctttcaataacagaacgtaaagatgcatgacatcgattaaacaactcatgtttatttctaagaggaggaccattgtagagctgtgacatgtgataccgaaaactctgttttttgaagatcgataagatgccaaaaagccttgtttatttggatacccagaatcaactacataatatttatctctaggaggcaaaggaaattcagaatcattatcttgtgccaacgttagaactactgtatcgtggcacgatccaggtgctccattccaaacatatgtaaacaacatatttatatcacatatggccttgatattaaacgatgttctatcgtgtcgattccaatacattccttgtagttaatgcttcaccttaacacatacatgaactccatttatacctccaacaaatccactaaaatatgaccaatattgttgatccatttgtagttattcaggaattcgacgtagttcttgtgttgttggcgttttgatataatcacaagcaagtatctatgtcgctctaaggacttcaaaaaatttctgattcactgtttcttgcgttcgtccaaatcgtaacccaacatctctttgaacttcattgtgtccacatatccgtaaaaacatggcaacactctcttcaatactaacattcattgtaggaattaatccataacttgtttccattatgtcacataatgatctaaaacaatccagagacattcgtagtaactgaagataagcagccgtatcttcttgtattcgacgccaagtatttttccatcccatcccgccatct

SEQ ID NO: 24014 - DNA, 360 bp, Arabidopsis thaliana landsberg
cagtcacaatctcacacccttgtgttatcttcaacccctgttctttaatcgactgaccacccacaatagaggtggccctaaaccctagataatgcgcaaacttaacagtttcctcctcaatctgctgagcaagctctctagtaggggccataacaacagcataaggcccctcagtctcattctcttcgctcatcggtggcaatctagagatgtaagctaacatgggtaaaacaaaagcagcagtcttaccagaaccagtctctgcaatgccgataacatcacgctgttgcagtccaagtggtatagctgccatttgaataggagaaggtttcttgtatccagctctctccacagctttca

SEQ ID NO: 24015 - DNA, 1648 bp, Arabidopsis thaliana landsberg
  unsure (1)..(1648): unsure at all n locations
gaaagagacactgtaagaaaaaatgaaacaaatttatacgtgngcttgcaaaaagatagggagagtgatggctcgtgtgtaattaaattgtgaagacagaaattcatatacatattgaaaagaatgtgagaaaatatgagttgttaaagtaaagtatagataagcttatgaatatacttctatataatatcttatttttagacgaggtatactaactaatgcagcgaagataaacaaaaaagaatagtaaatttgcggatttcaaaatgagaaagtcgtcgaacttattttccataaaacaatttatttcatacataaaaagacgtccgtgatcctaaatatctaaagctaaagagacagtcatgagccaaaaaaatgttcttttgatgattgttgtaaaacctaaaagttgtattagagttatttgtaattacatatttaaattgaattatttgctatgctaattttaaaactcaagaaatttaaattattaacaacaagtagatatattaaaacatatatctcaaaattttcagtaaatattttaaatcacacaaaaatttattaaaagtcgcgtgggtctattttaaaatttcttaagaattttttgtgtgattaaaattttttattgaaaattttgaaagatatgtttttatatgtctacttgttgtcattattataaactccttaaattttaaaattaacatgataaatagttacaatttaaatacataactaaaaataactttaatacaacttttaggttttacaacatttgaacatttttttggtttataacactttctttagttttagatatttaggataacgacgtctttttatgtatgaaataaattgttgtacggaaaataacttcgacgactttctcattttggtacccacaaatttattatttttttgtttatcttcgctgcattagtcaatataactcttctaaaaataatatactatatagaagtatatttataagtttatctacactttcttttaacaactcatattttctcacactcttttcaatatatatatgaatttctgtcttcacaattttttacgaagagctatcactctcctatttttttgtaagcaccattttatttgtttcgttctttcttacagtttctttttacatcatcttatgattttgtctaagcaatatgtgccctacattccaaaattttctcatactccatatttcttctttaaaaatctcttcctttccttgttagtataaaccgttttcaagctcgtcgagaggtagctaagttaagtcaatcaacatttcgtttgaatttttgagaaaaaaacttcttttgctctattttgtgttctattatgctaagaaaatgttttagcttctaaattggttcttaactctatcacgtctctttttttatgcagtttagatcctcttcaccttcacgcttcccaaagtgaaagacatcaacttatatttttgggaacttgattcaaattgatacgattaagaacaccacgatcaaaccatgtctttgttgctttaacgcttcacggaccaaacataccttaatccatattcacttcaccttcttgtgaaataatctatacacataaatctttcgtactgtatctctttccatcttcttat

SEQ ID NO: 24016 - DNA, 740 bp, Arabidopsis thaliana landsberg
tcgatcttttattgcatgttaagattggcaagaggagtagtgaagttgtcctcatcatcactagaattatcctcatcactagaagttacatacttagtggaggatcttgattttaccttcttctttttgccatcctttgccatgaggcacttgtggccgacgttggggaagagaagtcccttgttgacagcgatgttaccggcctcatcgtcggaggaggagtcgatggagctctcgtcggagtcccactcgcggcaaacatgggcatcgccgcccttcttcttgtaatatctgtgtttcaccttattcttccccctcttgtcgttatccctgtcactatcactagacaaagggcatttagcgataaaatgaccgagccttaccacatttgtagcaaaccttcttggagcgggacttgtagtccttccccctcctttgcttgaggatttggcggaagctcttgatgacgagcgccatttcctcattgtcgagcttggaggcgtctattggttgtctacttggtgtagacacctccttcttctcctccgttgccttgaatgcaacgggttgggcttcggatgggtcgccaagctcgttgattttcctcgagccttctatcatgcactcaaaacttacaaaatgcccgataacttcctcgggggtcattttagtatatctagaattaccacgaatcaattgaacttgagtggggataagaaaaatgagaagatcttaaaata

SEQ ID NO: 24017 - DNA, 1316 bp, Arabidopsis thaliana landsberg
cgtagactcatagaggtatttcaaatagctaccgaaatctaattcaaattttggagaaatttgcgtgatatatgagattgaaatatatttggaatgttttttatttattaattaatttattgcaaaaaaaaaaatcaataattaaaagttagtggcagccattgtaaataagtttccaactcaagaatttattttacaaaatggctgcaaaaatgtatatatagataataataaaatagcattgatcatcggggtttgagtaatttaacataatttcttcggattcaggattagtatttgggcctaggaaatctttagaatcacctaagttatcaaaaaaaaaaagaacgcagtttcaaatagtgaacgagcaaataccgaatttaaaatttgcatgaagtgaacaatataaacacttttttccttttttcactagatcaatactatatattagtaacaaatacaaattaagcaaattaacaaatatttatttaaggcattatatgtactatatcttgtacctaaacacacataattagatctttttggatctttttccaacgatacaagataaaaatgaagcaaactgaagtgtttaggtgaataaacacacatttgtttgttacaacctagaacaaaaaaataggagactttatatagatatcaaaacaagcttccccatagaaagagattcttacgtagacgaagtaatcaaagattgatagaagcttctgcttcttcgtcttctataaagagaccctttctaaatcaaactagtgacccttttttaactgagtaactctaaaccttgtgatttttgctttttggggttgagaaaaaaaaacaatggccagagtactcaaatcgcaatgggctaagaaaaatattctaactaaaaacatcaagctaccctttcctcataaatattttttttactttcctctatatatatccttttaatccataaggccttaaagcctttttcatatatacagatagatattactcgtcaaagattaggtttactagggttcgtcttctctcactttaatcaaacgttttgtgatatatttaatcatatttttgtttcgttatatgttgattcatagatttgaaatcccaaaaaaaaaaacaactgcatctagagactagagccttattcgatgaatccttcagatatctcgaccgtttcaaaaaagatggaatcaatgtcaattggccttgttcgtttgtctgtcgctggcgactgaaaccagcgacatcgactaaaagttgttcgtttgcctgtcgttggttcagcgacccaaagtagcggc

SEQ ID NO: 24018 - DNA, 614 bp, Arabidopsis thaliana landsberg
cttaggatatgctacataagaaaacgaagcaagtaaaaattagatccgttcgcttgtataaaatagtggacttccgtaagtattccctctgttctatcaagattgatgttatatgtttattttcttgttccaaaaagtttgatgttttagatcaatattattattacttttatttgtgactaatagagagaagagagaaatagtatttgatattattaaacaaataaaaaataaaaaaatagaaaaataactttttttaatttatgtgaaaaacccacaacatcaaacttcatgaaacagagggagtaatacatatgcacataatggactttcaatttccgaaattctaaataattttgagcaagaaacaatatataacaacacttatagtttggctaatgcttgtggtcctctcagcgtgcaacacctgtatcgagatttaaaaagatgaatcagaataaatgctaattaattgaaaaaattaaggcatccaatagtggctaagcacctgctaagtgctagtagaacaataattacagatataaaaatgataaatttgggccaaaaagagaagataaagtaaaaatgagggagtgggtagagaaatagaaatg

SEQ ID NO: 24019 - DNA, 566 bp, Arabidopsis thaliana landsberg
tgtctagtgtcgtcatatgccatgccatgtgatcacttgggcccacatgcgccatatacccaaacccctaaccctcacacacccatgaaactgcaagggtcggctctgataccacttgtaacacctcgtccaatctcggaccagcggtacttactcctggaagctcggtaggatcatatattgttcgcacagaccaacatgagtcttttgtgcgcactttgtcctcactcatgtgcatctgagaaaacttctcagtcggccacccatcccaaattcctccaagccaagcacgcttaacttggaggttccttcgagataggcttccaaaaaggaatatgcaccttgttgatgttggggtgaaggtgcacatgccacccttcgctcgacggcatctacctttcgtccgcacggatgaaggctgctcccgcaggcgtctgctcggacgaaggcgctacgcatgagccaacggataggccaaggacgtcgtcgaccaggaggactgtttggccgcttcgctcctgcaagccaagacgaagacccacgaagatcataaggcatgtcccctc

SEQ ID NO: 24020 - DNA, 1740 bp, Arabidopsis thaliana landsberg
aggtcgactctagaggatccgccaaaagctttttgatgcttagctttgctttagaaaaacaaaaggttttgtttttacaaaatatgatgtggcaaaagtgggtggaatgtttttcaaaaataaaacttgatgatggatctatcaaaggccttgataggttcaacatcggaaaagatgtacctctgccaggtaccaaactttgggtttgaaataattaagttgagatcgggcgggtgacttgcacgagaagagagtctcggtgtagtgtctccgtctgagtcgattaaggaccttgtcgatgtaggcttgatgatcaaggaccctttaactggtcacatgcctcgtcatgggtaagccttgcctcgggcagactaaggccagaataagataacacgaaatgggcgtggagcggtggcgagagtagcatgtaccctccgtggcaagaggctggacggtggtgtatctgtgctctcggtttgcgtgaacctgatctggtcttaagaaccccggtggcgggttgacatatgcaagggttaagtgctacatatgtcgtgtgattggagatcctcagctgagtataatcgattcggatcgccgtaccttcgcggttatgaagacttggtcactgccctacacgtagcattccactaaagatgatgggtttttgttaagaaattggctagtgcaggaccagtgattgaactagggtagaaagaactctagttacaggtaactctacttaacttgacaaataaaattggatttttaaggactcactttagtaagctacttctgcaaaagtataagttgattattgctaaagcctctccttgactcctatttatccagcatacccttgagagtcttttccttagtcgggtaagacttgctgagtaatgccatactcagggtttatcccttcgttgtttttaggtgaggaagcgacaattttttgttgcttctgtaccaaggtggtaccaaataaggaaaaacaagagtgaagatgcgggaggacatggtcctccataagaaaacttttatgaaaaacttatcgggaggagtttgtgcctcccttggttatgtaatattactactctgcactcgcttatatttctggtctgtaataaacaacttgagcttactttttaataaatgtaagtttatgtaatcacttccgcatttctatatctccgatgtgctgtaatgtttgcaagacgggtgaaacgttcctggtgaggtgagaaaagaagataccgaacttgtcaaatgattcaggaacatctacaaggttgtctgatgtctgttggacaaggacaactgtaggtgggcctaattacttgggaggttccgtcacagctggtatcggagcgtagcccttctttgcagatattatgaggcatcttcaaaagaattttcaaaagtcttacctaaaaattcttttctcttcttacctaagtattctgaagagtctatcttaaagaccagataggaagagtgcaatgtatagaaggttgaatcgactaaggttgattctgtacttacacatgcatcatgctaagcactatattaataaagttttcccccttagagaaatgttgtcgcgcatcagaaagaccgcgcacaaatctactagacccattggcgtaccctgccattaacttactccaagacatgaagaaagtagcagtggtagcaacgatctatcgggatctggaagcacaagtcgaactgcttcaatca

SEQ ID NO: 24021 - DNA, 943 bp, Arabidopsis thaliana landsberg
  unsure (1)..(943): unsure at all n locations
ccagtcactgctcatgctctgttccagtgcacccaggatcacgaagagtaccttcaggcgtatgtccgaagttcttgcgtttgagggcacaggcaccaacggcgctnaatgaaattgtcattgaggccatgatcaaggggcttcggccaggtccgtcagctcagtacttcgctaggaagccccctcaaactttggagaagctgctccagaagatggacgagtacattcgggccgataatgattttcgccaaagaagggaggaggctttcaggttttctgaaatgaccaggggcttcggagggaggttttacccgaggcacgtaagatcaattcataactctacacaaaatgatgatagaggaagccaacagcaaaggccacaatgttcctcacaggcttcggggcaacagcaaagctcattccgaccaccagctccaagaggcagaggcgccaggggcttcggaggaagatttggcgatcaaccgagaagaatcttttgcttattctgcggtgagaacaaaggccatactaccaggatgtgccatgttactattcagaagcaaaaggaaatacgtgaagcagcagcacaacaagcccagccaaagcaggtcatgcatacagcttcgtatcattcgccctacatcccagaatatgtgggcaaccatcctgcagtttttgttgcttcggcgagtcagcctcaagcttcatggcaacagcctccgcctccacctccgttgcaacaaggccaacagccagaagggagccaatagctccgcatcaaagggacttcagagaacagtccgaagctcgcacggtcaacagcactgtgccagaatcaaagcacatctattgacaaatatcctaccttaatagtaatctttttcattcagttttattttttgtgtaataaaggacattgtttagatttcatgaaaatagtttc

SEQ ID NO: 24022 - DNA, 1060 bp, Arabidopsis thaliana landsberg
attcagaagtccgaatatcaaatttctaaattatttgaaacacgcattatacgatatgctctatgctctaaatattttggactagtcattctactaattacttcatcatatgctattgctagaattatagggggatgtattttaacaatgattttggaaaaatttgccttttttttttgttaaaatcacctgttatgcaatttgggattttaaaatctcttctcaaatttcatgttatgtaaaatcattccaaatcatttcaaatctcatgttattcaatcatgaatttctaaaaaccataacaaattctttattatttcatacaataaaatttgttttaaaaaatattgaaaactgatttggtgagcctatggatacctttttagtgtaacaataagaactaaacaatcacacctctagaggtggtatttgatttataaaaaaaagaactaacaacatgtggttaacgaaattaaactattgaacaatctcctctcttcatcctcgtcttcatctccctcgatcttgatcccttgaaaaaaataacataagagatcctaaaaccaaagtccccatttacctcgaattatgtacaaggactaaagtcaaaagagtctggtgatgactcacttctcatcctcagaagtctcgagcaacttcaatcggattctcgaggagcacaaacggttacaaatagatgaataaaaccatttgacgattaaaagtcaaattgttgctaggtcggttttgatcttcagttctcatgtttgtttctttgctaataacataatagagctttatttgcgaaattgattaattaagatggaattttgagtgggtttattagtcgtcaagcatggtggtgaatctcgttatgcttatgtgtatcactttaattttccttgctgatactaatactaaagagccataaatatttatggattgatttggagaaaaattgtaagtaaatccgaggtttataacactagatttttgaaattaggttgatggagaggcataagtttttgtttgagcttaacatgaattcaccatcattaat

SEQ ID NO: 24023 - DNA, 615 bp, Arabidopsis thaliana landsberg
ctcggtagtattctcactatcttggatggttgatccatcgtaaatcccttctgcagcccagtaattgaactaattctgcgtgtatatcttggaatcttcggggtaatgggctaggtgaaggaagcaatgctttaaatgcgttggcaaatcttcataactcagagacaatattcggtaaaccgaattgagactgttgtcatctaagcacgatcctcctactatttgagatccaatattgtcagaaactcttttccactcaggaactgtatgtttattagctaacaagcctcccaacgctttaacagctaatggtagtcctccacaatgtgtgaccatttcctttcccatggcttccatttcttcatcaagccttacttctgcacaatatcacaagctaatacatttcaacatgtgagctgccaaattaaaataatacactagattcttggtcttagtattctatttgaactcgtgtgtaatcacgggttaatcagaacatgtttctttcaaaatttaggtgattttattatgttgacatttaatcaaaccaatcatgaattaactataaaagtagataattcgatatatctaattttgagaaacctataaaaaaaa

SEQ ID NO: 24024 - DNA, 598 bp, Arabidopsis thaliana landsberg
tgaaacgtcgtcgtttgagatgacggagagagaaaaaagaaaaaagactttactgttggaattgttttcttgattgagaagaagtggttcgatgcgtggagattcaaagcaagagggagatgaagaaagcaagcttacagtgagctgtgctaatgacgtagaagggattcgcgtaaggaagagaggcgattccagagaagaagaagcaaagggattcaaatccctaaattggaactgggattttcaaagtgagtttctttatttaatcaaagtgaatttcttttaccaattatttttttggaagaaaaaatatatataatattttcgataatattgaaaatatgagtaagtgatgaagaaaaacacattagatgctaaagagatttaatacattaatgtattagaaagagatttaagaaaaaaaatgatttattacaaattatcattttggatttttatttctgttgaaattatcatgtattcctaatcacaacattaattgaaagctaaatcttctacaaaataacaaacaaaaaggaaagttgaaactaaaaagattaggaaaacaaaattttaaaaatggaaactgatttcaatc

SEQ ID NO: 24025 - DNA, 475 bp, Arabidopsis thaliana landsberg
tagactcacacgacccctgattaataactccaaaaatcactaaacttttctggataagcttagaataatatttagaaaccttgggtaaagtttggcatgatttggacaaagatgggtacctaaaccccaaaaccctgaacttctaagtaaagcctgccctatgaacttaaatactgactccacaaaccctagttttctggagtaccgtgaaggaaaattgtattcaagacctaatatgatgttgtcggagagggaattctccgaccgggtggcggaatgcacccgccctaaatcctaagatgaggaaggggcttaagcgttttgcctatcttgctaagcgatcaccgagcacatgaacacgcgagaatttagagtggttcgggccgccggagcataaaaccctactccactgtgtgttggattgttgtggaagcttgagcgtttagagtctacgtctaagcttggtcaaaaagag

SEQ ID NO: 24026 - DNA, 568 bp, Arabidopsis thaliana landsberg
ttttttttgtagagattcatgtcccaaaattagttattggtacttggaaactaaaaccatttttgatttttctttccaaaaaatgatcaaattaaagttgctaatgtagattgattctagagtttatcgtggattctccaaatctctaaaaagcattagccatgaaagaccaaacataactaattaattcaatgtaaactctgaactcttggttcagacattggtctatttcagatatcactatcttcaatgctggaaaacgtttgcagacacaatggattcccctccaacgattgtcagaaagcaaggtcacgatgagggaaagagagaagcaaagagacatagaagtagatacatagagatctttagcttctacattcacaaatgagcgaaagagcgatctttagctttttacactaaccgatataaggttgaggaatataatgtgaacttcaggaactttgttctgtatgagtagttcaatggcttgattagcggagttaccttcacgaagaagcactatcacaaaatatggatttcgagaaaaaaatattcatcaaaaaaggac

SEQ ID NO: 24027 - DNA, 660 bp, Arabidopsis thaliana landsberg
gttctgcttatctaaccctctcttcagtttttggaacaacaatggcagcaatcaccgttgactttcagttctgcttcattttcatcctcctatggctcttctcactcttctgtctctctgctttcttcttcaagaaaccaaaagacccacaacttcaaggctgtggtctacctccgagcccaccgtctctaccggtcattggtcatcttcaccttctcctctctgttccatgttacaaatcctttcagaaactctcctccaagtatggtcccctccttcacctccgcgctttcaatatcccaatagttctagtctcgtcgggctccatggccaacgaagttttgaggatccaagacctgaactttggtagccgtaataacgggcaggctcctataatggaaaaatcattactttttggatcttttggctttgtctcagttccttatggagattactggagattcatgaagaagctcttagtcaaaaaacttctcgggtctcattccctcgagcagacacggctcctccgtgggaaagaactccaaactttccgtgctatgttgtttgataaggcggcaaagaatgagactgttgacgttgggaaagagatgatgaagctaaccaacaacagcatttgcaggatgacaatgggaggagctg

SEQ ID NO: 24028 - DNA, 627 bp, Arabidopsis thaliana landsberg
tttcatggcaaaacaaagttaccagatgataataaatattattgtgagactaatgcaactagagtggataaaaacggagttatggttattgagttatgaatttctgaaattatttagcatctagaatagattaattcaattgaataattttaattaaagtttcatggctaaacaatgttactagttgatagacaatattaatacaaaattattcaaactgaattggatcaatttggacttaatatgaattttctatgaattaaataagtttctaaatttattttaataccaaaaatcaatttctaggattatttgtttattttctctgctccctggagtttgcgcacaaaaacagagaagcccagggggttctgcgcaacattcctaagactcaaactacagtcagggtgaactgcgggtttatatcctaaactttcagggtctcatttctaaagcgccacggtgcaaggggtatggataagcttcggtcgttcgatccacaacagacagccaggattagatcccacttcaattgaaccggtatacgatctgggccaccatcatgcgatcacgtcctgatatacggcgcaagattaccctgaccgatgatcaagactgtggcgtggt

SEQ ID NO: 24029 - DNA, 664 bp, Arabidopsis thaliana landsberg
gccgtaccccattgaaaaacttcggctcacttcagtgtttccaagaatgacagatatctttctgctgatatggatatgaatctgtttaatgatgctaatcttcctgccagccgttgggcccccttctttgtgcttggctgatccatccgaaggatagcttcaatcttgcttgggttggcttcaattccctttgttgatactagacagccatgaaacttgcccttcttcaccctaaaaacacacttttctggatttaacttcaggccagcttgcctgaaattggcaaatgtctattgcaaatcagcaatgtgattttcttgcttcgtgttttttactatgatatcatcaacataggtcagtacattcctgcctatttgagaatgaaggaccttggctgtcattctgctgaagcttcctccagcatttttaagcccctcatgcatccgaagatagcaatatgtgccactgggggttataaagctagtcttcggctcatcttccttgttcatccaaatttggtggtagcctgagtaacggtccagtagactcatgagctatgaagaagctactgcatctactagagagtatattcttggcaatgggaactcgtcctttggacaagctttgttgagatctgtaaaatcaatgcacattctccatttac

SEQ ID NO: 24030 - DNA, 384 bp, Arabidopsis thaliana landsberg
aaatttggtaggtgttaataatgatgtggaagaaagagaagatgatgtggagtgttaaaagtaaatttgtgggtgttgtaaatgagtaaccattgtggatagtctaaggataaaaattgtataggtgttgaataatgatgtggaagaaagaggagatgatgtggagtgttaaaagtaaaaaagtgggtgttgtaaattagtaaccattgtggaaagtcttacaatggacacgttaaataaaatattcaacagttgaatatggtgcaatggttgttttaataaatgttgtagaggatgtggcaaatttggtgagtagggaaaatctttttctatttttatcctactttttcctttttttttcactttattctctaaccttttttt

SEQ ID NO: 24031 - DNA, 1178 bp, Arabidopsis thaliana landsberg
tacagcagcagttttgtttcttttgttctttttacgccagcatttaggttcaactaatagaaaacaaattgaattcaataggggccatttgatagatccacactactattgactcttcacacaaaaactacatcaaaaaaaaaaaaaactaaatgaaaatttcttttacacttcagtaatcatgacaaacaaagcgaatttttaacttattgaaaaagacgatcagattttaatttgaccaaggagtagcatgtgatggctctgattgtgatggtggtggtttcacaacattatgatcatcatcatcatcaacgcaaaaaacgatgtcgttctcatcacctcccctttctcttgcctttttagactcttctacaaacttatcaaacgctttcgtaacgtatttagaagcatctgaaacgcaagtttttttgcatagtttgtatagcaattcttcgtttttgtagtctccttttaaacccgcagcaactattacaagctcttcttgaaagtcgctcaattctgcattttcttttgccaccgtccctctcattttgaccggatttgacaatgtttctatttttttttttaaaacgaagtatttattcaaaataatcacaaatgttgatagaatttattagaaatgaaaaaatgtaattaccagggcaatcttgtcttggtgagtttctcgtaataacagattcaaaagtgccagcccacgaatctctctttgtcaaaaaatctttgagtttgaaaattttcttgaccgttgcgggaattgacgaatgctcatattgtgacattaggtacggcccatttgacccatgaagaactacacattttaccaaaaattgtcatttaattaacacattatagtataattaaattattgtctacaacatacttacctgtgccaggctcaatccaaggggagatgaagaaagtcggaaccctaacgccgagccggttaaattcaaaattgtacggtggaggtcccaagataccatccggattaggaactccgtcgaggggagtagggacatggtcgtagaatccaccgtgttcgtcatatgttataatgaataaaatctcattccattgaggactcgatctcaaggcctcgttaacttctttcacgagcttttggccttccgagacgtcatgtgatggatgatcatcgt

SEQ ID NO: 24032 - DNA, 596 bp, Arabidopsis thaliana landsberg
  unsure (1)..(596): unsure at all n locations
actatatatattttgactatgtcaagagtggacaaccgaaagatagatcaattcatggaagtttaggtaaaggtttcacacaaacggtacgcgcctaggaaaaatacgaaccttgctttattcgaattcatgtagaaaaatattgatttatgatctcctatttcttaccaatctttgcagtttgagattaactatctaagaaatgaacatcttgaatctgttgatgtttactatgatgagtccgagttcggtagtatacaagcacttctattcaaaactaatttcagggcatctgaaattatgggatatgacaatggaactaagtatacactagcagtggatcgaaagaagatcattgggtttcacggaacttctgcgtcaggcctcacatctctgggagcatatttcactccaatatttactcatactagacatgaagcgagaggaggaaaagggggcaaggcgtgggatgatggatccgatcatgagggtgtatcaaacattcgtgtnnnnnnnnnnnnnnnnnnnnnnnnnnncatcgagttcaactatgtcaaggacaaggatggacaacacaaaaatggttcaatccatgg

SEQ ID NO: 24033 - DNA, 251 bp, Arabidopsis thaliana landsberg
cttctctattttgatctactgcatcatcaacctcatcgcagtcttcatctccttggactgcacagtctttgtcttcatcaagagcaggaacttcagcctctaaatcctcctcttcttcatctctgattctccttcgtttacttcgtctaagtggagcacgaacttcgactgcatctgccacagcaacgcctgattcttgagcttcatcgtgagctttctcttcctcttgtccaaatttcacgaccagttga

SEQ ID NO: 24034 - DNA, 1124 bp, Arabidopsis thaliana landsberg
cgatgctctttcgctaggcatcatgacgttgtttttgccaaccttatctttaaatggcatatccatgtggattaatggatttcgctgttgtccttggttctctcatgtctctaaaagctcaacaatctattttgatctcatggtcggttcgtcctcatatcaaatctcgtgctaatatctgatatgataatctccatgttgatcataaaatagttctctgagttgaagaaaattctcatgtgatgctcttttgccaaaaatctatgtttcaactcctgtcatgatcttatttttctgagccatactctcatgggctccatctatttatgctatgtgaatttctcgttggttacgtttggtaatggtattaggactaacgactgatggtgccgcgacgaaaccgagagcctcatgtgggcgcgcacacatggttgagctgctcggcacgcgctggtatcgcggttaatagtcgtgatccattatggaactataatgatgtgctatcttctgtggacattctctcaaagtgatcgctgcattttgtctcaatatgtcgcgatgttctgtaagaatctatcttccatatcctttcaaaataccatctcatgaattgatatctaccttcagcatgggagttacatgcctctctacccttaagagtctttgtccgaatctcaggacgagattcttttaagggggaaggctgtgacaccccaggtgtctatttcgtgtcatgccgtgagttttgtcataagtccggatgctcagtgaaaatttctatttctcgatcgtgtctatctctgtctatcaggatttctcatggaagttcaccgaattcgaagttattcgatcgcgagaaacagccaattttggaacctgttgaaacttttctttctcagaacgaatgcaaactcagaaatcattctcgaattataaatctcatctgaagctcatttaatcaaactctcgacgactgatatttaatctaggcccgagtctaattcctcgatgttcgatcgatgtccgactattttaatccgagtccgtactctcaaacggaatactcaatgtggcgtcctctaatcagttttatctgattcggcttaatacctctacgtttgatc

SEQ ID NO: 24035 - DNA, 757 bp, Arabidopsis thaliana landsberg
tcctccccatcaagcgttgaacttccttaaaaatttttggtgatggcatgtttaaaacaacattgatctggtttggttttgcctcaattcccctctcagtcacgatataaccaagaaaatctccaaaaggaattctaaaggtgcattttgccgggtttattttcatttgatattggttatgaatctcaaaccactcttctagatgctcaatatgatccctttttagtgatttcaccaacatatcatctatgtagaactccattgtcttcccaaaatgcttgtggaagattttatttaccagtcgttgataggttccttctgcatttttcagaccaaatggcattacctaatagcaatagatacatatgtatgtgatgaatgaggttttctcttgatattccggattcatcattatttgattacaaccagagaacccatccatgaaggtcaccagctcgtttctcgcactggactccacaagtggaagcggaaaagctatcctttgggcacgctttgttcaaatccgtaaagtcgatgcacaccctatcttttccattcttttttttcacaacgacaatgttggccacccactccggatattgtacttctcttatagaaccaattttcaagagtttgtccacttcgtcacttgccgcttttgccctttctactccaagcgttctcttgttttgcgttacgggtttaaaacatggatctacattaactcgggcaaagatctggacatatgcagctattt

SEQ ID NO: 24036 - DNA, 567 bp, Arabidopsis thaliana landsberg
  unsure (1)..(567): unsure at all n locations
ctctcggaggccgaagcgggatcgaatatgagatacttaagactaatcccattttttaagcatttggaaatgcaaaaacattgagaaatgataattctagtcgttttgtaagcccttcatcattctgatttttgtatatttttaattatcttatgctaagtcgttgagagttttaggtcttcgtacgtctcacaatgttgttttgatattaaaatatacaggggaagctaatagagattcattttagtgaaagtggaaagatatcgggtgctcaaattcaaacctgtaagtgtaacccttacagttgtgcaacttcactttgttttttcatttctacagagctaacttagcttcttttttcttattgcatgttcttcaaattttgcagttttactagaaaaagtagcttctttggatgattttatttgcttgatttctttcctttntaaacatgattcattaacattgacattttttctttgtatgttgactcattttaacagtctagagtggtccaatgtgctgaaggggaaaggtcatatcatattttttatcaactttgtgctg

SEQ ID NO: 24037 - DNA, 498 bp, Arabidopsis thaliana landsberg
  unsure (1)..(498): unsure at all n locations
gaggtgtcaagtcggatgactcttaccaagtttcgaaaggtgcttttcataccattttcgtgnnnnnnnnnnnnnnnnnnnnnnnnntccaaagcttctatctcttcgatttccaaagcttccatctcttcctctcctgaatctgggtaggattgttcgccctcggaactcggggcgttgtaatcttctccttctgatccggaggtatcctctccttcctcttataagtctccgccaggccatggtactacggttttacaaggaaagatgggctttgggtcttgctcatggccttgtggtttggtttcgtctcgaccctttttggactctcttcatgagttctcttttatgcgtttctcgcagatggtagcacgtaggagtaacgagttgtacttcttatccaacctctcgattgtctcgttaaggtcgtctccgtagatcccagcttagactatatcccatgcaacaggttgagggacttatcgaattcgacatgga

SEQ ID NO: 24038 - DNA, 658 bp, Arabidopsis thaliana landsberg
gtatttaaaaagtccattttaaagtttgcattcaaatggttcatttataaatatatgtatatgttttaaaaagtttatctacactactaaaataagaaacatttaaagagttaatgatatttctcgttgcaaaattgataatattgttgattaataattataattttattattttaccaacctgcaaatatataattttattaaaaacatattatttttattatgaatttagtttagttgctaataattttatatttacataatatataaaggaaaaaacaaataagatcttgtatctctaaacatatttcgatttgaaaaaaaaacaaatattggatagaatgtatgtcgcatatttgttttggctatgtacttaatctgttatattttgtaaatgagaaaatatcggaatatatttataacataattattattacttagtttttattattaaaatattttgtatttttcaattaatggcatttgatttatgttgattgttttttgttttatctataataaattgaaaaatacaaaatatttcgatttatattcaaaataaatatattgatgctgaatatttagctatttaatatttgatgttttgtttaatagacgaatcatagtaaaaatattgacgaagcaaatactcggcaat

SEQ ID NO: 24039 - DNA, 513 bp, Arabidopsis thaliana landsberg
  unsure (1)..(513): unsure at all n locations
gctttgattattttgcttcttttcctttttgttatgacattgtgtttcaaaggtctatggttatgttgtggcttgcatttcgtcctaatgtcattaagtttcagcctgctttgattatgttgtgttatgactttgtgtttcaaactgatatgattatgttgtggcttgcattttgtcataatgtcattgagtttcagcctgctttgactatgttgtgttatgactttgtgtttcaaacttgtgtttcaaactgatgtgattatgttgtggcttgcattttgttataatgtcattgagtttcagccttctttgacaatgttgtgttatgactttgtgtttcaaactgttatgatgtatgtgtttttggttgtgttgttatatcattgagtttcagcctgctttgactatgttgtgttttttttgggtttgagtttctcacaggttgcttcaaagaagaaaggcangatttatggtgctggttcatcgcagcttgaacatcttcagctcatgctg

SEQ ID NO: 24040 - DNA, 942 bp, Arabidopsis thaliana landsberg
  unsure (1)..(942): unsure at all n locations
tgttattgattctgactngttttatgcattgtatcgcagaaaccctatttctgcacgaatgatcaacatctggattttcgcacgaaagataagttctctttcatacttttataaagataaagatctaatgcttctttgaaaactaaactttcatagttgatgcactattagttttacgttaatagagttgaccatgaatattgtttaccctaaatttgcacgaaaaatttgtttaaaagatctgtattaattttttttatttgagttaaaaaaaaagaagaaaaaaaaaactgttcatggttttgccctaattttgcacgaaattattttacccaaattttgcacaaattcatattatcctaaataaaagttttgtcaagatatatgtaaaatccagattttgcacaaaatagttttattatgattggttttacaatattgcattaaaattgtattggtatataatacttgattattttattaaataaattgattgataaataacctaatttaaatgtataattacttatagaaattttcatgaatgactagtttaatgtatcttaagaagacatcataattttgatggtcaaagttttttcaagaacttaaattatcaccaaaagttgagaaaataaatatggtaaaaaaataagtaaaatttctaacttttaacgatgaaataatctagtatatcaagtagtttaaaatcttattaaaagactctagaagagcatatacattgttttctatgggaatacaaaattaaaatcatcgatgcggtatagttctccaaatctcaaagttaatatgatgagatataaatacattatgattctagagtggaattcaatacgagatggatgaacttgaagtttcatcatctcgaggaggagaagtaatgaatggatcataagtgacatatccagaagattatgttca

SEQ ID NO: 24041 - DNA, 796 bp, Arabidopsis thaliana landsberg
atttaagggagtgttagagggtcagctatacttggtagattttgataaagctgaactcgacacttgcttaattgctaagactaacatgggttggctctagcaccgccgactagcccatgttgggatgaagaatcttcataagcttctaaagggagagcacattttaggactaacaaatgttcattttgagaaagacaagatctgtagcgcatgccaagcaggaaagcaagttggtgcccatcatccacacaagaacatcatgacgaccgacaggccgcttgagctactccacatggatctattcggcccgattgcttacataagcatcgacgggagtaagtattgtcttgtaatagtggatgattattctcgcttcacttgggtgttctttttgcaggaaaaatctcaaacccaagaaaccttaaagggattcttgagacgagctcaaaacgagttcggcttaaggatcaagaaaattagaagcgacaatgggacggagttcaagaactctcaaattgaaggcttccttgaggaggagggcatcaagcatgagttctcttctccctacaccccacaacaaaatggtgtagtggagaggaagaatagaactctattggacatggcaagaaccatgcttgatgagtacaagacttcggatcggttttgggccgaggcggtcaacaccgcttgtacgccatcaaccggttatatctacaccgaatcctcaagaagacaccctatgaactcctaaccggtaaaaagcccaacatttcatattttagagtctttggtagca

SEQ ID NO: 24042 - DNA, 1256 bp, Arabidopsis thaliana landsberg
ttaaagttattttattttatttttcatggtaatattaagtgtaaatttttgtgatgttgttgcttgcaggctacgaaaaatgctcctatgatgcatccaagtaagagccctaaatttcatcctatattttttcactaatccttatagtagttcaaaacattttcgttcaaaaagtataattttatagtgattcttcctgcattcagatcgaaagtctccaccgcaagatctttatcagagtacaaagctcggtggttgctgctgttgtacataggagttttttctcttattagtcggcgagactaacatctttgcaccagaaaattagatatttgcatatcaattgtggtggaatctttttcatagagcaaaattttcaaactttttggctattgtagcagttaagctttgtttttgttcttacctttgttcatgggtttagaatctaaaagctttttgagccttccttacgtctgacaacaactatctctttcattttcatgttaaaatatatcttagtagtactttatcaatttcggtatagcaatgtgatcaaaacattcttacaaaaataattttatcattgacttattcgttgattgatttagccaaaatcgagacgcccgcatgcatggttttggtatctacagtgtagacatgtactttttagaatagtgtctatatgtttagaaaaatacttgggttacccttgtattcaccccctttattctaaacctatcattatgttatgtcatattataattaaggaaataaaacctgtaaaattttaattaaatgtagtatttatactttataattaaacaaaattatatatatatttgggtttataaatataaattagggtttagattttacaattaaaaaaatctttatgacggtttgtgtttttaaaatagaattagagtttagatttcttttacaattaaacaagtttatatgacagtttgagtttataaaagagcggttagagtttagattttacaattaaatagaatttatatgacggtttgggttttgtaaaatataattagggtttagatttcttttacaattaaacaactttatatgacggtttgagtttataaaagagaatctgggtttagatttttttttataattaacaaaattaaatatcagtttaggttaaaaataaaaggtaatgtttagatttgttattaaataattgttttttatttataaacaaatgattagatttgattttataattaaatata

SEQ ID NO: 24043 - DNA, 672 bp, Arabidopsis thaliana landsberg
tgaatataagccttcacgttatcgatggtgtctgagctctcaacctccaaagtgattgtctttccagtgagggtcttcacaaatatctgcataccacctctgagacgaagcaccaaatggagggtggactccttttggatgttgtaatcagcgagtgtgcgaccatcctctagctgcttaccggcaaagataagcctctgctgatccggagggattccttccttatcctggatcttagccttaacattgtcaatagtatcagaactttcaacctccaaagtgatggttttgcctgtcaaagtcttgaaaaaaatctgcataccacctcttaacctgagaaccaaatggagtgttgattccttctggatattgtaatcagcctactcatagcaaaaagttgaggtccaacatttctgtcttttgttctagatgacctcacttcttgcgcggttacttaaacattgaatgtaggattgtccaaatcttgaggataaatacatatcctatgttgattttagaaagctttaaaaacataagttcaggattatatatttaggtaaaaactcatgcttagaatatctttactaaatattgtcaaacgtgttgatccgagattttttctttcataagtcataactatagagatttcatgtccaatatctatgagaatct

SEQ ID NO: 24044 - DNA, 1015 bp, Arabidopsis thaliana landsberg
taaggcgtaaaaaaaagtggtcacattttttatttattgtaggaagtaatcaaagtttagtcgatgctatttaacccacggagagtacgcgctcagctcttagtttcactttcacgcgacacgtaaggtgagatacgtctgcgtcacgttctctccaatcatttagtgacagttggcacatttttcaaagcatctccaatcagtaattcgcagaatttatgtgcccgattcgaattccttcgcttttactacatcaccatcactatacgtaaactcattcgaaaaataaatcatgtatgcataatataactttcatcatttcttttgccattttctcacaaaggtaaaagaatcttgtaaaacttccataggctatagtgtatcttataagaactacaaactcaaaatgtaaacaaactttgatttcatttcctaaaaaaagaggatcataagagttaagggaagataggctcttagcttgaaacatagtatatgcagtaatacaagaacaacaaagtaccttataagcaagatgagtttacttatacagaaaatattaatcacattcacaattgctgatcaataaagaacattttatacaccttctcctaaactgcctaatacactcaattttaacgggaaaaatgtcatttaaatcatcactttaccattttcgttggtttaaagcataaattctggaccttgtgatttaaaccttcaagtttatgttaacttttattttaatcatgaattttcgtttactaagccaattaaaacacatcgttataattttttttacaaaacttctgattttttctccctttttcttcgaattttctcttcttcttccaattcaaagtaatttctcgtctctaaatcgaccgacgatgccggaaaaaaaaaaaagaatttgtgcctcaattgacttagttaacgagaatttaaattgaaaatcaacataaaattgaggatttaattcaccaagtccagagttcatgctttaaaccaacgaaaa

SEQ ID NO: 24045 - DNA, 2664 bp, Arabidopsis thaliana landsberg
aagggaaactagttcaattatgcacttctccatttgctttggtttgtgttggcatcaatcaccaaaaagggggagattgaaagggaattaggcttacacctagttcctaaatacttttggtggttgaattgcccaacacaaatctttggactaactagtttgcccaagtgtatatattatacaggtgtaaaaggttcacactcagccaataaaataaccaagttttggattcaataaaggagcaaaggggcaaccgaaggcacccctggtctggcgcatcggactgtccggtgtgccaccggacagtgaacagtacctgtccggtgcaccaggggactcagactcaaactcttcgccctcgggatttctcggaagccggcgcgctataattcaccggactgtccggtgtgcatcggacatgtccggtgctccaaggaagctcggcctcctgaactcgccagcctcgggttcgcgcggcagcgctccactaaaattcaccggactgtccggtgtgcaccggactgtccggtgagccaacggtcgactagggccaacggtcggcagcggattctgcgcgcgacacgtggccaagccaacggtcggaagggggcaccggactgtccggtgtgcaccggacatgtccggtcggccaacggctcctcagatcagcaacggtcgactgcgctgtttaaggaaggaaatcgggcaccggacagtgtccgtgtgcaccggactgtccggtgcgcccgacgacagaaggcaagatcagccttccagatttgttctcaacggctcctagctgccttggggctataaaagggacccctaggcgcatggaggaggacaccaagcaaccttagagcattcttgatcatccacactcagtctttgcgcattcgtttgtcattctcagtgattcgagctcgttctagtgtgaactttgagatagtctcttgagctcgtttcttggccgtgtgtgtgcgcattttgctgtcgatttgtgtgttgcttccctcccttactccgtgcttctttgtgaaattcaattgtaagggcgagagactccaagttgtggagattcctcgcaaacgggaaaagatcaaagaaaagaagaacaccgtggtattcaagttgatcattggatcacttgagaggagttgagtgcaactctcgtccgttgggacgccacaacgtggagtaggcaagttttgtacttggccgaaccacgggataaccactgtgtcatctctgtgattgatttcttgtggttattgtgttttgactcctctctagccacttggccataattgtgctaacacttaacaagtttttgtggcttaagttttgaagttttacaggatcacctattcacccccccctctaggtgctctcagtaagtagcataggccaataatatacgaattgactcaagcctagctacgggtgcataggtttcaccgaaatccaaaccttcgacttgtgaataccctttggccacgagtcgagctttgttccttgtcaccacaccatgctcatcttgcttgttgcggaagacccatttggttcctacaacattttggttaggacgtggaactaaatgccatacctcgttcctcgtgaaattgttgagctcctcttgcattgccaccacccaatccgaatcttgaagtgcttcctctatcctgtgtggctcaatagaggaaacaaaagagtaatgttcacaaaaatgtgcaacacgagatcgagtggttacccccttatgaatgtcgccgaggatggtatcgacggggtgatctcgttggattgcttggtggactcttgggtgtggcggcctttgctcttcatcatcttccttttcttgatcatttgcatttcccccttgattattgccattatcttgaggtggctcatcttcgtgatcatctatttcatcaacttgagcttcaaactctttttgagttggtggagatgcttgcgtggaggaggatggttgatcttgtgcatttggaggctcttcggattccttaggacacacatccccaatggacatgttccttggcgcgatgcatggagcctcttcattacctatctcatcaagatcaacttgctctacttgagagccgttagtctcatcaaacacaacgtcacaagaaacttcaacttgtctagaggacttgttaaagactctatatgcccttgtgtttgaatcatatcctagtaaaaagccttctacagtcttaggagcaaatttagattttctactgttggcactttcactcagcagcaagtaggccaacaagggtgaacagtggtgacaacagggttacgtgcacgggggcaatagctctgttcatctagcctctcacgggcactgtgcgggggtatttataggtgtctgagtgcccagcgtcttgtgttaaggacgcatgtgccctcagacacctattttatccccagaatattcccataaagcagggttacaaactgtaattacaagtattcctttacaagttaggcccgtaatacagaggcgccacgcggggcccgttacaatgggccagatcgcacgtgggccttgggactgaacgaggacgcgccgtgggaggacgtcgcgcagcattcgtcaaagtgccgagtcctgcgaagagtgtccctgcccgcttt

SEQ ID NO: 24046 - DNA, 564 bp, Arabidopsis thaliana landsberg
aatcacatttttattttatttttagatttttttgtaaaaaaaaaattatccattaacataaaaaccaaaattttaaaaaattaccattcaagtttttaaaaaactaaaatctacactaaaaacaaaaaccaagaaaatcaaaaactaaaaaccaaaaaccaaaattcaaaattcaaaacccattttaaaacgtacaaacattcatggcctaagttttatcttttcagacgtgacaattctttttttttttttttttgcacttacgtgataacttcttttcagtattttttttgtgttggccattattttgtttaagctcctattttgcttcaataaaataaaagtgactaatcattcgtaatttgtatttcttaaaaccactattgtactttgtatattttgtatttaacgatttgtacactaaaaaattaagacaacatcgctcccaattcttaattggaagttttattcatctacaaaaatcataaacaagattccgtaagatactttctagaaatccttaatcagaaaaacccatacatgggtatcacaggcccaaaaacc

SEQ ID NO: 24047 - DNA, 1989 bp, Arabidopsis thaliana landsberg
ttagattagctggctagaccgtctaagccaattcataacattcataattgcgacgcaatcttcatcttgcttttcatagttaaacatgcgcatccacaaaatatttaggtatatttacgtacgataatcatgcacatgtgtatctgtatggaccaggatgtatactcgatattgggtatttatctatcaatatgtatagacaagcattaatgcatgcatgcagttaggtttttatagttgctacggtttgatcaacgattgttgtttagtggtgtttatgagtgatttatttggagttaggaactaaagtttgaatctcttccacatagaagtttagaagatttaaagtaataatatataagaaacatgagttaattcactcattgtcaactgatttttgagtttgacatttataaaacttaattaacttactatcagagaacagcttatcaagtaggatatatttattgctattctccaaacggaccgataagtatcatcatctcgataatatttattgggatcctagtatcctacataggaaattaatagaaacaacataaaaataaaaataaaaataaaaataaaaactatataatatattgtccattagtttgaggttggagcttatgaaacttaacaaaagtcttaaattgtaaaattatataacgttacaaaataatagtatttttttctgccatgaattcagaaatactatttaaaccatacatctaaaaaatataagagcacctccattggtgtatcttagatgtatcttaggctaatatcttataattaaattctgaaaaataaatcaaaataaatagaaaactaagatttgtttcttagttaagatatttttattaatgaaaaaagcagccacatgtcatgtttcaaaattttagtttaaataattgttaagatacaagattaagaactaattggttcttaaccattgaggatgatctaattcgtgattcctttttctagatttcaaaaatccaaacttgtaaattgccattgatcgatggagatgaagagagacttattttcgttctcgcaatcatattgttctcacaattgaccaaggaaagagaaatgcgagagattctctgaatttagagagaagcaaaagagtttttttttttttcgagaaccaaaaatggagaatcaagaggaagatgaggtggtgctggcgaaggtgacgtcggaggttgaggataattttgaggatgaagggttggtttcaaattcaacattggagaaagttgctgcagcgaagaagtatattgaaaaccattacaatagacgcatgagacacattcaacaacgtaaagaaaggtaccgtttttgtttgcacattatctgtttgtttctattcctaaaagaagaatacaatttgatctgttgcagaatttcacgaaatttctcgttcatcttcttctgttatctgaatggtgttgtttttagggagctgtaatgtttttgttaaacactgagaggtctttctctaaagtattaatggaaatagggttcttttgatttgcaggcgttgggtgctagaacaaaagattgcatctttagatgtatcagaaaaagaacaactcgagttgctggaggatttgcagaggaaagagacagagtatactagattaatgaggaacaggctttgcgttgacgattttgatcttctgagtattatcgggagaggagcttttggtgaggttagtctttttgggtattaccatctttgaacatttgttgttataagaacgccactttaactattcgtaaatgggtatctttcttaggtaagactctgccgtgagaaaaagacaggcaacatttatgctatgaagaagcttaagaagtctgaaatgcttagtagggggcaagtgagtctcacagttatctcatttatgttatgattatgcataaaatttccggctttagtatagtatctgggttgatcgtctgataggttgacat

SEQ ID NO: 24048 - DNA, 586 bp, Arabidopsis thaliana landsberg
ataataataataatcattatgcaaataaacaactatatactcttttttgcataatgaatttgtacttgtaattgtaggtgaaaataaaaatcatgggtttttgtgttttctaatgcagttaagcagattttcttgattgacaaatttcttgcataatcgccttagaaaacgtcattatgtcattatatgtattaccaatcagagctaatatcttcctattcatatatcaatcaaaggcatagaaattagaaaacacaaaaaaaaaaagacataacaaaaaacgttttgtatagtttatagagtgctttagagttcacatcagtttagattaaccaataaaacattcgaactatcaattaatctatcatatgcgacatctatcatatgcgactgtatcaatttcgactgaatctcacagcccaactacagcatataaaaacgctacgtttgatcgatatttcactcaattgccacatttttaacaatatattttcgtaagcaataaagttttgaccaggaaacttagcagatccttttcaacacaatattgaataccaatttggagagactttgaatatctttttag

SEQ ID NO: 24049 - DNA, 1201 bp, Arabidopsis thaliana landsberg
ccttcatgttttgttgggcctatcgcaagaaactgtggctgacagcagcaggttacctccaaaaggaaagaagaagacatctcccagaaaagtcacagtgttgcggtcaagcaaccggattagggacagtcccgtcatgtccaacagaagagagagtcggcctaccattccggtacagcagcggcaaacagctgttagagggtcgactaaagttcatgttgttaggcctggaaaatgggagaagatacctccaaatccaccaccatcttttattggtccgtttgacccgtttgttgttccaagtccagagagagtgaaatgttttcttaaaaaaatggaacggagagtgtaattacaggccctatatattcagaataacttatttgttatcgcaactaacttgctggtatatggtaccatgtagatcttatgctctggttgatggcgttgtaatggagaatactgaatttctaactatttacgaggcacaaacactactagatgaatcagtaagttatacatgcaatctgtgttgtttcaaataaaactgtgtgctcactgcttctttagtaggcctaccaatattaatggtgtgtgctaataaaaaaactgacttccacaaggaccagatctgttagtgaggttcatccagatgcagctggataaaaagaagctgttgcgttttgattttctactgtcacgtttcttgtcatagctacgacgccagtacaacaaattttgtgcagcttcagataagagtgctttttacttccccacgcttacaagagtccctttcatggtgcgtccgaaaatggtttgatgagattgatgtcatctactgccccatgcaggtcgagaggcagcattgggttgggcttgtcatacatttcaagaagtgggaagtcacagttttagactgtaacagagacgtgttgaaagacgagcaggtggagaagtacgtagaacacataacaatcatgctcccgtacctgattcgaaagcatggagttaacgggtacatgctaacacagaggctggagccaatgactgtgagtagaccaaagatacagtgcagttgttcttcactaggtctgtttgtgtttcatttatgatctcccactaagtgtgtgcaatgtgattggtttaaatatatacttacccttgtttatttcagggctggtaggaaaagaaaatgtggtct

SEQ ID NO: 24050 - DNA, 2146 bp, Arabidopsis thaliana landsberg
gtgagctctctcaataaataaacgtttactcttcccaaatcttatatagttctcttcttctagaccttatacccgatagatatcactacttgtaggagagattctttcaaacatataacgtattttagctaaaatgttgatgtccaataacatcaagttaaacctaaaatattgaaaataatctaaaaattctaaaaattgttgctggcataatcgatataaaatctaaatatgcatctataatacctatgcattcaaaatttaaacttctcaagtaatctttgaccatcttagaccacaaaagtaggtgatgaaagattatcctcattgaaaactcaaatcacataaaccatcgcgaagataaatcaactaaacacaatgcagaagatgagaaaatatcggtcaacattggcgacatggaaatctacaaatggtcaataggatatagtctcccttatatgccattactaaagccccaaaaacttacttaacttcattcattgctctcaatcaaaaacccaaacccatgatgttccgtgaatcaaattcaataaggccatccggtatcaattcagatcatgtgagtttcgctataaacaaaaaaatcatgctcaccacaacaatctttatcttattcatcgttatttttattgtctcttcacctctatttttgatgacaaaatccatattcaaactcatgagacaaactgctaaacattgttccaaaagatcttcattatatccattataaattgatttttttttttacagcattcataatataataaaaacaaattattcatcattatactcttcttctatattttgaccaaagcttggctatggattatcaacttcatctaaaatcatagttatttaaagactcactgtcttcgtataagactcaggcctaaaaccatcttcataagcaaaatgattgtttgctatattgtaatcttcgtcatgaggaacccaaaccgaatagttaaccgttaatctttttttatacaagtgatttggcaaggtctttttagaaattgttttaaattttcacacttaacacaaagacaaagagtttgctttctcaagaaataaaagtttactacttccaaatcttatataattttcttattcttgccaatatacgttgtaaataacatctttttggtaaaatattgttgtccaacgacatcaagttaaacgtaaaatattaaaaataatctcgaaattctcaaaatgatgttggtatcaaggatatataatctaaatatgcatctataatatgtatatattcaaaatttaaacttctcaagtaatctttgaccatcttagactacaaaagtaaataatgaaagcttaccccattgaaaactcaaatcacattaaccatcgattagataaatcaactaaataaaatgcagaagatgagaaaatatcagtctacattggcgaattggaaatctacaaatgatcgataggatatagtctcccttatatgccattactaaagccccaaaaacttacttcccttcattcatttctttcaatcaaaaaacaggacacatgagtttctataactcaaattagtttctataactcaaattcaataagcccacccaaaatcaattcagatcatgtgagcttcgctataaacagaaaagtcatgcttaccaccacaatcttaatcttatttatcgtcatatttattttctctctgcctctattcttattagtataatccatattcaaattcaagagacaagttcctaaagatagttgcaaaataccttctttatatccatcataaattggatttttttacagaattcataatataataaaacctctttcttcatcattataatcttcttctctattttgaccaaatcttggctatggattatcaaatttatttaaaatcattgttatttaaggattcactgtcttcgtaaaagaatcatgcctaaaaaccatcttcataaataaaatgattgtttgccatattgttatatttaccatgaggaatcccaaccgaataattaaccatcaattttcttttacataagtgattcgtcaaagtttctaagaaaacatttttccatttacacacttaacacaaggacaaagagtttgctcttctcatcaa

SEQ ID NO: 24051 - DNA, 544 bp, Arabidopsis thaliana landsberg
tataaatatgataaagtatttttatctcaaaaatatttgaaaaataaacaacataatatatttattttattttattttttctaaatttcgtttttttttttttaatttatcaagaaaacagcttttgttttaaatctggacaaaactgttattttatatattaaattttttaatatttttaaaaaataaagaaagtgtatttttcaaataataactaaaaaacaaggtagttttcaaaatctccctaacttttaagggcttggccatgggtaggaatagtgaacatgttgaacgcaaagctatagttagaagagtcatcaatgagcatgaaggatacttgtctctcaagggtgacatttggagttgagaaaaagctttgaattcggaattgagaagatccagtgagaatgtggacctaataataaccaactaattgactaaaaaaatattttgtgaatttgaagttggataccgtaagtagatttgtatcttggattatatatacgtgtgtgtgcattgacattcttcttggtggtttatagac

SEQ ID NO: 24052 - DNA, 580 bp, Arabidopsis thaliana landsberg
  unsure (1)..(580): unsure at all n locations
ctgtttctagaccagaggctctccttgttgctttaaatctggtcatgtaataataataaaaaacaatgatcagatattagcatgagtcacattcatgaaaaccaaaaccaagtatctaaaaggtatagataccacacaacacagagaactgcttaaaaaacttattcttattgataataaacttctgttacaagtattatctcgctctttacttgatctattctacccaaaagatcaaccccgactaagaataactaagctctaattctcttctctgtttcttatcactaacccgtgaagacaaagagaactacacactcaccttcaagcttttgcacggctttgaagtttttactaagtannnnnnnnnnnnnnnnnnnnnnnnnnnnnnnnnnnnnnnnnctctagaatatttataccaattctccagaaccctaaccttaggatctccgagaatctctcgatatggaatcttccttgtttccaagcctattcctttccttattcttcgatataatatctcctatattttctcgatgaatcttgtctttgacacctctccagttaacttccatccttg

SEQ ID NO: 24053 - DNA, 1093 bp, Arabidopsis thaliana landsberg
cagcaggagccatcatcgatgtcaagaaaggaaagatcgacctcaacctcgggaaagatcttcggatgacttttgacatcaccaacatgatgaaaaagcccacaatagagggtaaagttttctggatagaagagatggaattgctagctgacaagtttttagaagaactagcagatgaggaccacttacagagcgccctgaccaaaaacaatagagaaaaagacttacatgtggaaactttgggataccagaagctgatggatatgagcagggaagttgattactcagaagactttgaggagttgagaccactcgatcgcaccaacgacccactcaatcacgtcactcgatcgcaaggcgagctacatcactcgatcgcttcactcgatcacgattccatctccgacgctgaatcaccacctgacgattggtccgagctcaaggcacccaaggttgacctaaaaccgcttccgaaagggctaaggtatgtttttcttggaatcaattccacctatcctgtgatagtgaatgatgaactagatactgaacaagtaaatttgcttttaattgaattaaaaaagtatagaaaaaccataggttattcactagatgacatcaaggggatttcacccactttgtgcactcatagaatccatctagaaaatgaatcctattctagcattgaacctcagaggagattaaatccaaacttgaaggaagtagtaaaaaggagatacttaaactattagatgcgggtgtaatctatccaataactgatagcacttgggtatctccagttcattgtgttcctaaaaagggaggtatgacagttgttaaaaattcaaaagatgaacagaaacccactaggaccataacaggacataggatgtgtattgactataggaagcttaatgcagccactaggaaagatcactttccccttacctttcttgaccaatgctaaaagatatccaatcccccttgtactgtttctaatgttatgcggatttttcaaatcctttcctccaaagacaaaaaaaactctttcctttccttaggaatttgcttataataatgctttggctttgtaatc

SEQ ID NO: 24054 - DNA, 595 bp, Arabidopsis thaliana landsberg
caaaactctcatggcaaatttgttacaaatagcatggaaataatctgtcactcgttgttactacttaccactaactaattgaagcacaacaataacatttatcttcagaagtttcgaacctaattgctacaatatagcaacaagtatatagtaagtatccgttacacatagttacagaagtgtaataataaaagtgatatgaaatgcatcaaaaaaagcatgtgaaaaatgatacaacgaagagacaatataagttaataacaacatcttacaaattgtgacataactctctgtgttaattcttacaaactctcacaaggtcattgaagttaattgcaacagcttattactttcagactaaccgtaattatgtgcaacaaatattctggtaacaattgttacgatgtatatacaaaaatgtaataacaaatttgtaacgttattcttgtcacttataacttacaaactaccacagactctagtagcaattagcaacaacttgtgtcgactattttagtgttcttagttacaattaactatactttctgtatttgttgcaacttatcacaatgactaattccgttttaataaatct

SEQ ID NO: 24055 - DNA, 968 bp, Arabidopsis thaliana landsberg
cggtacttactggtggcaggggtctaggatcatatatcatccacatagaccaacacgagtcttttgtgcacattgtgtcctaactcatgcgcacccgagaaaacttcctggttggtcacccatcccaaaatagctctaggccaagctcgcttaacctaatggttctttcgagacaggcttccaaaaaagaagatgcaccttattgagtactctattaattttactaaaccttgggccaggatatcacaatccatcccttagaagccaatgtcctcgacggtcaaccccgagacaggaacctcccctcttggccatgtttgtgtgtctaatgttgtcatatgccatgccatgtgaccactatgggcccacatgtgccatgtgccatatacccaaacccctagcccacacacgcccgtgaaaccacgaggggcggctttgataccatttgtaacacctcgtccactctcggaccgacggtacttactcctagcaggtctttaggatcatatatcgtcctcaaagaccaacacgagccttttgtgtccactttgtcctcattcatgcgcacccgagaaaacttcccaactggtcacccatcccaaaatttttctaggccaagcacgttaaacccaaagattcttttgaggtaagcttccgaaaaagaagatataccttgtttatatgagtactctattaattctattaagccttacgccagaatatcaccatccaccggggctaggatatcacaatctacctttagttcttggtctcgtgacttatcctagtgattggcgccagatcagtaccaacaccaacattcactcctatactcgctattggacagaggccttcacagagaggcgtcatctggcatggaagagaaagtattgtgaacattggtttttgtttcatcgtgtatcatgccattccattatgtataagacatgtacgtgcttaccagtggt

SEQ ID NO: 24056 - DNA, 778 bp, Arabidopsis thaliana landsberg
  unsure (1)..(778): unsure at all n locations
gcttcccccggctgccaccacgggagcggggacgacggcgtccgcctctccaccaacgccgcactggcgaacgcgggccgctccaaagcgcaccggcaggtcctcgctcccgacctcgccacgaaaacgaggaagagggcagaatgttgcatcctagctgggcagcaacagttcgccttccccagcatggctggaggacgcctcttccgcagagttgggggatggtttccaccaccagaagctggaagaggaggtggccagccgacaagtgcgggaggtagagccccggctcgcctcgctctccgccccagcaaggatggtaagcatccttgaagctgagggaggggcggnggccgcatcctagcttgcttctccccacccaggggctgtggtcaccgtcttgggtgaccaccggcgaggggatgcagccgggttgcttgatgaaaatccttgaagccgaacgatggctgaaaggtaccaacttccacgtagttgcgttcctccgacgacaaggcggaaggattgcgggtgtatcccatccgggggctcggaaggtggaaagacacgatgcacaagggagcgcgagaacatggtcgcctttcaagggggtcaccctccttttaaaggcgactctccccacctgcgtccccagccatcgcgggctgagtcttctccaacacgctccatggtcctccccctacggcgcgggggctgggtcccacgcgtcatgcaaggtggcccagagcagaagaagccataaccgccactgtgcggtgca

SEQ ID NO: 24057 - DNA, 399 bp, Arabidopsis thaliana landsberg
cacccactcccacttcttggccctgtcatttccctttactgaggtatataaggtctgcgtgaccaatgggcctctctttccactaatggccgaccaggccaacttctgatacatatgcagctagagacacaagctctgggggatacagtttagttcatattgttgttccaactatagatttgcagatcctcccagctccctgggtacttcctccagcttctccagctcctccagtgggggccctgtggtccattcaatagctgactgtgagcatccacttctgtgtttgctaggccctggcatagtctcacaagaaacagctatatcagggtcctttcagcaaaatcttgctagtgtatgcaatggtgtcagcgtttggaggatgattatgggatggat

SEQ ID NO: 24058 - DNA, 393 bp, Arabidopsis thaliana landsberg
caatcaacaagcaagactcaatcgacaatgcacctcctatataagatttaatcttttcttctacactcttcctactttaggcctctacgaattcagatccttccccccccccccaatgccccacacactcctagacacatacagtctacaagagatcacattcctcactactacatcgtcatgtagtgcctggtcggttgcaagccagccccgagccttcgtaagccataacgttatggagttacacgcaacgcacagcagacggatgggaagacttcattcgactatgctagttagctaactacttctaaactagcaacaaccaattccaaatagacagcacaacggatatgttaccgcaacgaggacagcataacggttatgttgtcggga

SEQ ID NO: 24059 - DNA, 827 bp, Arabidopsis thaliana landsberg
agtatatgtcaatatgcttttcctgtgatgcaagtatatttcaatatgacgatttttcgatgattcaaaattcggcaaacaagaaaaattcatgattacgaagaataataccggtatgggatatttgcggggagaagccattgggtgtatggttagcttcttcaagtcaggcgagttttgtggcacccttagtataccgggaataacatatcgagagatcactgtctcaagtgtcaaagctttagccttcaactttggaaaagaaacaccacggagctcggcaagagataaaacctgtaacaaaaaccacaagacaaatgagtgtataccaaaaaaaactcattagttttcttgaaaatcagagcaggaaaaaaaaagttgattggagtgaaaacatataccttgagaaagtctgcccccaaagtaagcttctccacattctgacatttttctaacatctttaccaccgcggtctgttgagcctccagttctttgtaaaagacaattatatttctagtccaccatgggataaagaggagacatcaactaaagcacatggattctcagagtttatcaatctgagacaacggatatgtggtgcaacgagctgtgttggctctatataatgactattacgagtgatttctaatgttatcagacgcggtgatttgctgagatcaaggaccctcagtttatggcaggaaatcaacgataagctttcgagaatgggacaaccagatagaatattagcaatggattcatcagagatgttgcaatgaaacaatgacaggttcttcagggaaggtccacgacacagagcacttggg

SEQ ID NO: 24060 - DNA, 299 bp, Arabidopsis thaliana landsberg
tagtcatcgtctcattgaagaaacacgatgttatcttagggatggactggttgggaaagtaaaaggctcatattgattgtcaccgaggacgaatacaattcgagaaggaagagggtatattgaaattccaaggaataagaacaacctcgggaagtttagtaatctcggcaatccaggctgaaaggatgcttgagaaagggtgtgaggcatatttagccacgatcacaaccaaggaagtgggggccaatgcggagttaaaagatatttccatcgctaacgagtttgcagatgtgtttgag

SEQ ID NO: 24061 - DNA, 697 bp, Arabidopsis thaliana landsberg
tatgatcaaaaacaaaaactattttctctatttattaaaaaaatgttggttgattgttctgatgataaatgcttgatttgcttctttgattgattgaaacattatagttgggcatcttagcatgtaccactataaggtaattagtataagtaggtgacacactaatctacttagctaataaaaccaccaaaagattctgcctcgcaattactcgtcttatctacaattctatcttaccatgtatttctaacccagatgatcaatatcaggaagggaggcggaatcgatctacctgccaacccccacaacaggaggattgctagacaatatcaagcagagatggatcgtccaaatcctccaccgactgggactgatccagtggttgcagcctagatgcagatgctgcaacaaatgacaaataatatgacggatatgcaagctcagatgcgacaggaacgtcaagagatgcgctaggagaggcaagagatgcgggaggaaatgagacaagagcgaatggtgcgacaacaaacatcaatgcctcctcctcctccaccagtttcacccagggacaagcactgggagttcatgagccacaaatcactaccttcgcagctctccagatccattcatgcggatgattggttaaagtcagtagagacgatgctgaatattgccgaatgctctgcctgggagaagg

SEQ ID NO: 24062 - DNA, 2379 bp, Arabidopsis thaliana landsberg
tttatcattttgcaaaactcaatcttttctatgagagtccccttttactcaacgatatccaaagagggaccatttttgtctcttcagcctttagcccttaaaccaaatgagttcataagtaattgcattgcttgatccatcgttcgtgcttaatcaatgttaaagcgaattggttgatgtgaatgcttaatagattaaggcagttgttaggttgcattatgacgagtatgattaaagtttttaagtaaggatctttcaccttgcacctagaattagctacttgaaaattggtctcacctgctctatatgcatgcttcggtttttgaatccccaccttccaacctctccttcaacctaagtctttttgttagcttgacggcaagcaagagataagtttgggggagttgataacactgtattttactcattttaggtatgtatttatcatcatttagctttgcatttgctcattgtatcatatcattttgcaccattttagcttattttgcacacttagccatttaggatcatcttgcatacacattgcatgttttggtgtgttttcaggtgcagaaggagcttaaaaggactttactcgaccctctactctatccaaccaggagggaagcagtagagcattctactcgatccattcactcgatccaggcagccatagaggaggcagcaattcactcgaccctcttgctcgatcaaggcagccttagatgaagcagaagattgatctactcgcccctccaactcgatcctctactcgacccatttactcgaccaagggtgaccaactctacaagacttgttgatctatcaaagcgacttcggatcctcctcattcccctctcaaccagacatctaagcgtacagataggagaggaaaaagcatctactcgaccaattgatcactcggagcatagacacaacggcgcagactttgcagcaccctccttacttgatccccaagatcgaaaactcgcccaaaccgcctcacgtctcttgtcttctagtgaatctagggttttcaacatttcactataaatagatcactttaggatttgtccaaaagatctagcttttatcctttagtgtttctttgtgttcttgaatcttcaaaacttaattactcttaatctatttcgtttttgcacttagttcttttactaaagttgtttagcttgtttagatctacattttgatatgatttcagtaatttctgggtttgtgttcttgagaatgttgcttgagtagtgattagggttcttgaggatagattagattagggtaatctctaggttagtcaagtggttaagattaggttagatcccttctggatttgcttgacccctatgcggttttccctggctaatgtggagattcgatcatagacgtccaacatccaaaagacgttcaaatggatgtctgatctacgaattccagagatttgtagacttgataaagacataagcttgtctgcttattggctttggtagattgatgcttaaacccttctctgctatgtttcaacaacgacggtggagatttggaagtggcagagttatggggatctctatcacgatagcggattagactcggtttttgaatctatcgtgtagggtatctacctgtcacctgttagccacctgctgaaccctagagttgcccttatgaatgaatccatccttaggacttctattcttgttagatttatttgtattcaccccctgattgcacttttattcacctattatttgtgtcattttgcttagttaccttttattgcattttggtttttaaatttgtcacatgttagttctactcgacccaatgatcgagtagggctcttaagttcccatttttgttgtttgaatcctgatttaggattgttaatagaaacccaccatcattataatctggtttgacttagttgcttctatacacatcttaattgctagcaataacagtagactggattgacaccctttatagctgcatcgacatgttagaattgaactgaacacaccacacttcagcatagaagtaggcgtaaaaacctacttatcagtcaagtgtttaagattaggtcagatcccttctgtattcattggcccttatgcttatttcactcagttcagtttgagattcgatccaaggtattcaagcgtccaaaagacgttcaaatggatgtctgatctacgaaatccaaagatttgtagattctagcccaagatattggatgtttagactgcttattgactttgataaattgttgcgtaaagcctgctttgctatgtttcatcaaaaaaagttgagattaggaattggtaaagttatgaggttctctgtcactatagtggtttgatctgg

SEQ ID NO: 24063 - DNA, 576 bp, Arabidopsis thaliana landsberg
ttctaagtgttgttgctatagctagacaatcttttgcaataaggtcaaagaaataatcatacccttggatccgttttagaagtttgtcgttccgtttcttctccgcttcataggtctcctgatcaacaaaatcatccccagcatgtcgatcaacaaaagcagatgggataattggaatagaacctacaccataatatcgtccctttttattctttggagtagcctgaataatcaaacaaaaacagatgcatatcacaaaccacataacatttcaaagaactatacttaaaaattcaccaaacccatcatcaccaaacccatcatcaaacaattgatcttaatagctcaaaaggttcaatgatgcaacttatattcaatgatgcaattgaataagacttaaaaactcaaacaagattgaaaaaagaagggaaaacgtgaacaactagcatgttgcagtttaataggctgagacagttcaaaaataatacctcgaacaggatttgatcctttgatgctgttgataagccaccaggctggccagaatcacctggagaaagctgagactcctgctctaag

SEQ ID NO: 24064 - DNA, 654 bp, Arabidopsis thaliana landsberg
tgggcgcgcggctggaacaccggatagtccggtgagattgtagccatggtgtcctcagcattttcccgagagcgacatgttcgccggggcgctagctaggcactggacactgtccggtgcaccacaggctggtgcaagtctagctttccttagccagaattctccaattcaagtttctccttctttgagaagattcctagcacttagtagaataatgttagtaccaaaaacaatttactaaggctagaatcataccttgcttttccatttgcatctctttgactgttagctcaataaggtcataaactctatgtgttgggcatctaatcaccaaaacataatagaaatggcccaagagcacatttccctttcagcctcaacagcaacatgaaattgtgttgctgctgctgcattaaatggcacaccgcattcataaaaccacaaagcccattgcatatccacataatccttctcctctttggacttcatcttggctggaattgtgggttgagacaccctttacgcctttcatcaactacatcttgtaggtgatttccgaagcatctccacaatttgagttttgcttgcttgcttgaatttgccttggtcttgaatgatgttggagtctagacagatatttgcacgcttttgatt

SEQ ID NO: 24065 - DNA, 822 bp, Arabidopsis thaliana landsberg
gcattgtctaatatttaggcggatataggacgttgaagccacacatttttttgtcaattgggttatatatgtccatttttaaaaaaatttgaatcacaatatatgcaaaaaattatattaaaatttgttttctttatatattatacaataatttaaaaccgctaaaaatcaaagaaaaattataaaagattcatagttttaaatcttaaccaaatctttaaaagatctatatcgttagatatgaaaatatccggtgtaagatattgaaaaaaggattttgaatcaggttttatttgaaccgacccaactaagatttaatggacaaaattactaatgggcggataccaaatagaccggaatgtattttttcctcatccgcacaaaatccttgcaaaaatactatatagattctaaaatatcaaaaatacccgatatatccgaaatatttgaaaagcataagttaatatttgccaatttttgtttcttgcaaaacttaaccaaccttattaaaattgaaccattttgttagtttttatatttcgggaacaaatacggttccaagacataagcaaactgaaccgaatagtcacaattccccaacgaatcctaagccctcactacataaataacactaatccaagaaaaaaactcgtcccaaaaccgttccgaaaaacctgaatacacaaacctacatgcaccaattgaaaactttgataaatacactaattacaaaaaaaaaaagaaaaaaaatatattaaagtagaaacaccaactccgaggctacccttgtataaatcacataggtgtatgttctactttcat

SEQ ID NO: 24066 - DNA, 988 bp, Arabidopsis thaliana landsberg
acatgggagctgcaagtaaaattcttggtattgaaatcacaagagatagagtgaatggagttttgtgtttatctcaagcaggatacttgaaaaaggtgctaaagagattcaatatgagtaattgcaagtcagctctaactcctattggtacacattttaaacttgcatctgtgcaggacgattcagagtgcatagatacagttaaaactccatactcaagtgctgttggaagtgtaatgttcgcgatgatcagcactagaccagacttagcctatgcaataggactagttagtcgtttcatgagtaaaccaggatcagttcattgggaagtagtcaagtggctgctaaggtacataaaaggatcacaggatctgagtttggtgtatactaaagggaaagatctcagtgtcattggttactgtgattcagatcatggtggagacttggataggaaaaggtctactagtggatacgttttcacagtaggaggtaatacaatcagttggaagtcttgtctacaatccgtagtggctttgtcatcaactgaagcagagtttatagctttgactgaagcagtaaaagaagctatatgggttaaagggttgcttgaagatctcggttttcagcaggataaagcacaggtctggagtgattctcagtcagcgatctgtttatcgaggaatagtgtgttccatgagcgaaccaaacacatggcacgcaagaggtcatttctgagtgagattattgaagaaggaaacattgaagttgtgaagattcacacttctattaatcctgctgatatgttgaccaagtgcattcccgtgaaaagttttgattcagctttagatactctgaagctgatcgaatggaagtaagctcttaagcttgcattgctggaggttaagtccaagcatggcagtctactgtgttgaaaaaaatttgtttcaagatggagaattgtaaaggtgtgattcaaacttctggttta

SEQ ID NO: 24067 - DNA, 540 bp, Arabidopsis thaliana landsberg
  unsure (1)..(540): unsure at all n locations
attaaattggtgtatttttaacatatgaagtatttttttttaaaacagaaagaacaaagtcaagatggctagagacacacgtacttgaaatcatgagtaaataaatattagattatacaaagccagttggtacataatgcacaccaaattttaatttggaagacaatgtataaatcaacatggttagaaaaacaaccataacttttaaaactatggataattattcatagtagttatataacacataacttcatataaacaaaatctagtcaaatttgaaatatattaattaaattggtgtatatttaagaaagaaaaaaaaaagtcaagattgttaagaggcacaactatttcttttaaacaaaaaacaatgaattcaaagtagatttactgttacaattaatgctatttgctcttggagattttataccttagcgagtgcaacacagtaattaaatctctcaatatataccatacgtctccggagagaagaaatcactcacttctaattctcatcaaagttttacaaaanaaatggag

SEQ ID NO: 24068 - DNA, 2207 bp, Arabidopsis thaliana landsberg
cggtgaatttggcgatgtctttaaaagacatgcgaggacaaaccagaggatcatttactttgatgggttaaagctctcacagatatatcaaatttagccggggaggatcttcggaacgggtatgtttttttgattccactatttctatgagtgtttataattatttcaaaactgtattttttttttttttttgcgttgacttcgaatcttcgattgtgcttttaggggtgcctctttattgacacaattttgactattgttattaggcctagtgaagcagccatggttgtaaagatagctaatgatgtttcgaataaactttttcctctgccaaagggttttggtgacttagtcggaattgaagatcatatagaggcaataaaatcaatactgtgcttggaatccgaggatgctagaataatggtcgggatttggggacagtcagggattggtaagagtaccatcggaagagctcttttcagtcaactctctagacagttccaccatcgcgctttcgtaacttataaaagcaccagcggtagtgacgtctctggcatgaagttgagttgggaaaaagaacttctctcggaaatcttaggtcaaaaggacataaagatagatcattttggtgtggtggagcaaaggttgaagcacaagaaagttcttattcttcttgatgatgtggataatctagagtttcttaagaccttggtgggaaaagctgaatggtttggatctggaagcagaataattgtgatcactcaagataggcaacttctcaaggctcatgagattgaccttgtatatgaggtgaagctgccatctcaagatcttgctcttcagatgatatcccaatatgcttttgggaaagactctccacctgatgattttaaggaactagcatttgaagttgcaaagcttgtcggtagtcttcctttgggtctcagtgtcttgggttcatctctaagaagaaggggcaaaaaagagtgggtgaagatgatgcctaggcttcgaaatgactcagatgataaaattgaggagacactaagagtcggctacgataggttaaataaaaaaaatagagagttatttaagtgcattgcatgttttttcaatggttttaaagtcagtaacgtcaaagaattacttgaagatgatgttgggcttacaatgttggctgagaagtccctcatacgtattacaccgggtggatatatagagatgcacaatttgctagagaaattgggtagagaaattgatcgtgcaaagtccaagggtaatcctggaaaacgtcaatttctgacgaattttgaggatattcgagaagtattgaccgagaaaactgtaagtttttcgcatctccttaaacgttgtaatgcatgactttatatcaatataatcgtaatttggggattgataaacttaagcaattgttgccccatgcgtaattaaaacgtagctttgatgtgtcagaaaaataaaaagggttgcgattgttaagattatattagttttcttcggattttttttcaggggaccgaaactcttcttggaatacgtttgccacacccgggatatcttacgacaaggtcgttcttaatagatgaaaaatcattcaaaggcatgcgtaatctccaatatctagaaattggttattggtcagatggggttctacctcagagcctcgtttatttccctcgtaaactcaaaaggctatggtggcgttattgtccattgaagcgtttgccttctaattttaaggctgagtatctggttgaactcataatggaggatagtgaccttgagaagctgtggaatggaactcaggtactaatttttttattgtttttgttgtcaatttgaaaacagaaatgtgttatgtttattgatttatttgttcaataaattaaatgaattttttgaaatgtttacgaacgtctgttattcttatagagtatactagattttaacccgcggtataccgcgggacaattttttttttataagtaatatatattaaaacttgcaaattttatttttataaaatattgatattttatagtttataattgttattaagtaacgttataccacgaatccatgagacaattgttaaaaaactgaagttttaacccctattaaaacatcatattaataatattttaatattttataaatattgattcaaatacatccaccatataacc

SEQ ID NO: 24069 - DNA, 1640 bp, Arabidopsis thaliana landsberg
  unsure (1)..(1640): unsure at all n locations
gctgccggccgacgtgtcgtctgaggaaacgctgagtactgtggtggcggaggagttgcgcgccggcgatacggtggattttggtgtgtcgcggatgtcgtcggtccgcgtgcaagatatgcagcggctgggttactttggcgacggagtcgctcgtgtccaggggacggaggaagtccccgagccggaaggcgagttggttgtgttcgaggcattcttcgccgctggtctccgcctgcctgcgcaccgatttgttggagaagtcctgcgcagatttaatgttcagatccatcagctgactccgaatgccatggtggcgctggcgaagtatgtctgggcgacgacttcgtacggcgggcagccgtctgttgaagtttttgcgaagaattattgtttgcattggcagaagaggatggttggggacggagttgcccagttcgggtcatgcacattcacgccgaagaccggcaagaccacaatgccagtagtggagttggttccgtgcgcccgcaacaagtggggcaattggaatgaattttggttttacgttgcggagggtactgtcgaaggccataaaggtctccctgtgtctgagatgtgctctcattattattctggtatccgccttttgaagtggcagaagaggatgcagacgaaggggccctccgatgcgccgccagccagagcagcgggcgtgatttagttgaagagttcgtggcatacggggtctgcccttggcgcacggctgggcgttgggcgaagtgtgccctcgccagatgccttttcacggtggaagggtggtgcgaagtcccgccttcgcgctgaatctgcaaagctgcgatccggccgcctttgtgcgtgaggcggaggatggggcggtgcggctcattggtcgttacgtgccgaggacagaggngcagcgcagctgggaaatccgcgggtcgaatgaccgtctgaacagggtttttgaattgaatcaattgccatatgacggctatcctggtcaagacgaagtggaccgccgtgggaagaagccggtggtggagactggagacgaccactgcgccgcggccgcctcatcctctaaaaagagaaaaataggtactgctatgggacgtcttggggtttctgatggttttgctagagaggggatgaggacgtgcgcggccccggggggaaggatgtcttcgcccgagctccgggagtcttcggctcggatgctgagggttaccgggggttgttggcctaggaatgttcctatcccccgcgcggctggcgaggacttttttacatctcgcatggttcgtgaatggagagtttttccttaggggcggaatattgctgttgttgtgtcggcagtgatggacaaggatcgccagggagctgcacaaaagcgccaggcggttgtcacgctcattgaagccaggccgaagaggcagcggggggctgcgaaggcttcggcccccggcggaggcaagccgccgctggcggtgaagtcgggcgtccctgcatctagcaaggcgccggaggcaacggcaggcgccggaggctccaaatcgacgaaggttgtgccgccgtccagcaaagtgccggaggtcgcgaaggcgggacgagcgtngccgtcgtcaggcaagcgtgtc

SEQ ID NO: 24070 - DNA, 324 bp, Arabidopsis thaliana landsberg
tagtgtcaattagcaaactatattagacccgaaactagcagaaatctttacacaaaatcactgagatgtaggcattgaaaaataaagacggcttcatgaaggaatcacaagattgacaaataggaaaagagaacatttataagacacgaaggaaacaaaaagagaaaaaaaaaaacatttgaatgaaaaaaatgagaacaaaaacttcaatagctataaaatacctcctaaactgaaagcgaaatactaaatattgcttagaatactgaaagaaaaaaaaaaatcaaagattcattgtttattatcacgaccccaatcttcttt

SEQ ID NO: 24071 - DNA, 1676 bp, Arabidopsis thaliana landsberg
atactcctaatgcaagctttttaaaaccattatgaggatcgctttgcctaaaagcatatctacataaaattttgtttgcttgttcatcagatggaaaacccacctggtatgtatcatcgataccatgttgccgtagaagctctttgttttccgttgtcacaataatcctacttcttggaccaaaccacgtagtttcatttgccaacgcctctaattgttttatatggttcacatcatcaagaatgataagcactctcagcttgcatagcctttcttttatcacacctaaatggtttatcctaataccactaaggttcaaaacatttgaaagaaaattttcttgtaaacgcagcttcaaaccatactcatcaaacccaatggggaagcttcccctaaggttgtccacaaaacaactaagctgaaacctattagagagtcgactatgtaaagctctggcaattgttgtcttaccaatccctgcaggaccagagattccaaccatcttaactccatcataatctaaatctagcaaagactccatttctctcaaatgagcttcaagtcccaccatgccatcaaaatccctagaaggtgtagcattcagtttatctgaaacatctctggcaatcttctctatcattttggcttcattatccctaacaagtagaaacataaaattcatgagaaaaaaggtcataaagataatgttctctgttttcacaaccataaacatcattataagaagaataaactgtgattaattaaacacaaaccattttaggaagtgttctccggctatgttgcccacataggtcaaagcttcactccatttgctcctttcctcctctgttttcgtagcacaagttttattgaaagtgttcccaaaatctccggtttggttgcggacatcagaaggatcaacttcgtagaagacagtcatcactatttgccctatatcttctttgcactttaaaatctccaatagctcatccaaacaccaactggaagaagcatagttcttcgagagcaataagatcgcgatcctcgattctccaatggcttttttgagagctggagcgataatttggcttctttcgatcccgttgtcatcgaacattgtaattccattgtagacaaactgttgacgtaaatgactgagaaatttaatacggacgtctggtccatggaagctcgtgaagacattgtatctccagttgcgaggcgaagaaaaagaagaagaagaagaagccatgagattgaatagcgagaaaattttcggctcacatatacaagaatgtttctggataagccatatatgatgaagaaaatggaaaaggcgtattcaccactgattgatatttatcagaaacagggacgaagtttcttcgcttttgctatgaaagagaaaagctctaaacaagcgactttattaaatgatagacggggaactattaagttttaaactctaaaacacactaagttcgtctttggttactgggttagaaaaaagattagtgtagcttagatatataacaaaaaatcaattatattcgatttaataaatacacatatatatatatatattatattatgccgtttaaataaaaaaaagatatcaacataaaatttcccatcagctaattgaaaatgatgatcttgatctaataatgcgcaat

SEQ ID NO: 24072 - DNA, 933 bp, Arabidopsis thaliana landsberg
acggtgttaagaggagaaaagtattttataatgaatccccgaaagatatattttattcaaaagcaagggagttttaggtagtcataccaacgaaccattcttatgacaaaatagtttattttcaaccaatgataaagacctgagacaacagaggagacagacaagttacttaacacttccaacaagttactactatactaaaaaggcaaaaacctcaagaatcacttgaaactatataaatgaaacctcaagagacaaatgaaacatatcagagagctactatgtctcaagagcaaagcagaggactccacggcacctgaaagtccaaagactgatattgtcgccagcctttaagccgttacctttgactacatcgttccaaccccaattcaaaatgtaattcaatgttccgtgtccagagtccttctccatcgcccatatcttgaaacgcaaaccccacattttagatctttggttcacaagaatcgttcccacaccaatattctcgtcatcttcgttgtcttcgtctttctgtatggctctacactccgcaggcgtcaagaagtcgtttctgattagctgctggaaagggattaagagacggctcaggcctgatttgacatcactattgaacagagtcctctcaaatatcaacctcggcgtttcagcatcagcgctcatgtatctcatcacctggaaaacccactctggcgtctctatagacatccttggcaaagaaacaaccctcgctttcttgagtttaccactcttcctctgctgcacggcacgcctcttgcggcttttgttctccgttacgcatgaagacgattatgaagatcggtaattagcgtttgttaggtttttcttctctgtcttccccaacttaacccgtgttgtaatcccagggtcacgatcgatcataacaacgaacgt

SEQ ID NO: 24073 - DNA, 484 bp, Arabidopsis thaliana landsberg
  unsure (1)..(484): unsure at all n locations
ccaactctcgtttacaaatctctctctaagaagatgaagaagaagaagataaagaacaagaagatacctgagaattactctctctcacttctctctctctaactctcaccaagaacccagaattgaggataagaatctgttttgattacactcacctctcgactctagtaaccaagagaaactaaagcggtgagctctgtgaataacaaactttcacacgtattaacccacacgtgtgacttttcccttattcccttgagagtctctctttgaactagaagctttcacttgaacatgtcagtccaaatactctagttgctgtagaggctttaccaaacgttactctgcttcttcatgtttttctccatgatgatttagagtctcaaggttgaatcatacttttaacactatcgtttatgaaaacgctattgatgatatttaatnagtttttttctatggcgaatcagcctcgaattggagacct

SEQ ID NO: 24074 - DNA, 501 bp, Arabidopsis thaliana landsberg
  unsure (1)..(501): unsure at all n locations
ccacaaagggacatcacgaaacgcctngctcagctctcgccgtttttattttatatctngngccgagaaacccgggggaagagagggcaaaatctaatcttcgttctactacttctatttgtactgcaaaatttgtaccatattttctcttccatgtagccattgattgaccacatcttgcaatttttctgataagagattcaatcgctgtgtccgcattccaactctccatggccttttcttgaaaaccatctttaaaaaacagtctcttatcataacgaaatgtaccatatcgccgacttaacaaactggttatgttggtgatcannnnnnnnnnnnnnnnnnnnnnnnnnnnnnnnnnnnnnnnnnnnnnnnnnnnntatgaaccttgccattctgtatttgccatggaacgatcgaggcagcaccaaatatcatgagagtctcgttttcctttccaagagaatcaatcaccacatgattttaagtcatggagatcac

SEQ ID NO: 24075 - DNA, 1149 bp, Arabidopsis thaliana landsberg
tatgaattgatttgatattaactaaaaaactcaaatgattattttaatatatttgaaataatatattattagggaatgttcatcttctctctttcttcctcttattaatattttcttttattttagtgaggagtcttccaataaagagttcacatataataattatcccatatagaaatcatcaaaacaaagcagccaaagaagaatatggttaagtggctgtgcaataatattatcaagataattggtcaagaaatctggtttcagttgatttagctaggttgtttcggtttggttaaaaaaaatcaattctccgaaaagcaaacgtaaacgatatcattaaggacatcttcaatggttaccttcaaatatttttcaaaattaaagtttcttcaaaattgaagaaaaaaatgaagcaaaacatttccaatagtttcctttattttctattttaaaaagaatattctaagtatattatatctttattttattaatatttattaataatactttttactttttaaacttatgaactttttctatttatttttagtaaacaaatagttcaacaattttatttaaactacattattataaagaaaatcacattacataaaattaattaaaaacatatatttatgatgaaattgtacacgttacataatattaattaaaaatatatatttaagcatataaattttgaaaatgtcatagtttgataggtaaatggaattaagattagtgtttactcacgaatatttaaataacacaacttaccggtccctttcagttcccccaagcaacctcttggcatcaaccgtaccatcaattccaaccatccaagatatccaaatattggtgttaaaattggtccaacgaagcagctttagttatgtcaacagtctttaacaatctttgaagatactcatattgacatttcacacaaaatgtttccagctaattcactgcatgcaaagaaattgagtgttacatcttctctttttaacaagttttcgacacattaactccgtaccttccaagctcgttagcttgtccatctatcgatgattcttcgaccaatcgccttgatcttttcttcgtcgtcgatcttaattcataaaagcatttcatagtaaccaagtcccgatg

SEQ ID NO: 24076 - DNA, 436 bp, Arabidopsis thaliana landsberg
ggcgcgtgggctcgtcaaaagcacgggacaccttttgtgaatttcgggaataagcgaagacatttccacttctggagagaaaagagcggctacacgcaaagaagtttgatcgtcccgaaagttgaagcgtcaaaagctgcgggataggaaaacgatcggccagctcggtcaccgtactcatacagctcgttgtttctcgcaataaaaacaacgagctgggggcaaactgttggggttggatttccccaaaagaccgagccaaacaaaaaggcttcgggagctcagcctactacaaacagtagggaaactattcacaggacgctactcgctcgggtatccgtccccggttcggttgtcattccaggaaacacaccccgaccgggaaaggaaacacttgggattccgagatgaaactatcatgcggcttgtttattat

SEQ ID NO: 24077 - DNA, 455 bp, Arabidopsis thaliana landsberg
tttttccaccaaaaaagataaacccgtgattttgccgccaaaaacgttaacccgtgatttttccgccaaaagcgtaaattcgtaattttcccgctaaaaatgtaaatccatgattttcccgccaaaaacgtaaacccgagattttcctgtcaaaaatgtaaacctgtaattttcctgccaaaaacgtaaacccgtaattttcctgccaaaaacgtaaacctataatttttccgccaaaaacataaacctgtgattttcccgccaaaaacgtaaacccgtaaaaagtggaatccgtaaatatcctaagtttgatgataatgaatttatagtgttaattatttattattgttttataataataattaattaaattattacttaaatgtgttaacccacttaacaactcaacccatcaaattaaatgagttatggtgttaactgattatttaattatt

SEQ ID NO: 24078 - DNA, 1303 bp, Arabidopsis thaliana landsberg
aaaaattaaaaaaggaaagcaatattagaattttggaccagacatgatcagtgcacttagagccccaaaacccactaaaattctatttttaaaaataatttatattttctgttggataaaatatattatatgtaatcttttagatttaggtcaagatttaattgtgtcaatgaaaataagcggaataattatgaaaataagcggaataatgatgagtacaacttgtacattgtccgaaaccattcacataattaccattaaaattaattatgtaaaaaaattttaattgtaattagaaagaataattttggaaaaacactatataaagattaaaacaacaaatttaccattattctttatgaaccaatgcatttttaatcctttttactctttatataatgtttttaatccaagttactgttaaaaatatggaatttcgattctttttaatatttgtatttccaaaattattattatgtaattcaaattataaagattaaaaagtcttaaaataacattgggtcattatttgaattgatgtaaacagaaaatccattgtagacattttgaccattcccaataactgttatgagaagcctgaaaaggcccagtaaacaaaagaataggcccatataggcccaacttaaactactatagttcttcttatacctttttccactctcactcactttgctctctccaaatttcttcttcttctccggcgaagaaatcgaaaagtcattaccctaagagtcccagagtcgtcagaaggaacagcttttgaaatggacggtgtcacataccaaagattcccaacggtgaagatccgtgagcttaaagatgactacgccaagttcgagcttcgtgaaaccgacgtttcaatggccaacgctctccgtcgcgtaatgatctccgaagtccccaccatggcaatccatctcgtcaaaatcgaggttaattcctctgttctcaacgacgagttcattgctcaacgacttagtctcatccctctcactagcgagcgtgctatgagcatgcggttctgtcaagattgtgaagattgtaatggagatgaacattgcgagttctgctctgttgagtttccccttagtgctaagtgtgttactgaccaaaccctagatgttactagtagggatctctacagtgctgatcctactgttactcctgttgatttcactagtaactcatctacttctgattcaagcgagcacaagtaagtcccttttcatcattgtagtgattatttgttctttatgaattgattggaattgctaagcttaga

SEQ ID NO: 24079 - DNA, 637 bp, Arabidopsis thaliana landsberg
cctggtcaacgacatggttcgggcttgaggtttggtcaccctctccccaaggacggagccgtggtaggtgatgatggcctggatgcgggcctcatagtgcatgtccacgacgagcttcttacagctcgtggtggccaccacatccgccctagcctcatatccagcatcgcatctgaagaaattctgcatacaaaaacgatgtatccatacattatttcaagaatttacaacgaatgcgacatattttacattatactaagacttacccacagctcttgcttcacccactccgccttgttattgaattccctgccgtcccggtctactgcatcgggggcgacggcgtagtggtcgaatgtgaaggctgggcccgtcactccggcgtactccacaagtctagggaagtgttcccggcatagaaggcccaggatgccattggggttgcggccgtgaccccctgcagtctccaaaaccatccaagacctgtccaagtgataaataaaaagtattagtttatattatgattttgacacataatatgaacaagaatgaagaacataaagttacatacctcttcccttccggccgaataaacggtcgtctgtcccgaagtattgggacgcggcgggagactcgc

SEQ ID NO: 24080 - DNA, 564 bp, Arabidopsis thaliana landsberg
  unsure (1)..(564): unsure at all n locations
cagcgattaccgaggggttcctcttcacatggttaaagaactttgttttcatattttggttgggttggattatcttcatcgtgagctttctattattcatactgatttaaagccggagaatgttctgcttttgtctacgattgatccgtcgagagatgtgaggagatcaggtgttccacttgttctgcctataaccaaggacaagattgtttctgagtctgctgttaaacctgaaactaaaagttatacgtacaatggtgatttgacaaagaatcagaagaagaagattcgtaagaaagcgaagaaggtggtggctcaagattttggtggagaggaagctttggaagaaagtgagagagattctaactccgaagcaagaataaatggcaattccaccgtagagagatctgaaggaagttccacaagattaatggaaggtgaagaagccagagagaaggctaacaaaaagaatggtccgngtagtaggagaggaagccgatccacaaggcagaaattactgagtgatatagagtgcaaatgccaattagtagattttgggaatgc

SEQ ID NO: 24081 - DNA, 555 bp, Arabidopsis thaliana landsberg
cgcagcttcttggtgggtggtgtctgcaagggtcttgccctttttctcgtctagcagcgtgcctttgctgcttcgtcaacggatggggctgccttcgagctagctctcttgggtgccatcgcgggtggtttgttcgtagcacgaacggtgggcgccaaatgttggaacttgctctcctgggcaagatgatccaacgggggagtgaaaggaatgcaaacaaagtttgacttgagatggcgattgctctgttaatctagcctctcaagggcactgtacaggggtatttataggtgctcgggtgcccaacgtcctgatgtaaggacgtttatgccctcaggcaccatggattatccctagaatattcccataatggagggttacagactgtcattacagaaaagccattacaaaccgggcacgtaacacacttctccgtgtggggcctgtcacgatgggccaccataccacgtaggcctctaggttgggtgaggacatgggatggcgggacttagttgtgggtcttcacttgtggtgagaggacgaagggtgcctgcg

SEQ ID NO: 24082 - DNA, 515 bp, Arabidopsis thaliana landsberg
cttttaagagaataaaaaagttaaatttttaatgacacatgttttcatttgatcgtttgacttgacacgtggggcggtcctatgaatagtaactttgaaaaccatactttatataataagaaacatttgatcgtttgacttgacacgtgacacgatcctatgaattaataactttaaaaaccatattttatataataagataagatgttttgaatatatatttttttatttcatattacatgatattttcaaatttctatataaataatagattgatgtcttattttataaccattaaaaatctgcagtttttatttatctgattgtagttcaacaaattcctatatgttgaaatagagtgagcattaaacaatttatacgattagtttagcggtgtatgagaaaattttaactagtaataaataataataataataataataataataataataataataataaaactaattggtaaaattaacttatagaaataaattcagaagaaccaaagt

SEQ ID NO: 24083 - DNA, 651 bp, Arabidopsis thaliana landsberg
  unsure (1)..(651): unsure at all n locations
aacccaactaaaggactatttactcatagcaaaaggaataacacaaagagatgaagaagacataatagattactaaactataaaagaaaagggattagaaatcttttccaaagtatcaaagaggatgaatctctagaatcccaataggggaataaaaaattaggtctcaaaaaccctgctctataaaatgaaaaataaaactggttaaggaagaccgaaactgggcatcaggtagttgcctgatgagatttgcgtgatgtcattccccaacagatttttcggcaagaaaacaaaactggacacaagtagttgaatgataaaatttgcatgatgtcattttccaacagagttgtcttgaatcaccaatttttcatttcttctccgaactcttggttttgatacaaaaacgcctccaactccagcattgcttcctaaaacctgtaaagactcaataaaggactggaagactctaaaaacatactttgactctataaaagaatgatttaagaaagaaaacaaagactcaaaaccgataaaaacaaaacatatcattttcatcgaaattataagttagtttcatatcccagggaatctttaaaaaataatacttncatttatagtggatattgatttaaaaatgaatacttcaat

SEQ ID NO: 24084 - DNA, 609 bp, Arabidopsis thaliana landsberg
gagaatgctcggagagagtttcacagtgaaaatagggttttgaggaagaggagggatcatcgagttgttgcttgacgatgaatcagaaatctcagactcagtctccattcttcttctttctctcgcttttctctgtaaaagttttctgatagcgatgaaaacaaaaacagagaagaagaagacgaaaatttcctttttataagcttggtttgactttggtcaaagtttccttttttttttcatcagaagatcttagttagattcagtttcattagtaatttactttaaaatagttatagatagagtcgttaaataacggatcagtgtaacagttttccttgttcgtcttgtagtacttaagagttaagaaaatgtaacggttacatacaaaccgaatatacatacttatttgtttttcttaatttatttcatgaattatgaactggcagacatttttctcttaaaacttttacagataaataaaaataaatagtcatggcaatccataaatagaccaatcacattgttatctaagtcatcctacttgaaagaaagccagatttcgttagcacgaaagatcaaaataaacaagaaaagctatgaacaaca

SEQ ID NO: 24085 - DNA, 296 bp, Arabidopsis thaliana landsberg
acagtgcatgcgaatatcacataccaactagatgatacaaagagtttaaatatttaccttgatttaattgtaacgatgaagcccaaacttagcgtaaagtttgccaagacaggaaacggataacggtaacaaagttgacagttataggtaatcagtcccatgacccgtccatgcatacctggtggtagtttaatgttctctatatcgaaaccctaaagatccaccagcaaaagatgatctatcagtccatataaacactaaaagcgatcaatttcctctaattgttgtcaagaagc

SEQ ID NO: 24086 - DNA, 486 bp, Arabidopsis thaliana landsberg
atcgtattatattacttaattaactactctgtatcatagcttctgaaaggttaaactctgtatcggatattggtctctctctctaatctcgcgtaacattcgtggatttatcttccatgatatataagcagcgttgagcagagagtgttgagattttccatagcctcaaagtcagggtccgccctagacaatacctcatgaagcatgggccttagagcatctccaatggtaagagcacatgatggccatggatatagcacagtgtagaaaccttggaagatcttcttaccattggcggtgctgtaaggcccatgtttcatgaggcattgtctagggcgatgctattgcccttaagatctttagaggagaacggttttcgttgctaaagcaatgcatggtaacaaagaagcttgagatctgggtgacttgaaacaagattaactatgagaatggtgatgatgtggtttggattgatttcatgacttt

SEQ ID NO: 24087 - DNA, 529 bp, Arabidopsis thaliana landsberg
  unsure (1)..(529): unsure at all n locations
acacccaatgtctttgcttctcggttgatagacgacgatgactttggtttcgccatgaatcgatgatgaaactgatcagtgttctctagaacaatggaaaaagctaaacaatttgtaatctttgatgccaaataaaaagaagaactttctttttcttctttgttatgtaactttttccattcttataaatcattctcttcgtgtaattgtaaatccattttgcagagttttgaaaattttactcatttcttattttcaagtacaagaatcaaatccatgcaaaaagtaatgaatccatgcgtagtgacaacatagcttgagatcgaaatactcaaattgcattgtatgtggatgaaaagtttccaacttcaaaaaaagtttggaacttttttctcgagaattgtattttagggctaaaaattgaatttttggggataaactaattactatggcggagaattcgcggctacgagagctacngagacacagatgatgaaagagagaaagagagagagagagagagagaatg

SEQ ID NO: 24088 - DNA, 423 bp, Arabidopsis thaliana landsberg
ctaatgggcataagatttcaccaagaatttagtacctttctcggtttttaacaaaactgttcgtgtatatgtcttaaaacgaaagtaggtcgccacctccagtagaggcagagtcttgttctctgtgctgtctcggtcatttctgcataacccgctaaaccagctcgaaggtcgcataagaaagttacctccaagatttgtaacgaccgcgtcttgattgagtaccctacagaaaagaatgcaattttaacttccttggtcggatcggatatacaaatgtgaaacattttagtaactggaacttgtttctttgtatgacctcgaaggaacggttttagagttataggcatgtcttaaatcgctatgagggatacatcgagagtcgatcatgtccatcaaatagcttctttgtccactcatgaa

SEQ ID NO: 24089 - DNA, 567 bp, Arabidopsis thaliana landsberg
atccatcggggtaccctcatcaagttcagttaatttttgctttttcaaaaacgtcgtctactttgtcttgttggcaaaccacacacagaacaccaacaagaatatgctttgttttcgaaacagaatattgagaacatagaaaatgtgaaaccggaaaagatgcaagatgaaagtgcaagaagtaagaacagagaacacaagagcaggtttgataacctagttcactcccaaaagggtagctacgtctcggccgagactgtgctcggaatccactaaatcagagatagtgtttacaaggagaaatacaaatgatcactcgatacccttcactagtactcaagttcactctgtatcactctccttctaatccagttttccacgagcgtatgaaacacattgaaaacgactgtcatttcattcacattgagctcgtttcaggaaacattgcaaccgctcatgtgggcactaccgagtagctaacggatctccgtactatagcatttggatgttaacaatttcagtatttatttcgcaaattaagcgtttataacctgcacggtccaactt

SEQ ID NO: 24090 - DNA, 577 bp, Arabidopsis thaliana landsberg
ggaataagataaaaattatgctcattggtgacaatctagctaaatagttgaatgtagagaaatattatttaaaataaaatttaatgttgctattgagaactacgtcgacttgccaccatatttgctcagcaatttgacaacaggcgatattcatataattttcatcttgtgtttcttcttccatcccaacactttgatcatcattgtgtttataagtagagaggaaacttacctttcactcatgactatgattatttttaaaacaagaaaaggagtttagctcataatattttctatgaagataaatcttgatgggcagagtatatttataggaactgatattagttgttggttttaataaaataaaaatatgaattgttcaaaacagttaaatagagaaatgatttgtaggaactactattagatgttggtgtctgtacttgaatatcttctatttgattacaaagtatccaaagattaaactaaattagtttagtatttaaatttttgagattctctaaacaaacaataaatttatataaaataatttaaataaatgataaaataaaataagtaa

SEQ ID NO: 24091 - DNA, 689 bp, Arabidopsis thaliana landsberg
gaaacgaatcagagttaggaaagactgaatctttgttgatgacaacagcgttagcgaacttctttatgtcttcgatggccgagtcacgaatattaccaatggtttcttcaattttgtacacagtctcgtacttgctctgcttcttgaagtcaactagaaccgagctgttcgtagactgaatcatgacctttgttgtggttgttccattgctgtaaccagcttcggtgagtgtatcgagaaccgcttgaaccacgtcaagcccttgcttctctctcaagtatgctgcattctgggggaaacaaaaaaaaaacatagatgatataacggtcggattgatagactaagaggtacacaagaactcacctctacactgatcaaaacaccggagagagaagtgtaagtttttgccaagtctaggaattgagaaagggaaatgagcttccctgaatttttctctctcggattcctaaaaattctataaaccctgaaggggtttgaaatagcagctgcacaaaaagataagagagtagttatttcaactccaagttatgtaatctcaaaagtggccagtaattttgaccacatcatatacaacctaggagaatgtcaaattgttactgatatgtaacctctttaagttaagtaggactagaaacaaggttctctgattagttactataaatagtagc

SEQ ID NO: 24092 - DNA, 750 bp, Arabidopsis thaliana landsberg
taacctaattatttgggcaatgaatcttgcgaaatccgtgtttcgtgtagtcaaaagacatacatgtgaccatctcgtagatgcgtcaattaataccataaaatatcgaaacggcccgcacggtgggtggattggcccacatatatcaccatgaattctcgacaagaattcaggtttttcatgcccaattttgtttggcgatggcatgattatgagttttccttgagaacatgctttacatgaaaactcaccagatttaaatattttctggtttttcaatggatgaccattagaagtttgcacaattttttgcatcatgactgaagcaggatgtccaagtctttcatgccatatcttaaatgtactagtaaactcacacgagtgattgtcactcgtgtttactgtaacatttgatgcgactatatttatttttgtgcaatataatctagaggatagcattggtaatttttctaatatatattgcctctcggattttatgcacatatattcaatgccatctttattcatagtctctatatgatatccattacttcggatatttttgaaacttatcaagtttctatgagacttagaggaatataatgcatcatttactttaaaatgagttccctttggcattataaaattggattcgccaaagcctaatattatctttgcatggccatttatagtactcacgcttctagcggagttatttatttcgagagaggagaagtactctttatcttt

SEQ ID NO: 24093 - DNA, 1390 bp, Arabidopsis thaliana landsberg
tatatatatatataaatatataaaatttatataaaattttataaattttcattctctattaataaagactattttcatttgatttaaatacagaaaaaaccatttttagacccaaaaataatgtataggttaaaatatgaaataaaaatggtggggtaaggtgttgtaattttattaaacaaaactattgtaagattaaaaattatgtaggtgttgaataatgatgtggaagaaagagaaaatgatgtgaagtgttaaaagcgaaaaagtgggtgttataaataggtaaccattgtagataatcttagacttctcggccatcctaacgaggaccagaagtggaataatatgattatgtaacttactaaacattttggaaaaatacacaattaagcaagagttttgggttctttacgaaatattacacaagaaagtactttttcttatatacacaggagagtaaccattagctaaaatgtacaattaaacaaacattgcacaagttgtagaaaaatgtaaaagcttcggatttaagcacagagaaacggcaaaacaagtgagagccaattttgcttcactaggagaaacgtagtagtggcagttttatcttaaatgtataaatttaaacaaagtgtttttctcttgaagctgaaacatagatggtttcacttttgtctcatgtaaatatggtcatatgggtttgctttatccacaaggtatcacactttgaaataactaaagtcaaaaatatgaatcaataaaatcaataagccgctacatgtcacttcaaaaattatggaatatgagattcgaatctaagaggagtcttaaactgttaaacagagacacatttacagttcgagagaaatttataacatgggacaaattttattttattttatttaatagcgttacaaacttacaatgattatattacataaggataaagaagtagaagaagagctagtttaaaagtcccaagagtccaacactgattcatgacttcatcgtctcttctatgtctgcgcttccactatacaaattagaaccatcgattattttaatctttagtctttccaaataatctcttgagtttattttcaaaaataatattttgaggactatatgtatacctacattatgttgttttaaatagaaaagaaaaaaattatgataaattcatattcacaaacatcacaattctttatcaaacaaaataaacagtgacaatgatattactgagatttaaaacactttattaacgaatggtatctcaatttttcactgtttcaaaacgctatgttgctaatttatgttttcaccacattttcgaaacattagtataccgttcaatcatttgaacattccattgttatctattattattacc

SEQ ID NO: 24094 - DNA, 785 bp, Arabidopsis thaliana landsberg
agatgacggttgatcttgtgcttgtgtgggctcttcggattccttaggacacatatccccaatggacatgttccttagtgtgatgcacggagcctcttcatcatctagctcatcaagatcaacttgctccacttgggagccattagtctcatcaaacacaatgtcacaagaaacttcaactaatccagtggatttgttgaagactctatacgcccttgtatttgagtcataacctaacaaaaacccttctacacttttggagcaaacttagaatttctacctttcttcagtagaatataacatttactcccaaatacacgaaaatatgaaacgttgggtttgttaccggttagaagctcatacgaagtcttcttgaggaggtgatgaaggtagacccggtttatggcgtggcaagccgtgttcacagcttccgaccaaaaccgctcgggcgtcttgaactctccaagcatcgtcctcgccatatctatgagcgtcctgttcttcctctctaccacactattttgctgtggtgtgtagggagcggagaactcgtgcttgattccttcctcctcaaggtactcctccacttgaaggttcttgaactcggacccgttgtcgctccttatcttcttcaccttaagctcaaattcattttgagctctccttagaaagcgtttaagggtcccttgggtttctgttttatcctgcaagaagaatacccaagtgaagcgggaaaaatcatcaactataacaagaccatacttacttcccccgatgctgaggta

SEQ ID NO: 24095 - DNA, 638 bp, Arabidopsis thaliana landsberg
tatcataaaatggttctaacgagcctagttgcatgactgttggagcgatcctatatttatggagaaaataaagcaattaaataagattttttgtttacgtgcatgtcagtccatttctttttatcgcacatcttgtcatcctaaatttgtgtgcatgtagcaggaaatagatttttacgcaatgtatcaaattgcataaataactacgtcgtgtagcataattagtatcagtatatatcataaactagttctaacgagtttagctgcatggctgttagaggtatcctatatttatggaggaaataaaacattaaatacgattttttgtttccatgcatgccaattcattgtctttcatcgcacattctcgccatcctaaatttgtgcgcatgcagtaggaaacagatttttacgcagtgtacccaattgcataaatacctacaccatgtagcataattagtatcagtatatatcataaactagttctaacgagtttagctacattgttgttggagctacctatatttatagaggaaataaagcattaaatacaattttttttccatatatgccaattcatttcgtttcatagtacatttgtatcaccgaattttgtgtgcatcagaaatacagatttt

SEQ ID NO: 24096 - DNA, 318 bp, Arabidopsis thaliana landsberg
  unsure (1)..(318): unsure at all n locations
aacaaaacccagcaatactcttgatgaagtcaactaatatttacaaatttaactcacatatgttgttatttattatcttcctaagggtttgattgagcgaaagaaatgagtcaactaaaaatggaaaagaacaaactttaaaagttgccaatggagtgacaagtatcgccagttccccaagttgcctaaaaagcggcactagtgatgttaggagtctttttttctgnnnnnnnnnnnnnnnnnnnnnnnnnnnnnnnnnnnnnnnnnnnnttttgggtgacattcgatgcctctcaacttgcataagaagagcccatt

SEQ ID NO: 24097 - DNA, 1007 bp, Arabidopsis thaliana landsberg
catcaagtttgagtttacttgtatctcttttaaagagcacaggtgtttatacatcattccatcagagttgctttttctaagcattggtgaaattaagatatgaaagggaaaaccagctaagtcaagaacaaaacagttcgaattgcttataagaacatcaaacgttccatagaacatttttatttatatgatacattcataacacttattctcttcttaaccctttgatccaaacttttggattcccgaccattagcaaggagaactaacaaactacataaaagaaatagcactgtgtgaaaatgaaagtaatctacactctttaaacttcgagatacttgattgcagtctgaacatccttgtcgcctctcccactgaagtttaataccactctggctccatcaggtaacgtcggacaaagcttctccagatgggccaatgcgtgcgatgtctccaatgccgggattattccctccaaccgagacactctcttgaaagctacacgcatagattagaatacacaatgcaagttctcatgagttgtgaaagaaacatctaaaaggagaaaaatgaagtgtcaagtaagtaccttctaatgcttcttcatcagtaacgctaaagtattcagcccttcccacgtctataaggaaactatgctcaggtccgactccagggtagtccaatctgtaagagaaaatcaaaccatgttcatgcagccgtggctaactgagtagacttattatggttaccggatctgaatagagaatttcacttaccctgcactgatggagtgtggttcaatgatttgtccatcatcatcttgcagcaagtaactcatagctccatggaggacaccaacatctccctttgtcaatgtagcagcgtgtttgccactgtccaatccgaatcccgctgcttccacaccgatcatccggacctctgtgtcattcacaaattcatggaagagtcccatagcgtttgaaccaccaccgacacaagccacaaag

SEQ ID NO: 24098 - DNA, 1317 bp, Arabidopsis thaliana landsberg
ggacaccggtgagggatgcttcatctctcattccttgtccaaattaacatttacagggcagggctccacacggtaattctccacagggcaatgcagcatcttagtccattctaaaagatccaaatggcaatgaagcagatgatgagggaaaaattcaggtacttttataaatacaaacacaacacatcaaacactttattttacagtttagagattctgacacaattgactattgtactttacaatcagtttgattcaagtgcaaacctaagccaaaaaaaacaatctcctctcgagcaagacaatattatggaggtaagcttatatataaaccaaattattgtcagaacattcttaaaccaaattattgtcacagcccttaagacatattcgtttgtaattcattattcaggacaccttggagacggttgaagcttctctttcagtgttggagacgcaacccgaagaaaacattgacgatgatcctatgcgggaggtaagctaataaataatttgttggaacacatcggagagggtttcagcatctcagtccttaaaccaaattaatttcacagtccttactccatcttcctctgtaattcataattcagaaaaccttggagactgttgaagtttctcattcactgttggagacgcaacccgaagaaaacattgacgatgatcctatgatggaggtaagctaatatataatttgatttaacacatcagagagggtttctgcatctcagtccttaaaccaaattaatttcacagtccttactccatctccctttgtaattcataatttaggaaaccttggagacggttgaagcttctcattcagtgttggagacgcaacccgaagaaaacattgacgataatcctatgatggaggtaagctaatatataatttgatttaacacattggatttagtccttaatatggcacatgtgcatagttattgtggacatgattttgtggatacttactagtgtacttcaatattcaggtcactttggagtcgggtgcaacatctcaatcagtggaactgccgcaccccgatgaccttatggaggtatacatttttaagtagttccttgctttattggacactggagaaggatgcttcttctctcagatcttgtccaaaacaacatttacaggccaattctccacagggcaatgcagctttgcagcatctcattcattgctagagactcaaccagaagtcaacatcgacggtgattttatgaaggcatacagtaacaatcatcatcaagttttatgtgttgtggttcttatgtaattggacatga

SEQ ID NO: 24099 - DNA, 1728 bp, Arabidopsis thaliana landsberg
atttcacccatcccctaggtgtgtggtagccatttatctcttcttgttctctgtgtgtgaggagccggaattgtgttcacttgtttaatgacattctcaatccactcctgagtgtccgttgttgccagttcgagcgtctcccgtgccggaataagctttttgttgaatattagatcattacggcttttccataatctccacataatccaaaaagggaggtacctgtgtaattcatggacattcccatcgtcgtgaatcctaaagaggtatcttaatttgtcttctaggggtgtttgcgagttacatagtatggtggtgtctaggcaagtggtcctccataccgcttccgcatgcggacaggaaaaaaagatgtgattccctgtttcagcttctgtgcaacagtgtgcacggtatggattgatgatgatgttccgtcgccttaggttatcggcaaccccgagagcacgcgacgtgtcctccacaagaaatgcttcaatttggggacaatgtttagttccataaacggtcggcaatatcagggtgtgaagatagcggcggagtgataggtggctcacttgtgctctttgttgctgctacccaatatcctgatttgacagtgtagcagcaatcctttgtaaagctccacacatatgagtcctgtgctggtatagggggtacatatattttccggataattggatggtcaatcggatcgattagtgcggtgagtttctgttcatcccattgagatgtagtcggacagagtaaagccgaaaccgttgttttcgggtccgtcgttgctaataacagaggtggccggggtgaagtggttggtagccacggctcattgcccacttgggttgtgtaaccatctccaatgttcttctgtgtcccgagattcaacaattcacatccaaaccgaagggaactccatccataagacggtctcgtgcctcgtgacgcactaaagaaattcccatgtcgaaagtatctagctttaagcattctatagagcagactttgtggtctttatagcagtttccatacctggcttgcaagtagtgcttggttgaattggtgcaggtctcgaaatcctaaacccccttctctctttggtcttgtcattttttttcaggaaacccatgatagtttcttttttgttgccgtagtgccccaccaaaatctcgctatcatactattgaggtcggagcaaagttccattgggagcgcaaatacattcatcgagtagaccggcatcgcaaaagctactgatttaatgagggtctcctttcctgcagcagtgagaaacttgttctgccatccattaatctttttctgaacagattccgatatgtattgaagcatttctttttatcttcggccaaattgctctggtattcccaaatatttccctccacctccaatgtttggtatttgtagggtccgcattgcttgatcccttgtttgttgatagacccgactcccaaatgttatggatgatttatcaaagttaatgacttgacccgaagcctctccatactcattgaatattttgaggaggttggtgatgtttttttggcctgcttttaagaaaaatagtgaatcatcagcgaatagtaagtgagagatggatggaccgccattgctaactcggactccttttatatgccctgtctgttgtgcattagtcatcaaagagcttagaatattattaaaagcttgttcctc

SEQ ID NO: 24100 - DNA, 371 bp, Arabidopsis thaliana landsberg
taaatttatcgctatatgtgaaatacttttatgaaacatataattttagggacttaaatgctaataaaaaagatgaaacttcaaatttagagtattgaatagtgatatattccaaatcaatactctaaattatgaagtatcggagtatctcttggagaacctaaaactctatattccaggggatagagtatctcttgcagatgctctaataacgggagcaaatggaagtagcctcggctctttatgacaggacactaagtcacaaggagagagggagagaaaaaactctattaaacttgcaccttctttccaacgtgaatttttatgattaagagaccaatgctctctgtgccccaactaaaatatcaacc

SEQ ID NO: 24101 - DNA, 763 bp, Arabidopsis thaliana landsberg
tcaatatatcaatattcatatatgttgattttactaattaatcaaaactttgtcaatctcacaactttgaatgtattgtaaatcttataatttacacacatactataatcaatatataatatataatttcaaattcggaatctaactgttaaagaacatttgcatataattttcatagatttaaataaaacccaaagtttctatagtatatccatatttaaatatagttcttctgatcaatttgataaaaaaaatttagttttagattataaacccttcataaaaccttaaacttttttgtttaatatatcataattacaatatttatgctatttattattgaattatttttaacaagtaaatatattttaatgtttattagttatagaatattatatattttattatattttacccacgcatcacgtgggatattttctagtttttaataagacatcgtgatttcacactcaattaaggtaccggaaaaataggaacgatgttggcatgtccttatctcagaattacttcaaaagttataattgtgatttatttagatgaggacctcttaatctccacggatcagaaaaactgcctttacactattttcttaggaaataatccttcctctaaagtagactagaacccatgacgttttgtgtgtgtatttgttctagataaataagaaaaaaaaaggcggcctgcctagaggcatttttcatactatgatatctaagaactaacccacgtaagtctttttgta

SEQ ID NO: 24102 - DNA, 396 bp, Arabidopsis thaliana landsberg
  unsure (1)..(396): unsure at all n locations
attatcctattgataaaaagaattacatttaaatcggtaaatatagtttcaccataaatatatggtctcattaatatcataaattagtaatggtatagatatatcaacaatatatatttatatatatattatatgtaataaatttctttgaaatatatttttaatatttgatctcatttgtacttatttgaatttagttctaatattttactgtatcaaaaaaaatttggtgttattatttagatatgagaattattttttacttgtaattagttataaaaaaaatattttctataatgaaagaaatcttatagtagaaaattattatgaaaaatttctttataaattaataaaattttagaatcccaacattattaatttgntaaaggttttact

SEQ ID NO: 24103 - DNA, 806 bp, Arabidopsis thaliana landsberg
attcctgcgaaataagtgtataaatcgtacaaaaatacaatctgaattgattatagataataagtgcataattcatacaacgatacaaacagatctgttaatagattaatagacagatctaataatagataatcagttcacaattagtgtagaaatatagacatatctcttatgatgatagataaacagacagatctgataatagagaaacagtgcataattcgtccataaatacagacagatatgatgatagataatttgtgcataaacaaatatgaacagaaaacttatcttgttagcttaagattttgtttgtttaagcggctaggatttttttttttttaggtggctagggtttactcagctaggtaggactcgtgctgataacgtgttgtaactagagaaagagatagaagaaatgagtgtgttattccattaaataaatggtcctttatataagagtacaagagaaaggtaaaaccctagaaacatctagatgataccccttataatgggtatccatctattattcttaacaaacatttaattatttgagtattaaattatacagttttattacttcgtatatgtaccttccaactaaaaacaattgggtattaaacatccaaataaaaattagttaagtttttttttgggttttttcccgtattatatatatgttatatttttgtaagtttataattattcatacaaattaaaattatattcaaacttttttattcatcataataaatataaatacaatcattttaatactcatattcttcttcattagaactatcttt

SEQ ID NO: 24104 - DNA, 633 bp, Arabidopsis thaliana landsberg
gtgtattgtacatgaaaagcgcttaaggaaattgatttgtttacctatgtcactaagtagcctcgactcatctataattagagttttagggtaatctttcttttttggatccttagagcacctccaatggtatatcttaggtgtatcttaggctaatatcttagaattaaattctgaaaaataattcaaaacagattaaaaactaaaattcacttcttagcttaaagttttttatgagtgataaatacaattatgtgtcatgttccaaaattttaattttaataattgttaagatgcaaggttaagaaccttaaccattgaagatggtcttactatatatttaaactaaaattttcatatttttgagcaaatttatacacaaaaaaatgttggacctttgctaatattttttaaaagcggatctaaatattaaaagactgggctatagtctaaatatttttattaaaatgggctttgaaacataagattttttaggaaaaaatgtgactaggcctctagaccgctgcctctatctctacctatttgggccaaggctggtgtacttatcgctttcgtaacacttcccgactaaactctagagtctatcatgcttgaattatgggtgatctattg

SEQ ID NO: 24105 - DNA, 1435 bp, Arabidopsis thaliana landsberg
agcccacatcaattaggtcagcaccacctcttcgagcgcgtgtcagccagaaagcagcttgttaagtatactcgaagggcacgtaaagtaatcaacatggagcgttttaagcttgggaagagaaacaccaccttccacatcaatatggacaccatcctgaaactgtatcttgagcctaaccaatgtcttgcttacaaagatcttagaaggcagagaataaaaacttgagttttcacaataattgcgagacgaagtgatgtgtaaatcaatatctaacacaccacgtttcaagactttgggtatccattcaagaacccaagattgatcaacaacatcttcacacttgacgtgaaacctcttcaacggagttttcgttttcgcttgcaaagccaatacactatccacgaaactcataaaactttcgtaacttttagaatacttgtttcttctcgctcgaggatggaaatagatggagtcatcaaagttaagatttggaacaaaagcaagcaaaggcttccatcttttggcaagaacagtagttgaagcagcttcttttgttggaaggaatgataagatgtggcaaatgagtgcgtctggtaaaccgctgattctatctccagaaacaccaacaacaaccttcttcctcgatttcatcttgagacagagactgatcaacaattacaacttgaatgagtcaattttctgagaatattcattgcacggtttttaatccaccatgaggattaaacttgatgaaaccaagatacagatttaatctgttaaatacatgatacatcttatatgcactaatttaagaagatgaaagacaaacaaaagatgatcaccattctgagtcaaaaggagaaagcattaaacacaagtcattaaaggaagaacaaagccaagagcgatgcttagttaaaatagtctacacaacctaaccaaaactccagtttaccattacaaattaagaaaactagatttggcataaaaatgaaagcattagcccattaagagttgaatgaagctatgtacaaggcaagcgaagaaaatgtagtttagcacaagcctctaaaccttgactatgcttatgagctttgagcaagagatttggagacaaaagcggctattgctttcatagcgacatcttcgacttcctcttgtgttaactcctttgtttcaaggtgtttcttcccaatcttgaaggagtgatctccaccatcaatcacatgaacctcagtcacagctttcattttattacaaacagcttcaagcttattcagaggacacatcggatctttgcttcccttttgatacaaaaacattcataatccaaagacccaattataattcattcatgtgcaacaacataagagttatgttacttttgcataaaatacctgcacaaacatcacagggactcccattttcagta

SEQ ID NO: 24106 - DNA, 545 bp, Arabidopsis thaliana landsberg
ctctagaggatcatgcctcgtaataatattctacgctgcataacggagatcatagaaacaagaaccactaaattcggagctatggttattaagttatggatttccgaaattatttagtgcttagaatagattaaaccaaatgaacaattttaattcaattttcatggctaaacactattactagttgatagacaatattaatacaaagttattgcaactggaatgactcaatttggagttagaatgaattttctatgaattaaataagtttctgcaattatcgatatattcataaatcaatttatacatagttttctctgatttacctagtcctcggactgcgcgcgtcaatacacagaaaaccaggggctagcgcaaaaagtacccaagactcagcacctacccgcggtggacggtgggttcattagtggtttcccagggattctttagtaaaccatacccgcgaaggggtatgatcaaatctgggccgcacgatcgcaaatggacggtgcggattagatgcgattcactccaaaccggtacgc

SEQ ID NO: 24107 - DNA, 1022 bp, Arabidopsis thaliana landsberg
  unsure (1)..(1022): unsure at all n locations
aaggtagagttttggttttagttctgaaaaagttggttaaaatggagaaggaggtggttactcggtaacatggatggtgtgtgtgtaaatcaaattttcgaaaaaggttcgtcgaagatgtccaggaatttgagcaaacttttaattgtttaggtgaagaagggaaagtgaaataagatagagaagaaagaacaatcgtttaagtgtttttaggtcaaaagttggagacataaataaaaaatatatatctaaaattaatttggtatctttgtaggcggtaatgaaattttatttcgcggtttaacctatgatgacgttttacaattcgtatatgctattaaagagaaattcgagaataaaatattaaccaaggccgcagtaaattttcccgtccaacctatcatagcgtttatattttagaaacgctatataaaaatcaggcataagtcaattatagcagaaacacattaactggtgtcttcaagtgctattaataattgtttttcttgtagtgcatgttaatagactttatcctacatattccttgtacttttaagctcacttttgatataaactccaacttaggattgacattttgcaattttatatattgttaacatgtgagtgcgctaaacctttagaatttaatagtgatagatttctctcaactgaacaactagataaatcattttgaatgatatgaaaaactgtctaaactggaaaacacaaaaaatacaactacgtggacattttgtacaaccaataactagggtacaactaaatctaaaaaaacggcgcacatgtctaaattatggcgcccacgtggaaatcaccttattctccaaaaaattcgatttccctccaatttcaattttccccccaaatccattaaaatttcccaccaaaaccaaattccccccaaaacgaaacagatatctcttctctctctcactcanaattctctctctctcttcaaatcattctctctctccgtctcaaaattctctctctctctcgatctc

SEQ ID NO: 24108 - DNA, 1051 bp, Arabidopsis thaliana landsberg
  unsure (1)..(1051): unsure at all n locations
tgaagaatgctggcgcattgggtcaaaccaaaagacatcactgtgaactcatataaaccatacttggtaatgaatgccgtcttcggaatgtccgaaggtcggatcctgagctgatgataacctgacctcagatcgatcttggagaacacactggctcctctcaactggtcgaacagatcttctattctgggcaaaggatacttgttcttgatcgtgacctcattnnnnnnnnnnnnnnnnnnnnnnnncctcttggtgccatctttcttctccacaaacaagacaggggcggcccaaggcgaggtgcttggccggatgtaacctttctctgatagctcatctatttgcttcttgagcgccaccaactatggtccaggtaccctataggctcttttagaaatgggggcggtgccaggaataagctatatggcaaactcaacttttcgctcaggtggcatacctggtagatctttagggaacacatctagaaattctgacacaaccttgatagcctcgagtggatcggcctcttttctatcaatagccatctggtgacatcctcctttctttggctcaggcgggactagctctgtcaccacttcttctccaagtggggacatcaacttcactgtcctcttatcacagctgataactgcttgatacttatctagccaattcatccctaggatgacgtctattccctcagtacccattactatgggattagcgggaaacgctatcccccttatttccacacttacattcaagcaaatgctatctgctcgaattctaccaccggctgagtcaatgtgaatgggggttgacatggtagtaattggaagattatgtgtttctacccatgatgcacttataaaagaatgtgttgctgtagtatcaaataacacttctgcaatatgggagtcgactggaaacatacctactatcatgccgggggtttcctgaactgcttcagactccaagtggttcagtctcccatggttataacgtggctgagagcggttgcctgcttcagcttggacacattctgctt

SEQ ID NO: 24109 - DNA, 1481 bp, Arabidopsis thaliana landsberg
tgtttgaaagcttgtgctgctggctcttcatactcgatcgcccactttgtatcggatacaccttgtgtacatacaccatgcatatgaatatatggtgttcaagcattttgaaagataaaatatatgaccagagataaatacataccagccttttctagtccataagacaagccaccacatccggcaaaaatatctagtgtagctagacgtttctctttaggtacctcatcgggcttcagaagcattgcagaaccagtttcagtcttcttttcccttagaagtgtgtcgtctttaatagtagagaacttcagcatcatattgtaaggcaactgttacataatagttaagagaaacaacggttcaacttttttacataaacaacaataatatatcataatctttgaaaactatttagaaaattaatttaaatatataccttcttgagatcaccattggatgagtcataaaaacggtcacagaagtagacatggtctaaaattggatactcacgacataagggcatatcagttttcttcataacttcgcattttccctttatagcttctggaggaagaatatatgtgtcctcgctataataaacctaaagaaatttccaaaagtagaaagataaaaaactgtaagatcaaccttttaacattatcaaatatgtaacatacgaaataattttttatttcacgtaagaaatagttgttacctcttgtatgtctgaagcataagcctcttctgcagaaacatcatcgggcctataaaaccgtctcactttgacctcaaaagaagtcgtattaccttttttgggttcttttaggtcaactatatccagtatttggcaaaccacaaaggctcttaacccaacattcctaccatacttaaacactggccttcttttacccctatctttacttaagtagttggggatttgataaacaaaatccccaacagaatacttgatcccattggagagaaatcttgtctttgaatcattgagtttagtttttgacctttcctcttcattctctcttatcttacatgaactgcagaatccagaacctagacccatatcacttcttggaagactaaagaatccacctttctcaggtgagtacaagcttttgcagtagtattctgttggcaaatctttagcttttctttcctcagctcttgcccggtcaagtttatctgcagccatgtgctctttcctatactgatgaccccacggccttgatcgaatctcaaaacttactgttccttttatgtccttgagctgaacagtaagacattcattagtcaagaaaagttccctctcgttagcagccgttcctagaacagtctcagatcctctttgtaagagtttcccatgtagctttttactgttatctgaactctcaaacatatactccacaaaatagattaatggagtttcaccttgatcatcaacttccaaaatgacagccccaccaaca

SEQ ID NO: 24110 - DNA, 1180 bp, Arabidopsis thaliana landsberg
cccatgaatcttctcctgggcaatgagaatattgtctaaaataagacgtccctccacgaatgccgattatgtttccgaaataagacttggcagaactgtcttaagtctttggcttataattttttagataactttataaccgacattgcaaagactaatatgtcgtaattccgtcatccgtgttggtctctccgtctctgggatcagacatatattagtcgtatttaactgtttatcaaaaataccatcttgtaaaagagaattaaccaaaagtagcaaatcgtttttaatggtggaccatgctttctgaaagaataaagttgtcataccatctggtccaggtgcatcctaaataaagccattctcacctcacattccgttgcgggtgccgttagaaaatcataaatctgatctgtaattttttcttggacctctacaagagaatcctcaaaaaccttaggattagttgtagagaacaaattcttaaaatatgaaactgctatattttgaatatctttgtcttcagaacaaatttgtttttacatatgatgttagttaattaaatttagcatgcattttgctttttaaattagtatggataatttgttagtacatacaataactaattataaaggccattgaagtttcaattaaaaaaatatttttttttaacattaatataatttgataaaattatctttatcattggaagaaagtcttttcattcattgaacaaaattttataaatataacgagcttataagaataatcttttcaatacttatgttttattttaagaattttaatgcatcttttgatggagaggcttgcatcctttgatgtgttattctaagaattttaacacattaagtgaaaacacaaaaattagggaaaataagcttataggattaacttttcaattacttaataagaagttagtatatcaattacacatttaagcaaacaaaaaaatttagtatatttttatttatgaattttaactcattcaaaattagtttgcatgaggtaaaattaactaccgagattacgccatatataaaaatatatttcaaacaatgtttgttttcctaatattttgtggatttctggttttctattagttttgctttgctaattattgattattttggattaactaagatatatattttttatcact

SEQ ID NO: 24111 - DNA, 684 bp, Arabidopsis thaliana landsberg
caggttgcaggtcgagatccccaatccatttcccatttctaaacgcttcggttaatacgatgagcgacggctcggagtatcttttattcttgctcggctatagcgcactatataagtacgagataaaatctgtcagattacttctaaacataattcttttatcttcagaaacctggttatactctaaacactggtaccccagcacatttctaaacgctggttaagaagtgaatcggatcagatcacaaccgagaagtttcactcaaaagtcctgttctttcacactagccccagtcaataaaacgcttcgggaacgaatcagtttttaaaacattcaagcaaaaaaaaatcccaagcataagttctacaataataagtggataaagccatccagacataggttctacagaaatacggataaagctctccaggcgcaaagtctaaagaaaaacgccacgggtatctactcaagctttttagtcgggagagtcccagcggcaagcagatacgatccagactgatcggtgacccccacttcatctgcgagagtctcgaccgatctatgacctccagggcttagaggagcaagctcaggagcaggggctttgagctcttccttcaactcagacgggagacgaatgagattcacctccgcatcagcgaaatccctgagccaatcctcaa

SEQ ID NO: 24112 - DNA, 3230 bp, Arabidopsis thaliana landsberg
ttgcctctttggcgaatttctcatcgtctcttactctcattctcaactgctcattaggttaattgttctctatgctgtcttaatagagggctttcatctttcatcgtcttcctcgattctctcctatacttcttgggatctatccgtggtttagcttgttccacacccttctctcccatgtggcaactgtgtcaaagcttccctaatcattccaaatttgtgccaaatctcaaaataaaagctgtttgtttcaagagaatcgaaaaatacctaacaccaccttcccttttggttccatacttcttaagttgacactcctcatcgattttgatctcatcaagcagttgtaaaaagtaatcatacctttcccaaccacctgtcacagcacagccttgtacccctaaatgcgagcaatccttgtatttacattttcctccctcgaccattttccgtatctaaggaaagagtaagaaacaccatcagtgcacaatcaatcagtctcacatatggggaaatgggcacaagcaaaaagggtacaaacctctttaaatcacaagggaagtttttgctttgttactttcagcaacttatgcttgttaaagccaggagtatcagcaaggtatccacctccacaaagaggaagtagcgttacatttcgggttgtatgtttacctcttccatttctatgtgaaacttcccctacactctgatcttcaaaccacttttttttattcttcttgttttggcctttatacattgtcatgaggatatggtaaaaaacaaaaggtttagctatagaatgaaataggacaaaaaaaaaaaaacttacaggcttaaacacttcttcgtgtttaatgtcaccaccatagctacttctcaatatattgattaagctggactttccaacaccactaggtccaacaatgacagaagtctgatttctcaggttaaacgcaatctcatcaagtccgactttagttcccacactacagatcaatggttcatagttagagctgtcaaatggtccgtccagggaccattgggcgtgtccgtatggacagttttttttatgggccaagttggacggtccataatggacaatggtccgaaaaatgtccatgcccaataaagaccatgtccatatgggcaagcccatgtatagcccattttattattaataaatcaaaaatcatgattttaaagaattgtgtttttgcattttgcatttttccgacaaaacggtaaaattgtgtttttttttaccaatacaatataatcacgattttggcggaaaaattatggaattgcgtttttccgccaaaaccgtaaaatcggagaattgtatttttcccgtcaaaaccgtaaaatcaaaattttgcgtattccaaaaaattgtggaatactatttttccttcaaaaccgtaaataatttaataagaaataatttattaaaatttaaaattttcataaaaaaaatatataatttgaaaattatttagttgtaattgtaattaaaattataaaaatatgattaaaatgaagacatgtctattgactcaattcatgtccatgggcagcccattgtccatacggtcaagcccatattgtctatggacaaaactgataatatgcccaattaaaccattttctttggtccggaatatagtccgcccatatgcatttggactgggcaagcccatgggcgtcctgcccaattgacagctctagctatgtaaggtacttctgaatcttcccactaaggatgtggttaggactagtgttttttctaagagatggaaaaatctctggaaacggtacctggattagacttaagtggcgaggatatcgaaatgtactaccaatacgtgagatttgtggatagatttctgagatttaataggaactatcagatagaatattttaagttaagctaccctggtgatgggagttctgagcgtgaagttgatctgctcaagcggtggatcgatactgtcattcagctgaaggttaaagatttagatttttttgactattcatgggaatgggggtttgataactttcagctaccttcaaccatttacatttgtgagagcttggtatccttaaagctatctactgttaccctgcctagtgtcaagtctgtttctttaccttttctcagagttctcaagctaggtgcagttaagttcgccgaccatttggatttagaaacactcatctcaggctgcactgctctcgaaaccttagctataagattctttgatcgcgtccaagttttacaagtgtcttctcagtctctactgagcttcactcatgttgcgcccaagcttgtctttactcatgctgtgcgaaagcctttggctgaaaaagatctatcaattgtaattgatgctcccaggcttgagtatctgaaactcagtgatcatcagactgcaagtttcataataaaaaatcctggttcccttgttgcggtggatattgatattaacttgtcttccggcttcgattcgaggaatatgattcgtgattttcttgttgggatctctagcgtcaaaaataggaccatctcttccattactcttaaggtaacctatgttgaattggatatttgaatgcttaactttatcttataagttttttcctcatatttctttttattcttgcagatcatctatgattacttaagatgtgaaccactacctccccattccgtaatctatatttcttgcatgttgagttctacgactacaggtttaaaatgttgcccacctttcttgagatctgcccaaatctaaaatcgcttatattggtaaggatttttcattgacccttgttataatgcaaatcgtgaaaatatcataaacgcaacttgttttggttcacttgattgtacttgcagaaatctactgaagaactggggatcaaagaaagtagtatgttttccggacctcaagatttcttaccatctctcgagtatgttgagatgaaaatgccattgaagaaagggttgctgctggagatcaggatgctagtgggttactttcttgagaaagcagcaatccttaagaaactaaccctatgctcggatgatgacagaaagagaaaagaatctttcattcccagaatccttgccattccaagaatttctacctcttgcgaagttgtggttatctgatccttgtagtcgttgatgccggcgattaactaacacaaaagtttgatttttttga

SEQ ID NO: 24113 - DNA, 915 bp, Arabidopsis thaliana landsberg
ggatctttcaagtcattttctcttaaatcaatcaggtaaactagcaaagcagaatgctttctctaaccacgttcatgtcccctctttggtgatgttaggtacccttctgcagtttttgttggagacacttacacagtctttgctggaatgactatggcagttgttggcattctcggtcacttcaggtatacttctaaccataccgtccttattgcaatgtacttagattcatcatttacatttaacttatgtgtgatccttcaattaactaactacttatgaaactttgctttttgcagtgaaaccctgttaatcttttttcttcctcaagtgttgaactttttactgtcacttccgcaggtttgatacctttctccatctcacactttctgttacttttcaatacatttgaaagcatctaacttgctattgtataactcttcagcttgctggcattgtcaaatgtccacgacatcgtctccccaagtaagctattttttgtccatttttcataagaggcaaagccaacaagtaaacaacacatgactcttcctctctcttttttaaaccaggtatgatcctgctacgggactgttaacaggaacaaaagatgggacactcgtgaacgtctacttgaggatttttggtaggaaaacagaaaagtctctatgtattcatcttcttgttttccaggtaaacttgctaatgcccatattatcatctctaaatacaagttggtttattctgagagagagaaatcacaagattggtgttttgtgtgttctattgcaggctcttgcttgcgcattttgtttcatgcttaggcatcttctagctgggtggtacaaataaatctctgcaacatgaagaaaactactaacctgtcctcctttcatctctctctctgccttcaca

SEQ ID NO: 24114 - DNA, 2944 bp, Arabidopsis thaliana landsberg
gttccaagaaagactacgacgaagaaaacaaatcagaaatatactaagtatgagttgtttcaaggaacgtagtaatggtttataataatattaacaatagaataaaataaatagtaatggtttaagaaaatattaataataatgagcaaaagctaagcaaaatataagcaaaacataataacatagtcaaaataatatgaaaatgacaagtatataaattatatgttaaaagttaagaaattgacttggaggtttgtgttgggattttcccttaacttaaataaaggttttaaatgtgaacaaaaaaagtttgaagttttagttgggaaaatgttttgatttggaggtttgttttggaattttttcacttacctaaaaagattttggttattattaacataaaattctactaataacaattgatatgcttcttcgtgttaaaaacaaaaaaaaacaattgatatgcttcttctttttttgtgcacccaataaatatgaattaaataagcatttttaatagatttatctcttgatagggtatccatctaaacaaatacaaaaaagaatacatttaaccaaaatgcttatctaatgtatatttaaatgtaaaactttattgtatttgttaatttagcaaaagataaaatgtctaattgctaaatcatatttacaaaatataatatctgttaattaaatcatgattcaattgtttgggctgttaattttgttttaatccgtctttgggcttgacccttctgtatttgcctattgggctttatgaatgttatgaatgaaaatgaatagtcacaaaacaaaagaaaaaaaacagaatttgagtcggtacacaactgttaacgaggtgtacttggtggaatcatagacacgtgtcttgacactcttaaggcctcttcaccaccaaattacttcccaacaaaagaattattattattgtgaagccccaaaagatcgaacattctaattcaatggcctacttgctgaccaagcaaaaaggaccggctccgttttcacctaattccgagcttcacaacgtgccttccattggttgaatattcaactggtttaaccaaaccgaagttacacatacgatttgagtcggtacacaaatattacgagacgtactttgtggacagtttgacacgtgtatcgccactctttatccctcttcaccagtcaccactcaccaccaacttaaaaataaaataaaaagagcatatattgtggagccccttacatgatcgaaaattctcgttcaaaagcattcgttaagaccgtgtgttgtgtgtcgttttttgtcgacgaaaattagaccggctctgtttttattggctcgtttcgattgaaagcgtggctataattggtttaaccaaaccgaagtcgacgtctcggtttgttcggttaagattaagccttgtagaacattccaaaacgccgcgtcaaagcttttagggtttgattctgctgtgtggctacccactcaagtctccagtgttcctttgtggctctggtttgccctattcttctcttccccctctctctctctctcttgttttctttttccctcttctccaaggaatctggaaaaaattaaaccttttttctaaatccctggaaatcagaaaacttcctattgagaaaccatagattcgatccaagcctttgattgtatcaaaatctctgctttaccaagaatttgggttgatacagaagaaaaaagttaaatggttgaggcagagcgcgcggagaatagttggattgcttcggaaacgtctccgtcgtcgtctccggtggtaatagaaagcagtgatttttcgataactgatggaatgagagatgtgagcggatttggtatagcttctcgacctcagttggacaagggtttgtcggaaaacaatatagggttcacggaaagagttttctctgccgccggagctgcggttttgtccgccgttactctaaatcctcttgacgttgtcaaggtaggagctttctattgttgtcttgactcatctgggaaattatatcttcttaccggcgaagatctaatgtttctgttgtgattttgtttatcagactcgattgcaagctcaagccgccggaatgtcgtactctcacccactcagtaactccattggacgcatggcattttttggcccaaacatggtattgtctctgaaatttttgttttgtatgagtgttgttttaaaggtgaatactttctacattttcactactcagttatgtaatcaatacggtttcggttcagatgtttgcagacttgagatgttctccttcatgtgcacgcgctggtgttgaaggtactgtttctatttgcccaccggattgtttccagtacaaaggaacatttgatgtcttcaccaagatcatacgacaggtgagcatctcttttcatcttgttgaatgtctcgcagtgttaagaagatgatgataagtagttgtttgagaggttttgttttttgtatgtggcatgctttttagctagaagcttactatttctctatatcctaacgcaagaactgatgcaggagggtctgggacgcctttggagagggactaatgctggtcttgccctagctgtgcccatggtatgctcttttgcttacatttacgggattcttttgtttggatagactatggattagtaaactctcaagttttgcacaggttgggatatatctcccattctatgatatgttcggcaaccggttggaagaattatctcgggagaaagctcctgctatgacattttgtgtgcctactgtggcagggtctttagcgcggtccttagcatgtacagtctgctatcctattgatcttgcaagaactcgtatgcaggtattggcttgtacttcttctgcgtgtggcattcttgtactttagatgagtgttatgcttttcaacgaga

SEQ ID NO: 24115 - DNA, 1505 bp, Arabidopsis thaliana landsberg
aattgaagcctataaatacaaagcttaggagaaacccgatggcgtcacgatttagagagcctctttcacagccaccatcgaccagactctcagctccattgaagatccacctcttcgatcataagcctccaagtcgacgtcccttgaagatctctctcctattcttaattgctttctctattctcttcttctactatttcttatacaacttttgaggagaaaacttatcttttgtgacatctagagaggtttcttttgaaccccctttgtttatatctttgtttatgtctttcagatgcttttctacttcatctctatgtcatttctttgcatcatgaggtgtttatggggtgattcaaaggggattcatggtttgattcacactagttgtgagatatacttttcattcatattagcttcttttgggacatcttattctaatgcatgtgtttgaattgatcaccaaatacagatcgaaggaattaggacccctattgggtaaccctaatcccggaaatagtgttaccaatccttcgtggtgttgtttgcgatggttgagtaacaagacttatagtagtactaaatgaatcaatgcttaatgcgttgaagtatgcagcattgacttcaaaggttgagtaacggagtatggggagatctaacggttagacgtatagcctaggctaactcgttcatttgcctttcgtcgttatgaactagaacaaaaatagaataaaaacctaattgatatatcacctattttcagagaaccatgatacccggagaaaccctagagcgaccaacaccttaatcttattgcttaacaaccgatttttgcattgctttcattcattcactttgctttcattcattgcttttattacttgctttcttatttcattgcattagtcattaggaaacccaaacccaaaaccccaagttaagttttgtcttagcctgatcttcttctctaaattcaataccttatagctacactctttatgggatcgatcctaaaatactagtactgattattgtgcacttatagtttaataggtggtctttcttgtaatgtgtgaataaaatatacatcaatgatccgcgacctcaagttccaactctatacgagcattgacagtctttacacgatgaagatggcaaccccatctatgaatttcttgaagaacaactgaaccctctagacggacgagaccaagattaacgagctccatgtgaagttaatcctttaggtgtgggagacaacatagacgtgcctcctctatagcatcctcatttcatcaattccaaacaccttgctaatgttgccgtaagacatgccacttatgtacccacctttgagacgagccgctccaaatcgtacgatagccaaattttgatgcaccaaaacaatacctacccgatccccctgttgtatgagtcactaatcctacagaacagtgactacaagacaatacctcaaatcattggtgtaataccccggcccaaaa

SEQ ID NO: 24116 - DNA, 1142 bp, Arabidopsis thaliana landsberg
ttcggaagataagggacaatctccttcaccaacttaaagataaagagaaatcttccgagaatatcgcgaggggcgatattccaaagctctataaaaagcgaaggacaaacaaaggggacacgcacaaaaacgctctcaacttcaggttatcaaaaacgctctgactttgaaggcaaaaacacttattttcatattctagaacacttgtacgatcaaatcattactttctcattaatacaatcaagaacaccgtccgcggtaattgaaaattctgttgttctttgagaatctcacaaagattcgttctttgaagaaacccttaaaacaatttctattgtgcgagtttcgactctcacactcgcaaaatgatccaaaaaccctaatcgagtcattgtgtaatcgtttctagtttgcgagggatttgctacggctccctcgcaagtctctcgcaaaattgaagcgatttcattggttgtcggttcctcgcaaaactttagcaattttgcgagggatttgcaaggcgttttattttcatatatacaccgtgaaacgaattttagcgaacccagccgcttctcactcaaaccctaatttttcttttcttctaacagtcgagtctctctcgatccgatcttcttcgtcggcgccgttcttcttcgcaacgactgctcttcttcttcgacgactgttcttcttcgccgccgtgtctacatcttctacgcctctactgttccatcaaacttcaaggtaatgttctgaattttgagtttctgttcgattagggttattagagtttttgttcttatcctgaagcatacgaatttctttcaaacgaatctctaattagggttttttcaattgagtttttaaatcgatttcgttgcagagtctagaagtctattagggtttctcgttttagggttctgtcgagtttttatttgtagatctaataagggtttcgcgtttgcggttgattttcattgtagatctaattagggtttgtcattttcgtttgattttcattgtagatctgattagggttttgtgtttccaaatcgatttactaatgttttcttttttattgtaagatgtctttctctaggaatgattatacctggtttcggtctcagcagcaacatcaa

SEQ ID NO: 24117 - DNA, 1607 bp, Arabidopsis thaliana landsberg
ttaaatttaatatttaaatatattttgaattttatgacttaataaaatttatttatatatatatatatatatatatatattattttggacaaaattttgtttaaaatatttaagataagaattatcttttaaattatagttaaatcaaatattaatttatagattttttctgcttaaatttttaattatattaaattataatgaagttattttattaattttatatcttaaaaaaattaatttttacaagaaaaaataggatagagtatttttcaaataaaaactcataaagaagacattttttaaatttactcaataaaatagttttattaaaactgatgtttttgtagcatatgccggaaaaatatattggaactcattcagttgaaccatttgaactatatcagttgaactcgtccgattgaaccaaatgaactagatcagttgaactatttgaactagatcagttgaaccatttgaattagatcaattgaaccaatttcatttgtttgggggcacacgattcaattactacattgtactgcctaccactgcaaatatctaaacaaccattttcgtttcgttcacttactttcttcaatcgagacctatagatagagtaaaacaaacaaggcgcttgtaaaaaaaaggagacgatgcgacggaggaaaaggcgaccaatgaaatctatgagtcgatcggagatggtatctctaaaagaggaacgtttccagagtggacgaagtaaatatcgagatatcgatctagatttcgatccaacaatatcgacggaggaagatgcagcaccggagcatcgacggctgccgaaatggatgaggcggccatagatggttttttcagagtcgacaaagccaattgaatttatacactaaaaatggtgaaaaaacaaaaaaaaaacatggtttccatcaaccagagaaaagcgtcgcaagaggaagaacaaggttatgtctcggatacacttgtagaatttgttgcacatgaaaaaaataatttgtgtgttttgaatttgtatttcttagatttgtatgaacaattcaactagtttaacttggttcaacttattggattagattaaaaacatgtatgtatttgtttccgtggtaatttttaatttaattagttgaactagttcaaatggaattttttttttttttttcgtagtaacatttaatataattaattcaactagttcaagtaagtaacgctaaaatgttaaaaaaatttaaattgataatttattatacaagtaaaattatatacgaatatcccaagctataaataaataattttagataaatgcaataaaatttaatattttctaaaaaacaatattgttttcatataaaacaccccatctaatataaggaacatttagtatatgatcaccttatatgaagtaaaataggtgaaaaccaagtttttaccgatgtaatattatgaaaactttggaaatacaaaataatagagaaaaagtgtgcgttcaacttataatgaattatttaccgtctagttcaattgtaaattatgaaaactgtgaaaagttcaactatgaatacgatgatacaacggtacaactatgagta

SEQ ID NO: 24118 - DNA, 2947 bp, Arabidopsis thaliana landsberg
tgtcaatgggtaaaaccgaggatgatgtgagtctccgtgtcgccggcggaagctacctggcgattcgacggtgaggaatgctcggtgtgggtgttgcaaatggatctcaagcttcgttgggttcaaatgtttattcgtgctgcttttatcagtcgctttgtttctttcggctttgtttttgttgcttccgtttcctatggatcgtgaggattcgaatcttgatcccagatttagaggtaaatctcctctttctgaattcgtgcaaaagtttcaatttttgctaaaagctattttagctgctgaggtcctatttggacaatgaatttactctatagctttaacattgatttgagtctatgtttctcatcttctatgtcctgaattttgcttattactaattagaaagctattttgggaatgagattttgactgtgatttgtgctttaatggtcagggatgagtcaaaactgcttcctctttgaagtttttagataggaagattatgttattgaggagaaataaatctgtgaacctttttaaagctatcctgaatcatagttacttgacattattagtagtgatgcgtgttcatatctcagtgactctgtcttggctttcacttgagacacctgtaaattttccatgagtagtgaagagaagacatcttcttacaagttttaactcagggaaaatggatgatcaatactctgatttataggttttagggtcatggatatggttatcgatcactgttaggatattcgttccttgttaattgtttctcacattttgatgcaggtcatgctatagtggccagttttagcatcaatagatcggcttcttttcttaatgaaaatacattgcagcttcagaatgacatctttcaagagatgagctacatttccatcaaagtatgatgttttcatctttttcttaacttttaaattattgtttctgattcgttttgtcatctcgtttctcttctgatctaacttggctctaatgaaacaataggtaactatcctggctgttgagccgtcagatgaattgaacataacaaaggttgtgtttggaattgaccctgatactggataccgagaaatcttacctctgtccctgagttctatcaaagagatgtttgaatcggtgctcataaatcaatctactctccagcttacaaaatccttgtttggggaaaccttcctttttgaagtgctaaaatttccaggaggaatcactgtgattccaccacaaagtgctttccctctgcagaaattcaagattgttttcaactttaccctaaactactctattcaccagatacagataaacttcaatacccttgctagtcaactcaaaaatgggctgaatctcgcaccatacgaggtttgtcatttctatcacaatacattattttctaaatctttcaatcatgttgaagttatgaattcattagcaactgttaatgccttgagttagattgttctgaaacatggatttaaccagactgcagaattggtatgtaagcttatcgaactcagaagggtcgaccgtgtctcccccgacaactgttcactgatcagttttgctaatagtcgggacttcaaattcaagcccaaggttgaaacaactgactgataccatcacaggttcacgctcgaaaaaccttggcctgaataataccatatttggtaaggtcaagcaagttcgtctgtcatctttcttgccaaacagcagtgatagtagcaccaaatctccatcaccctcacctagtccccattcgaagcatcaccatcaccatcaccatcaccatcaccaccaccaccatcaccatcacaaccatcatcaccaccaccaccacaatcttagcccgaaaatggctcccgaggtttcacctgtggcctctcctgctcctcacagaagccgtaagagagctccatctgcacctccaccctgcaacccagggaatagagtacatttcaaggagaaacgcgtgcagttttcatccacacctgcgcctgctccttctgctggggcaccacatcatcagctgcactcaccggccccaatttctgcagccaagtctcatatagttccaatctctgcccctctaccacatgtggtgtttgcccatgcagctcaaccacccataacggaaccacgggaaccacatgcaaacgaagttgctcatcctcaaccgcagtcctcttcatgtaagttgctacttaaagtcttccaatttagcaaagatatatcaaatcatagactcccaattctaatcaaatgccttcttctttctgtgtttggcagcagcgattgaggttttaccagctatgccatggattgtccttctcatgctgatagtggcctggcttcatgaataacgacattaacatgtctagtaaactgtatcgacagagtactcaaaacttttaaatgtataaaatgaattcatatggaaactagatacagaaccggaagagttgttatagaatgatgctgaacaaaagggtgcagccttctacttaagtcccaattgaatatatttgctctaagagcttcttttgtatattatatgttctaaattagaaaagttctgcaaccatcggatgtattatacagcctaaagctattggaaatgcctttaaaacaaggattccactttatgcttatctcaaaattaaaatccaaaaccttagaacataagagttatacaacacagggaaaaaaagtcaacaaggtctgtatgtataaacaagtcaatgttcgcctacttaaggtcaagatctgagtagctcaaatcaggtggctacgagatggagacccgatcgaggaagaacgcatgagtaggtaacgtacttgacactgtcaagaagcaccaccacatagatccgggaaagtgattctgggtttgggggaaccactctgtcggtttcagagtcaacga

SEQ ID NO: 24119 - DNA, 1999 bp, Arabidopsis thaliana landsberg
cggtctgggtaatgtttattgacttttgtttcatggggtttttcagttacttagaggaagtgtggttggagagatcgtttcagctccgaggctttgctgccaaaggttgtcttaagcttttaccttttgtttctatgaatcgattttactcaaattggtttttgattttgatgaatatatgtatttccacagattactagagctaaatccgtttgcgtttctgattgcttagctcactgtggttgttaaagttgaggtttttgccattaactctgcaattgtttttgttttgaagctaaaaagaaatccaagtcagatggaaatggatcatctgaagaaggtatgtcgaaaaaggagattgctcttcagcaagcacttgatcagattaccagttcatttggcaaagggtccataatgtatctcggtcgtgctgtttctcctagaaatgtcccggttttctctaccggatcttttgcccttgatgtagctttgggagttggtggccttcctaaggtatatatacttatctcttttggtgatattattctttccccaatatgtgtgttttagagtttttatcaggttggttctattagctttgttaattgaggttaatgtataagtctatgtattctctttgaagaatctaataatattggtctccccattgtgaattccttaggggcgtgttgtggagatatatggtcctgaagcatcgggaaagacagcacttgctcttcatgttattgcagaagcacaaaaacaaggaggttattatttgtttcttttaactcttcggctatgttctttacagagccatacgtcgtatcctaaagaagttttttgcatacaggaacctgtgtctttgtagatgctgagcatgctcttgattcgtcacttgctaaggcaatcggtgtaaatacagaaaatctgcttctatcacagcctgattgtggcgaacaggcccttagtcttgtggatactttaatccgaagtggttcagttgatgttattgtagttgacagtgtaagtaaggtgatttatatgggatggataatgggttgatgcttttgctattggatctatatttcgctctctcatgttttcatgtgattttgttttacaggtggctgctcttgtacctaaaggagaacttgagggggagatgggtgatgcacatatggctatgcaagccagattgataagtcaagctttgcgtaaattgagccattctttattgttaccgcaaacacttctgatctttataaatcaggtaagagaacgttactagctgagatttgtattcgaaatgtaaagtctcttatgcaaatgtatctttacttccccatgtttcatattcaggtgagatcaaaactatctacgtttggaggatttggaggtccaacagaagttacttgtggtggaaatgctttgaagttttatgcgcctatgcgtttggatattaagcgaattggacttatcaagaaaggcgaagaggtaaacttccgtataccagcttacacattttgggttccaagctcttacttaacttttctgttggctccttagttcttcagaatgaccaaatgttgtctacaaactgcatttttctattggctccttagttcttcagaatgactaaatgcttgtgtttgaatgcttgtgcacacaacgggaagtcaagtctccgtgaagatagtgaagaacaagctcgctccgccatttaagtatcttacacaactgttttaccagagtcaaactcttaaagccagccatcaagtcatgttttagagatctaatatatagataaaaacacacaatttggtgttcacatggttctctctcttcttctttgtttgcttagtatgaacagatacatgacctgcaaagggacgtggttagcaagtgcaggggcttacaacctgctgaagttgtcgaatatgcgtcttgaaagtaggtatttcacttttatgtctcttatgtgcgggttaagtcttga

SEQ ID NO: 24120 - DNA, 2297 bp, Arabidopsis thaliana landsberg
ttaataattataacatgataattagattaaatgtcacaattggtaatcaactgagaatattaccggagatatctgcaatggctgctggaaattggtcagcattttaacctcctgaatagcataatgatagagttcagtaagaaattcctctcatttagtgaagtgcactctatttactcacgtgacaaacttttatcatgtaacacattgaactaagatctatatagcatgtaaatgttaatatacatgctactttattaaaatgcatgtatattagaattaatacctcacgtggatcccctgtaacggggagcttctcctctatactctttagctacatgaatgagaatgggaaaacactatcagtttcaacactctcagcttctacttgaatgacagtgggaaatataaccttacttgcaatactaatccatgactagttaataaacaaacaaatattccatatatgttcatatagaagtactacatgttgcaatttaaagctcaaaacatatgataattactacatacctctagtggctgctgtgcattggccaacttctcctcagcattaggcaccacctcctttgtaccattaggcaatttatcatctgcaataggcacctcctttgcagcaccgtctcctgctggctcctcatctgtacgatgcgcatcacttaactcacatggggagtcttcaaccaagggattctccttgcggaatcaatggaaatctctgcgcaaacttctgatgatggatttatagatggcggctaaaacatatatgaacaaaatagagacattatttcatacgtctggcagttaataattcataaactaaaagatttaaaaggttatatctcacattggatgcgtcagtgttcccaaaattggcaccttcaaagtgagttggtgatgaaacaccatcatgacaagtagggttgttttttccgtccccagttattgtctctgtttgagcagcttcaataatagtttcaagagaaggtttatctgcccgaacctttggtggagcaattgtcgtggtacgactgtttcttcttggctttttctgcacttgtaaacaaagtgcataaagggtttaatggtaatcaaagattgaagtctagcatcggaaaaagtttgcttaccacaggtctacgcaaagtaggctctggtaatttcacagcagcaacattgatttctggcaaaactgaatccagaacatggtccaagtgcaaagcaccgtatgcatcgactgatgtagaaccaaatgccacaatgtgattaacacttgatagaatctccttaccactacctttcttcggaccactaatctcttccccacaactatcaaccacattctttgaactaccaacatgtccacatatgtcagaaggcatattgctagccgcctgttttggggctgaaaaagctttcattatcaactgagtcaaacgtccctcagactcagatattgccttcagcatacgattctctgactgcttgtctttcatatcaacgtattgcttcatcgccgatgaaatttggtcattagatctaccttgctttttgcttctgggccatccatggtagcatacagatcaacatttacctcatccaaggaatcatgagtgctacaaacgtcgttgttgtatgtttataatccggaatggagtcaggcaacagaccaccaccaacatggaagcagtaaatttgtatcccttgcctattagatgaatcatgtggtcaacatttgcatcatcattgtcctcaacccctgatgcactatccagcgggtcaccattaacttgtccacttagaatggagacaacattgatctacaaaagcaacgtgcgaagcaaaagttaaaaaaactatataccgaattttaagagtcacataaagttataagaacaccatattagtgtaaataacaagcaaggattttaattcagaaaatatagtatacagataaatcattggaaaccaaaaacaagacccactatatacaaacatataagtagacattacatgttatctatataaaacacatgaaccagctataaataacatgcacacatacatatatgttcatctatcgtggcaactatataaaacacatgaataaggtataaaacaaatgcagacaaatgaaatgacagagtagttaatgacaaacaagaaatgcataaaaagtgtgggatttaaaaggaaaacatagtatatagacaaactaatgggtcaaattaagaagcatcgtttataagaacacactatatcccagaccaatcatgttg

SEQ ID NO: 24121 - DNA, 2540 bp, Arabidopsis thaliana landsberg
  unsure (1)..(2540): unsure at all n locations
ctgatgggttattattcagctggtttgaacgttttcggtgctatcaacatcttatttatggaattgtaagttccatctctctaaaacatctgtctttatcgtgaatttaactattaactcaatttcgattgcgttagtgtgtcagtttacagtgtacttgatttatgacatagcaaatgaactcttgnnnnnnnnnnnnnnnnnnnnnnnnnnnnnnnnnnnnnnnnnnnnnnnggcagagagttttgttggacagcaggggaatcattacttcgaaggttggaatcagagggcgtcattaaacaaatgtttcctcttcatggtaagctactctgttatatctgttgggttacaaggagtctagactctagatggttaagaattctcacaaaaacatttggttgtagatgaactcaagagaaaggaacttctccaaaattgggcattaaattggtggaactgcacaaaccaaccaattgatcagatctactcttactttggtgcaaaggtagacacttataaatattaatatgatttatgtagcagaaaggtgttgatatgaaactcataacatagaaaaatcacagattggagtctacttttcgttcttgggaatgtatacgcaatggttgatatttccagccttacttgggtttatagtgcagatggttgattttgggtaagttcttaactctgttacaaggtcttaagtaaatactaatagacatgccggcacatccatcatgcgttgttttctatctctttgatcagatccttgcagtttcttgctctcccaagtttctttgtgggcacaatactctgggctgccttgtttcttcagttctggaaacgtaaaaatgcggccttgttagccaggtaggaaactcctacactgatgcataattctgcaacaattttagatttgttttctattttctgatttcttttttttgtgtcaattctctatcaatagatggcagataaattgtttagttggccccagccaaggatatagatttctcggaatggaatggagttcccttccttttccaaaggagcttattaagaatctcggaaatgagagagccaaagagaaggaagcctaccagagatatgaatggtttgcttatcgcaagaggtttaggaatgatgttcttgttatcatgagcattatctgcctccaacttccatttgagctcgcgtatgctcatattttcgagattatcacatctgatataatcaagtgagagcttactcatttttttgtttacaagctttaccagtcccatgtgttagcaactttgttacaatcatgacaattttctatgatggtctcaggtacgtattgacagctatctaccttctaatcattcagtacctcactcggctaggagggaaagtatctgtcaagctgataaaccgagaaatcaacgagagtgtggaataccgagctaacagcttgatttacaaagtaagaaaagcattgttttgcagagtcactgtttctcttttctaatcattgctatggaaattttcggcattgcaggtttttgggctctattttatgcagacatatattgggatcttttatcatgttcttttacatcgaaacttcatgacacttcgacaagtattgatccaacggttaataatctcacaggtaaaagagagaagatgctgtgataaaaactttcctttgaggatgttgttacctgcatatgtttaaactacaatttttctgcaggttttctggactttgatggatggttctttaccttatcttaagtacagctaccgaaaatatcgagctaggtacgctctttattcatctatgcagcttataaagcgtatgcgcaaaagttagaacttgcaagaaatgtcataactgcttcctttttccaggacgaagaagaaaatggaagatggatcatcaacagggaaaattcaaatagcctcaagagtggagaaggaatatttcaagcctacatattcagcaagcattggggtagaacttgaagatggacttttcgatggtaagaaaaacttatgaagtcaatgatcttttgtggttatgttttgatgtagcttgcaaatgtctcagctaaaaatttattttgcattgcagattccctcgagctggctttgcagtttggaatgattatgatgtttgcttgtgccttccctcttgcttttgcccttgctgcagtggtaacgttacttctagtactattttctcaatgtcatccttagcttttggttttcttgaaaactgaatgtatgtcttacacagagcaatgtaatggaaataagaacaaatgctttaaagcttttggtgacacttcgaagacctcttcctcgtgctgctgcaacaattggagcttggttaaacatctggcaggtacaatggataggcagaaaataacgaatttatatcactgtttttatctgaatgaattgagtgatttctttcttctgcggttcagtttctagtagttatgtccatatgcacaaactcggcacttttggtatgcttatatgat

SEQ ID NO: 24122 - DNA, 1431 bp, Arabidopsis thaliana landsberg
gttggatatttggtttggatcgtccctaaaactatagacgatccattatattactttggagtttataatatttaaaattaacaatttttgttctagtgaaatagtccatgtaatccggtatagttgtcgaaaaaagaattgttggcatcgaaatatgtttttaagcgattataattaatggttgatcagcgaaacataaagtatcatcctacatacttgagcatgtttagtaaaagggatgatggctccagggctcccggaactaaaacacctacaatactcatgtaaaaagtgattaacatcttttaaaactttttcgaatacgacataatacactgatctcataaaccgtttttatcagttcgatccaagaatctaccgttttcctaacatcaacgagatatggccataagtcggattctaacaaattcatcatcatggcgcataaggcgaaactatatctacttttagtaaataatctaaatgattaaaataagttgctcaaagagaataaaataaacctcaacttctatatacacaatatacaaaaacttccttgaatctaacaactgattaacaaaaatacacagtttcatttacataactatcattatattctcttagcagtcactaccagaattttcatcactaacataattaccattactcttcacaatattattattatgattatcaccgtgccacgaccacactatctcctccaacgctggccggacatgttcttcatacaacctattatactccaaagtatctcccgccgacttacacaactcaacgacggcgacttccggcgcaacctcgaaaacctcagcagtcaccgcgatctgtcctttcctcccttccgttttcccaaacaacttcaccttaaagtctttagtcctcttcaccttcatattcatctctttccctatcccttcaagcttccccattatctccgacgccgaccaccgtgacgtaaacatagatctcagcttcctcttactctcgaacaaacttgatagatcaaatcctgatgacatagaagagatgaattcaaacgcgttaaagaacttcggcgagaccggtgttgttgttgttgttgctgttgttgctgttgttgctgttgttgttggtgtttcgtcttctacgttttggatctcgagctcatcgatcttgaactcgatcggagagttgatgtttttacgaaaccacggtgttcgcataatcgccggtatcgagatccgtttgttaggatcaacaactaaaagctttgaaatcaacctcttggactccggtgaaaaccacggcggatactcaaactccgatttgaaaatcttccgatacattttcattaggttctcatcttgaaacggtaagaatccagcgagaagcacgtacaagataacaccacacgaccaaatatcagcttta

SEQ ID NO: 24123 - DNA, 1044 bp, Arabidopsis thaliana landsberg
aaaagaacaagaaaaataagactcaggtgctctccaactataaaaatggtattgggatacttagttggtcatcattttgtttttaagtctttactcaattatccattagtttaatttaagaatgcatgcatgcttgtcctgaacgacctcacagcaatgtaaagggaatagggaagaactcccgtcccttaaagtggcctgtagggctaatcacttagccaactagctacccttctatcctcctaaggcttcacgtcctaggtctatcctgatcgtcctacgatctatccaacattgtttctatcaagttttacttcggaaaaggatggtattcatattttattgattcctctgtggtggtacaagcttcgataccagctatggcggaactgcccgatttattctaacttaagtgcctacgtcctgccttagaggctagaccacacttaaatgggaataactcgtcaatccctcggatctagtccgacgaggccactgacaggatcaagtaccacaatctcactcaatggtgagtcacagagcaaatacaataaagcataaaaccaagcaggtaagagtattaaattattacatcatcattagagttttgcaaaagtagtcctcattgttcgaagtgcagcggaaataaactaacggtaaataaacagagagatggggaagcctgtcccatcactcctcatgctcctcctcagccaaggtgggtcccactcgacagtccaacccggtggcaagatggacggccaagtcactccagcaaccatgtcctctagagaacctgtaaaattatgccacaagcaaggctgagtatactaatactcagctagacttacccggtgtgaggagtctactcctctacctctagacatgcagctgtttggctgtggggtttggttgccaaaagcactagctgagtttctaagtcaagttttaactttgtcatatttaagtgtgactctcttaaggctaaaagtgtactatctactcatacatagtagcaaacaatattagcaatcaacatcttat

SEQ ID NO: 24124 - DNA, 1385 bp, Arabidopsis thaliana landsberg
tgataagaataaagtttgccgattgcgcaaatctctgtatggccttaagcaggcacctcgatgctggtttgcaaagctcacttcagctcttcttgagtatgggtttcagcaatcacgcagtgactactcattattcacttatgcacaaggtactactcgtctaaatattctggtttatgttgacgatttagttatcgctggaagtagcctgaaagctacaaaatcatttaaagcctatctctcttcatgcttccatatgaaagatctaggaaaacttaaatattttctgggaatagaggtggctagaaatgcatctggcatatatctttgtcagagaaaatatgcactagacatcattactgaaacagatcaactaggagcaaagccagcacactttcctttggaagcaaatcacaagctagcactctccgagtctgttctattacatgatccgaaaccatatcgtcgtttgttaggacgtcttatttacttgggagttacacgtcctgatctcgcgttctcggttcatgttcttgctcaatttgtgcagaatccacgattggatcattggctcacaactttacgactcatacggtatttaaaatctgatccaggacaaggtatcttgttgcgagccgatgggaattttcaagtcactggctggtgtgatgcagactgggacaactgcccgataacacgttgctcagtcacaggctattttgtgcagctaggagactctccgatcagttggaaaacgaaaaagcagaaaacggttagtctttcatcagctgaagcagaatatcgggcacttgctaaacttgttcaagagcttatttggatcaagatgatgcttaaaactcttggggttgttcatactcaaccaatgttagtgcaatgtgatagtaaatctgcaatctacatcgccacaaatccggtcttccacgaacgtacgaaacatatcgagattgatctacattttgtcagagacgaagttctaaaacgagagattcagctttgtcatgtggattctttttcacagcttgcagacatcttaacaaaacctattgggaaagatggttttcgttacttcaagtccaagctgggaacactaaatctgtattctccagcttgagggagggtatttgcgaatggtttatgccggttcggtttggttcacacttggtttatctctctgagaatatactctattagatgctgataattgtatagttacggatagcttttagatcttctcaactgtagggattttcctagattcacgacgtctgttgtatagtcgatctatatatgttgtatgcttctcttgatgatcaataacacatatacattgtcgaactctgtattcctttatggtatcagagcct

SEQ ID NO: 24125 - DNA, 2744 bp, Arabidopsis thaliana landsberg
tgggagaatcttttcgagatccttttaccaaagtatactatttattagactctgtacgttttctttatataaaaacaatgctcattgaacgagttcaagagtcaagactaatgtttgatacaatcaatacactgttaaaacaacattaatgatacttgcatggcaccacatttaaatccagtagttatgaaaaaaaccaaacattgttcctctgaccaatataggactaacttaggtgagattctgtgttttcgtccattaatgttctcttttattaaatttgtttaaaaatagttaggtatgactccaaggatataccaatctatatttattgttttcatttttattcagttaatcaaatgtgaatgttacatcacaatttcgacaagggatattgatcgatttgttatcattataaatggaaagtaaagaacagccaaaagacaaaaacaatgcacatatatatgtttgattctggattcaattatacactataaattaaaatttatgtgtagctttgagtgaatccgtgagtgagtgataaattcagttttagattgatgtgaaaaaggtgaataataatataagagcagaggggaccataaagatagatatatcacatgatctcttgatcagactctgcgaagatgggcctcaatttctcttcttcccccattatttgtccctgcatatataaaccttctggttctggttaagtttttacttgtaaacgtttaaatcttttctggtatattgaaaattaacactatatagcaactaaacactctaacaataaatgtttaactataacatattattgtgctagaaacatgaatatgtcagtgaaattataggggattaatatgaaaagaattgagagagggtagggaccaagtgaggatgagttatataggctatggactttagaaaccgaaattattgggagatgacaatgagaaatggaggcgattaggtgtaactaattaataaactagactagattagtagataggggctttcgtgttcatgctcccattctcatttgttcattagctatctcttctcctcaagtttccactttttttgttttctaaagagtttttaaaatccaatactggcaaaaatttaatatcaattatggagcatgtgtgccacctacttctccttccactggtttttaagtttcttagttattctattatctcgttaagcaaataaattaaactgattttttcaattaacaagtatatcataaaatttcgttttttaattttagaaatggagctttcctcgaattttatgcagacttttgaaatatttcgtgctatatttagcaagcgtcgtatttcttctataaaataagtaaagaacccttcaaaaatatacaaaccccaagtattatcttcatagtttctgtatgcttgcttcacacaaaatctccaaactattaaatccaactaaattgccaaactgctagttccggtaatccttaatatgatggactccaaattttacaacccatgaagggagatatcaggccttaagtacataaacccaacgagcccacatagtttatctatccttattggttattggcttattgcataactcaaatgctttagagataattctcagtggcctcttagccattttttggctatgtcttgaagccccaccctgcccccaaaaaatatgggctaaagtctcatcaagaatactaaaagtgtacaatggaaacaaaaaaattctaatttaaaggttccaccgagagttgaactcgggttactggattcagagtccaatgtcctaaccactagaccatggaaccattatgtttagagacgtaaacttataatatatatacgtatgaaccaaaatgttgaagttgtaggatttttggtctgagttacctgtaattatatttaattatttcatacactgaacttaatttgaaaattacaacattacaaacaaaaattgaaattctaatgagttacttttgccaaatcgatcatggttagaaacttagaatgattaaatagctaaactatatcccaatatataagatgttcgtatgtattttatttttgtccattatattaaaacttaaaataaattttcatattttctaatcatttctgttatatgcaatatttgccacgattggttgaattgttttaaataaataaataatattttgtaaagaacataagtttcttaatatatgtgatttaactaaaacatcttataagaaattggacagcggaatattattttcttgggttatttttgccaattctcattgatttgataagttggttgttaattggccatttgacagattattccataccaaacaaaatttgaaagaaatctccaaaaatatgattaatactgtaaacaatggggaaacccatgcaaagaagtcagcaagtgggttgtagtaaaatcagcacatgtgattatgagctttgggattctgcataaacttctgttcactaaccaattaattatactatattactcccaacccttacactaacttattactcttttacatttcaaatctcacttcctccacattcctctgtcttcatggctctctccatcctcttccttctcctcttcattctcttctctatttcgccgtcaaatgcacagtcgtttatcggagtaaactacggcttactatccgacaacctcccgccaccttctcaaacggccaaactcctccaatctacctc

SEQ ID NO: 24126 - DNA, 1175 bp, Arabidopsis thaliana landsberg
aaactaaataaatttccatttaacgattctgtaaaaattaaaatctacaacaaaaatcacaaactacataaatcaaaaacctaaaaccaaaatccaaaaattaaaaaccaatgtttttaaacccgacctggataatgaaccggactactttctttgtcactgggtaatcgagtcaaccaggttggatcacgggtcaactaattaaaatttatttaataaatttaatattaatagagattttagagattttagagttcttataaatttaaaataatcatatcatgtttataaaatataaaaccagattatgtttgataaaatataaaatcatttacaccaaaaatatatatatatatatatatataatcaaacaataataattctaataccgtaaataccgtaagtgattaaattatttaaatccaactaaatgtctaataccgtaacatatatactagaagatcaccaatgacggagataaattaataaaacaacctgaattcacacaactaatatcgggtgtctcactcaccattcgattcattttttaaggcggcattgtgaagtcttcatcaaaatctaaaacatcaaataagtttaagaacttaaattttttttacaaatgatttaattaagtctaaaataccatattttattccaaaatcaagaaaatgtttaaaaccctcacccgtccggtttaactagttcactgagtcacgtgttaatgatgagtttttgtgagtttttacggttttgaacttgtcaggttttaacactaaacctaaaccaaaaaatgttcgggtcacggttcaaccagtcagaccgggcggtctgggtcgggcgtgaagatacttgtttttagagttcttttgttatttctagagtcttttatagtctttttcaggtctttacatgtttggaatgcattttcagattatggaacattctggatcaaaacagagaacttatgctgcaaaagcaatccggagacgaaaatttacgtaggtgtcaatcaacaccacccctagtgtcaagggacaccaatatttgacggcaattcaatttcgcaacttattgaagttttaaagatttccaaatttaccccaaaacttctccttattttcaaagaagttcttgcacgtttttaggaacttatatatagatttataagttta

SEQ ID NO: 24127 - DNA, 2131 bp, Arabidopsis thaliana landsberg
tgctctgttttttttttttttttttccttctctatttactaagtgaagaagaatataaatttaaagagaaatgaaattagacttttcaatatttttattttttggatcaactagacttttcagtctcgaagactttggagtctttagtagacttcagaggatgatttttgcacggcaactctctatttcatgtcagtttcaatagtgcaaagtcaatgatgaattttcgataaattattcgaggtttatatatataaaatttaactgggggatgtgtgggccctgttctttgattgatcgttacgtcagctacctgcgatctaaaaaaagctctcatctctctttcactttcatttctcctctctttcatctctgccgcagcgactataaaacggccattccgtagacgctggaattttcaacgtctcaaattccctttctcctatctcttcagatctgtcgctgcgactctttcattcatctcaccttcatctctccttcttttttcctttatattttatgccgccggtgcttgtcgcagcgatgaacaaaagaacagggtaaatatacattgtttcaaaactaaaaatgccagacataaccctatcttttaaacgtttttgcttagggtttttctttaggctcattaactctcttatctttttcgtacagttcgatctctatttcaaagagactcgcatgctctggcttttttagttcacatttataaaaagttaagagaaccttcttctcaaaccttttccttgaattcgttaccactgttgctcgctgattcctgatctttgcgaataatatgccatgtatacaaaaacaattggcgtcgatctttccggcttttgggatctgaaatagtatcagagatgcttataagctagcaagggaagcaatagtttctgaaattagcaggcttgtgaatcgtactcgccaagccaaggctacccgcaaaaggacttgcagtatctgtttagatgatgatattagtgctaatcagatgttttgtgttgataagtgtcgtcatcatttttgttccgagtgtatgaaacaacatatagaggtgaggctactctagggaagtgtgattagatgtcctcgttaccactgcaagtctaagctgacttttggaagctgtgttaatcttttgtcacctaaacaaataaagatatggcaacaaaggatcaaagaggattcgattcccataaagaaaataatttaatgcccaaacccgaggtgttcggccttaatgtcggtaaacgagctctctaaatatactaagaacatccacaatggttgactcttagcaaacaaacaataaaaaatttatatgatttaaatattagatgagtaaacttaagccaattgtctcttagttaagaaacaattggtctagatttcaccaaatttaagaaacctataattaaaaaatattatttatctatatttacactttagttttgtttaagagacttaggcttagagactaccattgaggatactctagagaagctggagttaggagaaacttctctaaatctactaaagaagatactagtgtaaggagataatgcttagaatgcagtcaaatattttgcatcaactgtaaagttacatggcatagtaacttgtcgtgcgacgattacaggagattgggtccaaatgctacagctgatgatataacgcttaaagctttagcaaataaaaaaatgtggcatcaatgtgaaaagtgcaactacatgatcgaactttctaaaggatgcatcaaagtaacttgcatgtatatcatcaaagcaacattaaatggaagttccatacccatattagcatctctatttatctctattaataacattcaaagcaacaatagttatatatgtttatcattgcatttttatagtagatgtggacataagttttgctacaaatttggagccaaggctggaggttgccatcatgctcgttcccatacgtatctctcagtgcaaacagtcgccattaccgcctaggccaccaatgtttcctttaccgccaatggaacatccaccagtgtggtgtaccatcttgtgctttcttctcatttgttgcttattttatactttttttttttttttgaaat

SEQ ID NO: 24128 - DNA, 1643 bp, Arabidopsis thaliana landsberg
tcagaaatttcatcagatataatcgcgtaatacttcttgtatcattcaacaactccatcagcagcagctacatcttcaatctccccctttttgactatgtcgtgaactcatcagttctaactccaacacaacatcaccatacacatcatcattctccccctgaatgagtcacaacatggtcaaaactacttataaaattctccccgcttcgcaatacgaggttgatagcctagaacaccacttccatgaaaatcatctttcctaacccatactttgttgagccttaaaccctcatgactgcattctcgaatgaacctgaaacaattcctcttgatatgtccttgaactccataatgataacatttaggaccatgaaatctcacatcataagcattcatcaatcgatttttctccctcaacaatctgaaacatcttggcctaatatgcccaacaactccacaatgatgacaaactggtcgaaaaactcgtcgaggttcactctgcaatttttgaacttttcttgtactggatgcagtctctgtatcagttctcgaatcagttctcgtatcagatgcaatctctgccacagttgcagtttccttcacagttcctgatgcagacgtgattttaccaccataaacaaacaccggatctgattttgaaggatttcctttaaatccaagaccacacttatcagtcttgccaatactcaaaatatgacccaacttctttgtgccattattaagcatcctcaaattcttttgagtttcttcaagttgtactttagcttgtgacgcttcttcttctttctctgcagcaaatttcagtgtttcaacaactttagcctctaacttgagcttctccttatttaacactgaattctcctcaactaccttaacacaatgctcatataaggttttgtaattctctgcaaactcttcatcactaatacttgcatcatcatcatcactttgatcattatcactttcagttgcagatcttgttgcagacgctgatgcaggccctgatgcagatgctgaagcatgcaaatgctgacgcaatactagactcaaaggtcataaaggccacaaaattctccaattctttactatcatctgaatcaattccagaagcactcatgatgaattttttctccttttccttcatcaaattcgcacatttataacgcatatgtccaaaacctttgcactcaaaacattgtatgccctttgatgacttgcacaacacttctttttttccatcaaccttaaactcgtgaagagatttattttgttcattccatgaaaaccgcttcttgaatggcaaccttaatatctccatcaatcttgatctcaaacattgtcttacttcttgaacgatctcttgaacgatcttctgaacgtcaccctgatctacccgaaaaaatactaaatctctatcgagaacctactctttaaacaaaaagattatgtaataagccatccctccacatcctcgactaagacttgttggcaccactcgtttcaccaagaatacttgatggtctagtgaagtaaacaagtaaaccaataaattgaataataggaaaaaacaaattaatttttaaattctcatgtatgaacatcctacaaagatttgagaag

SEQ ID NO: 24129 - DNA, 1540 bp, Arabidopsis thaliana landsberg
agattcaacagcttgctctttaaatagatacaaaggtgccagtgattatgtggcttggcatgcagatgatgaaaagatttatggtccaactccagaaattgcttcagtctcgtttggatgtgaacgtgattttgtgttgaagaaaaagaaagatgaagaatcttcccaaggtaatgggacatttgagtcatgctaaagtgttttcctgcatagccaggaacaagccaacttttgtttggtgtgaacctgcagggaaaacaggagacagtggaccagctaagaagaggttaaagagaagcagcagagaggatcaacaaagtttgacattgaaacatggatcgttgctggtgatgagaggatacactcaaagagactggattcattctgtgccaaagcgtgcaaaggcagagggcactcgtatcaacctcacattcaggcttgttttgtaaactgagcatcatatgcaagaaggtgggcttgatcttggtctccattgacattctctaagcttctcatcttaattctttataaacatcaattggtgtagacatttcaagaagcaaattggacgggaagattgataaggaagagtggcaaagtcttgtcttgtgtagtccctctcttaaacaacatgacgctttaacatccttgtccccaagagaaatgacttgatcaagtgcaaatatcactcacaatcagccataccaatccctgttcatctaaagacatggtagactcatctagctagaaacatgaagtgtgcataattcactagtgtagatcttgcatccacactcacccttcatacttgttttgcaaaccgagcatcatagagtcgtagacaaggtgggcttgatattcattgacctttgaataggctttacgcaaccttttttggtatttggatagctttgaatatttctgatacaataaactctgttttaaaagtaatctaaaaagatagacgttacaaaaaacaaaaaaaaagcaacgtccactaaaatttaaaacaaaaataaaatcatttgacagaacatataaagcgaataaatagaaagaaataataaataaaagatttctcactcacaaacgaaattttcagttttagaatttgaaaacgttttgatcaaagagagtgtgaatcagtgaatcagagagttatggaagaggagagaaacaatccgcatcattccaccgccgatcttctttcttggtctgagatccgccgtcctgactattccaccgccgctaatcgctctaaccaggttcgttttgccggccagaactcatcactcgtctgatttcggtttcgattagtgaaatttcgttctgattatccatttttctcagccgtctgatggaatgaacgatgtacttggcggcggcggtcagatcactaacgcggaaactaaatcacttaatacgaagtaaccgatttcatctcttttcatgcgaattgatttctatgttgattctaggttttgttaaattatcggataatattgatctggagaagaattttactggtgaattagcaatg

SEQ ID NO: 24130 - DNA, 1556 bp, Arabidopsis thaliana landsberg
  unsure (1)..(1556): unsure at all n locations
aagcttctcttgctaatattttagtttgaattttgacaggctgtgagaaatggtgacgtggagcagtttggaaatgtccataagaagtttgggaaaacatttgcgaaagataggactcacaacctcatagtcagactctgacacaacgtgatcaatactatcaaacttctagacctcgatcttcattctatcgaatatatgtcatcaggcaattatcttagaaagaagatttttcttgaacaagagaaacaaaaatattttgtttaatagaaattatctttggaggatggagatacaagcatcagttgcaggtttctaagttttacaaattcagactatattaataaaataaataaataagtattattatctttttgttacaaatannnnnnnnnnnnnnnnnntgtgtaatacaatatagtaaaccggattataaccaatcaacaaacccggatgggctcggtttagctactctaaatcgaatgaaatcaatagatatgctaaatcagctttgggtcaaggaagaaaaccgggcaaactggaaccagcgaaaccctaatcggcaaaagtaaacctctgcctcttttttttttgaggttacaattacaacaatataagatcggaaagacctttatgtccctttttaaattgaaatcatatatctttacaggttaacaaccaatgaaaagagaaatataagataatgtctctttaacaaatgatttttaagcaaaattcagaatctctttaaacctttgaaaaaataaatttaagaacaatcatgagagatataggaattgaaaaaagggatttgatgaattaatcgaaacattgaaatcatcaaaaggagaacatttgaaagatgatgaataaacaaaatgagaaaaacaattgcatgaaaataaagagaggtgaacataagcctcaatagataactgatcactcaaagggacataaataaattactactctcctcttgatctttttccttggtcaacgaccttatcatcttcaggcaccatgactttgtttttccccttagatccctcttgtaaagcaaaaaagtcataacaaagatcggtggtttgattaggaggaatagatatatttcttgaatcaacctggtttccagcaaccaaactgtatctaggcacacaaggacccacgggagtcattagattcccatggaacgatgagttagtgttgttattagtgctattgttgctgcctcctgtggacttggatggaccaagagttagatcaagattaataccatcagttgatagagcatgtgagctactgccttggccatacttacaagggccaacaggaagcctttgcaaggtgaaaggagtactatcacaaagcatcgcatcctcgattatctttcgctgcttctccaattctcgttcctttttgtggcacttcatgtgaccgcctagggcaaaacagcttttgaaattcctcttgcagaaacgacaggtgtggctgatcttgttatccttgggaggatgtattggcacggtatctcttttctttgggaaaaaacttaatct

SEQ ID NO: 24131 - DNA, 1285 bp, Arabidopsis thaliana landsberg
agagggaacacaaaggttaatgatcaatacaactcaatatcttccgtgatggataaagaaattttagtctcaaaagatatgattaaagaggagggaccctttgtagagctgtcaaaaagtgggaattttgttcaagaaactaatggaagaatgctggaaaaatggatgcaacccaagaggtcaatacaaatgatgagaacattatgaagccgggtcctactgtcacggttgacgtgagtgaaagaaatcttggcagtaccaagcaagggaaacggagaagatcagtgctcataaagcaagaagaacgggaaactggcatcattagttggaatgttctgatgaggtactttacctcaccatttttttatggctacaaagagatcaactttgatcgttcaaccaaaatgaaaaatagttgagctaacatagtttaacaaaagaacattgctttatatttatataaaaaacaaaagatgcagatgaacagtgcttaatgtggtttccaattttcaggtataataaagcagtaggcggcttatgggtagttatgattctactggcatgctatttaacaactgaagttctccgagttttaagtagcacatggttaagtatttggactgatcaaagcacgccaaagagttatagtcccggtttctacattgtcgtatatgctcttctcggatttggtcaggtttgtttctgtaaaagacttagatctgtgtttctgacatattacacgaagttgacgtttatatggtcattgattcaggtggctgtcacgtttaccaactatttttggttgatctcgtcaagtttacatgccgctaaaagactccatgacgcaatgctgaattctatcctacgtgctcctatgctcttcttcgaaacatacccaaccggacgtgtaataaacaggttttctaaggatattggtgatatagatagaaacgcggccaacctaatgaacatgttcatgaaccagctatggcaactcctctcgacatttgcacttataggtattgtcagtacaatttcattgtgggcaataatgccactcctaatactgttttatgcaacatatatctactatcaggtaaattctacttcatgtcattgtccgcttctctttaattgttattaatctatgtgatccacttggaatgaatctcacttttgtaatttgtagagcacatcccgtgaagttagacgtttggattccgttactagatcacctatctatgctctatttggagaagctttgaatggtttgtcaagcatccga

SEQ ID NO: 24132 - DNA, 4545 bp, Arabidopsis thaliana landsberg
  unsure (1)..(4545): unsure at all n locations
catctgtcggaattggtgctattatgggtctcgggattgcatatgcgggttcccacaatgatcaggtgaatacatgttatcttcttacctatggtgctaagttgaatgttctgttgacgagacaataacatgctcactgtttggatagataaaaatcaggttgtctccaatactaaatgatgccaacacacctctcgatgtgattgcatttgctgcacttagtttggggatgatttatgttggttcgtgtaacgaagaggttgcacaatctattatatttgctttgatggatcggagcgaggcagagctgggtgaagccctcactcgtttcttgcctcttggacttggtcttttgtaccttggcaaacaggtgggcagccagtcatacttgattatttttcttgttcgtgtacttgatcgttatttccccgattattagttttaacttgttccaatatcgagcaggaaagtgtggaggctactgcagaagtttcaaagacgttcaatgagaaaatcagaaagtattgtgatatgacacttctttcatgtgcatatgctggaaccgggaatgtccttaaggtatctgatcaagtgtgctagtggttgaattagattattcacttctttctagtttagtctgactcttcaaactattcaaactattcaaactattcaggtccaagaccttctggctcagtgtggagagcatctggtgaaaggtgatatccaccagggtccagctgtgattggattagctatggttgctatgtctgaggaattgggtctggatatggagatccgttctttggagcgcgtactacagtatggagaacagaacattcgacgtgcagtgcctttggctcttggtctcctatgtatatcaaacccaaaggtgagtattatttttgcatatctagttttcggcggcgtgcagttacttttctgcttaagaatactgttgttactctctaacttttttataattccaggtgactgttatggacactttgagcagactaagccatgacacagattcagaagttgcaatggtgagttatcttttcgccactcatggttgaggtagagtagttatttctttgacttgctatgcagcgttggactgatgtttcatctgattcctacaggcagcaattatctcccttggattgataggcgctggaaccaacaatgcaaggatagctggcatgcttagaaatctctccagctattattacaaggatgccagccttcttttctgtgtaacgttttatgatttctttttaagttttcatggaataaacacggtttctacttatgataggcttgttctcattgtcttaagtcacaatgcaggtgcgcatcgctcaagggtttgtgcatatgggaaagggtctcttaactctcaatcctttccactccgaacggctcttgctatcgccgtaagttataacatatattttatgtatactttgctttcaaagctccaccttgtgaatcctaaacttgggtgttgtattttgtacctagaaccgcacttgctggtatagtgacattgttgcatgcatgccttgacatgaaatccattatactggggaaatatcactatgtgctctacttccttgttttggcgatgcaggtgagtgcaattttctgtctgatgactttttttttaatgaactaagcgatatttatctactaacacaatacggtttgagtgtgtagccaaggatgatgctgacggtggatcagagcctgaagcccatctcggtgccagtgcgggtaggacaagcggttgatgtggttggacaggcaggccgacctaagacaatcactgggttccaaacgcactcaacacctgttctccttgctgctggggagagagctgaactcgcaacggagaagtatgttgttcctctaatccccttgttacattatcctactcgaaataaaactctgttttacatattggaatctaaaaaaactctgcttctttttgggtcacaggtacattccgttgtcgcccatattagaaggtttcgtcatattgaaggaaaatccagactacagagaggagtaaatccaaagttgcaagcatttgaagaaagagagagagcctttgaatactttcactacggttgtcaaaagttttttagtttattcccgtctgtccccaggaaatggttcacaatctctccttttaaaagaaaaaatagcttcattgcaatatgtaggaacttcttgtgcactactttaatatcgcattctaaaagctggataagtttccaaatccaattctcttaacctgcaactccttcaaatcaactcgttcgacgtttcgtttctataaacttggcttattgattatgggctctttggtttgctgccctggaacttcaagttcttggtttgtacgcactccaacttcaatttgtgacatgcaaaggctcctctcgttgtttccggatttggccaaaactatgtaatattattaaaatgttgaaagggtgacccagctagcccggctacatatttacaattttacatagatggcgtgcacgactcacttgtttcctcggtgtatctttttttttttttttttgaataagttcgttcccaaacataaaccagaagtataaaatcttattaaaattagcaaccagcaaaagcaaaaatcatgtacatgtatattgagggttttagtttctgtcactaactatatgaactttgcctaaagaaaaaaaaaacaaataatgaaataaatgaatggaatacagttttcaccgtttgttctggtatacatatggggtatatcgagattaattaatctcctccggccaggaaaaaaaaaagtaaaaaaggaaaatttaatggccgcgacctcttggacttggacccgacgccaaacgctgaaaccaagaatccaccgtcgatttcatcttctccaccgtcatagtcgcacttccatctcccgatttttcagtaagaaccctccccgccgcagccggaaccaccacgtgttctacgaaaaacaacgacaccatcacaaccacaatcaaaacagtagaccaactaactcttctcatcgtattttactttctcttctttatgttgtaccgacaagtaataaaataaaacagaagccttttttttgtttgatatcaaagaaaattaagagatatggttatgtgggaaatcaaataaatgagagggaatatttatagttatttgacgaggaagcggtcatgacttgagagagttcatcacttaggtcggattttcccggcgctagctcacgattttgcgtgttgaccaagtattatgacttgaacgggtcgctcttatgacactttacgatgtgccaaattacatttatacccattttggtggtttttagttttttagaggtaaaaaataatcaatgagaattttgttaacgaaattatatttacacataaattttttaaaaacaagtgttttattcgaaaaactaattgatgcaattttatcaagatgtttacgcggtaccaatgattaatttatactagatcatttgatagcaattttatcttttaaagatacaattcttatttaagctatttattttaatagaatcacatatcaataaaatatttcaagaaatttcgcaatatatcataggcataatttcgttctgaaaagtcttatatgaaatttgaaacttaacgcgtaagttaccattgactaaataaaagtaccgtaggaggaccaattcacagtttcacttaaataattctcttgtcagtgtagtttgagtggacaataatccattatgagttaatgaaaaaggttgaaatgtaagataaaattacgtatcaactgcgttagtaggtatataagtagttagagaacaaagtaaagtgtttggtaggtggttttttcctatttgaatacttgaaaagcttgtgtgagtttgttgctggatagtataaaatgtatacaagcatatgagtgttctttgaattcaactatattttaaaggactgtttaattataagaaaccttaaaattcaaaacacgagaatcttgacttgtccaaatttgaagaatagtcttgtattaaccaactttactagtaaaagtccaacggtaatgatattgtattcaaagtcatgcattttaggtaaccagagaattcttcagagttttgtttacaataacatcttcggattggatcaaaacagatttaaatagtttgaatcaattatttgttatcggccgcaatcgaattcatgattttaaagaactcaactccttgataaattattaaacactaaccttgtaaatgtcccgcattttgtaacagaaaaacttaaactcgagcaagttttgcaatagtaacttttgggccaattataataaattataaaaagcccattaaggactaaatatttttaagttaggcccatctcagattcgttacctctacaaaacctctcatctagggattttctgtctggagaacttagctcactttngactctgtatctctatgcgtctctcttaccc

SEQ ID NO: 24133 - DNA, 1840 bp, Arabidopsis thaliana landsberg
agcagtggaaaggtagtaaaagtgtctttgctttaaaacatcgatgattctctgggaggctttaagccaacactaaggttcttgaaactaaatagataaagacagagagtggagctaaagcgactgcaaagaagacagggatatacaagagatggcaagagaggtctcacaagaaagtatcccgagacagcggtgatgcagacgaaaccacacgaatgtcaggtaattaatgttggacagcgtttttttaacacaagttcagcgttttgccacctttgagttgtcaataggtctaaagagaaaacttggcaggtagaggaggccgagatgggaagagacggcaaggatcagtgcctaacgcacatgttcgttcagagatcaaagatctggaccaggtgcgtaaggagagacagcaaaaggcaaacaaagtttcttatctgcagagcaagagaggcggaagaggtggaagaggtggggccaggggaggccgtggtggtggggccaggggaggccgtggtggcagcagggattttggtggtggaggaagggattttggcagtagcagcgatagaggtggaagaagtggcggtagggattttggtggtcgtcgtggtggtgctagcactagtagcagaggtggtaagagaggaggaggaagaggaggtggaggtaaacgtgggagaggaagatagtcatgaagaagaagactgtcttcaaaactttgagcttaggcaaactattacttgccaaattgttatatcactcaccgaaccttctctactcaaattttgtgcaacactttataatcttgtttttttctgcaattttggttttcatgtatcaataagttggttgacgacaaaaagaaagcgacccaacactagacacttgtactgacgattcgttgtttcatgtcaggttaagtaatgatgacatcaggtatagtacaacaaggttctatggtgtagtggttagcactctggactttgaatccagcgacctgggttcgactcccggtaggacctctttttttccttacattttttttagttattacgtttcaaaattaaccctattatatcaactcccacttctcttcttcttctgtcgccgaaaacgcagcttaagctaaaacccctcagagagaacaatgagcaaaatcgagagctttgatgatttcgtcaaagtacatggaatactattggctgcttctggtttgccgccgaagctttacccacgcctctttgagaaactcgcttccgatacttttgatggcggcgattacttccaaatcgaatcctgcgaggatgatcagcgacggaagcttctcctcactgccgaatctatgcctaaagattctgacgtcttccttgttgatcacgcctggacttttcgtcttcccgatgcctataagcaggtaacgcctactctcactctcgaaagaagcttattgaattttggattggtgatgaagcttaaggtttgttttaatctcttacttcagcttaaggaaattcctggattggctgagaggatggcttctttgatgagtgttgatattgatgtggatgctggagaagaagaagaagtggcagaggaactctctgttgatcagataattgacaatgaaattcgttatgcagcagataaaggatatgactctttgagatggttggagttggagggtcttggaattgttgatgactcattgttgtccctgcatttgcctagtagatttcaggcatgtctttagatctttcttctcctttagtactttcatgctagactctagctcagatggtgaagggttatttcaaatgctagattctaaagcttcttt

SEQ ID NO: 24134 - DNA, 4400 bp, Arabidopsis thaliana landsberg
  unsure (1)..(4400): unsure at all n locations
acaagtctccaactgaagcaagcagctcaagaaaccaaaatcgtcaaagggcaggaacatccattgcctactcacaggcgggaccttaaacaaggattgtgcctgcaataaagaaaggaagagtggattttcagaatccattaaatcctcttccttaagaatagtgagctagaactgttgtgggttggggaatcacagaacagttcgcagaataagagatatcaggaaaaagatattcctagacttactattcctcatggagacaaaaaacagtgatgatgttgttctcaaaaagttacaatggatggagtatcaatcaaactttcttgtgtctccacaagcgcctggtgtagacgggttagccctgctgtggaaaaaagagttaaaaattgaagcgctagcatcatgtcaaaactttatcgatacaaggataaaagcaaaaggcaagttcttctttgctacctttgtatacaaagaaccagacagaacaaagagattacaagtgtggaatcaattaagagctcaaactacatagagaagtgaaccatggctgttaacaagagatttcaatgatataatagaaagctcagaaaagaaaggtggacctgacagacctgaaggatcctttacagacttgaggtcattcatgttagaatgtggcttatatgatctcaaactttttggtaattttctttcttggaggggtcagagatacactcatcttgtctggtgtagacttgatagggcaatggaaaatagagcctgggttgaggcttacccctctggaagaagtgagtatttttgttttgaaggctctgatcatagacccattgttacctcctttgaacctgttaggaaaaaataaaaagggatattcagatatgacaggagattagaggataatgaagaggtgaaacaaatgcttttagaagcttggaatgaagaagagaatgcttgagttgaaagaagaataagcgcctgtcgaagagcaatcatctcgtggcacaagaaaactcaaaataacagccaaaaggagattgaagagctccgtgtaaaattagaagaagcaatgacaagcttatttcaaactgcatagcaaatacagaataaacaaggaacttaacttagaaatcccactgattattcttctttgcatgtctaaaatctggctaggttaaacaaacctcatatagaaatcatcacccatcatgcttgtctttgttgtttaaaatccggttaggttgcttgtagatcatttctaggacttgcttgcttgtttgtttgtttctattgcatgtttattttcttcgcatgtgagtcttgtaagtcctgcttaagtgtcgtcatcttcaaatccatgtcggatgagaggtgtgcattgtttgtataagtgatcttggatgcggaatccatggatcgtagagaatctagtttagggtgatgtcatctcctgcctgtgtgttgagccttcgagtctcggtcccaaggaaacatttgttggttagtcttggaacctaggccgagattgcatgacgatgcatttgggcttattggtatcttgggtaagttcaataagtcgtgatcttgttggtttcctgtgtggattcaacgagtggttggtcgggttaacggatccatgtaggagaactcaacttccgacgtttgtgaggaggaatggagcacatggcccataggtcgagtctaggttatatcgagtctttgtcttgcttgtattgcttgtgtgtttatgtgcttttaacgtgttactctgattgtttgttgcattcttgctttgcttccgttcgttaacccctctaggttgttagatttgcataagaatggcttagagttgccgtaggttccatgttgcattggcccgactcactgagtaatactagattactcatgattttcttgtctttcaggcagctgtagcttcaaccagtagagggaagacgaacgataaggccgccagactagggtattttttttaagttgcttttgtaaaacctgattttgtattttcacgttttatttaaaatgcggatccgttttactaactgttttttttggtgatcttcttgcgaataacgttaaagtacaaagggttttacaaatgcgggtgtttcgtgatgatacaaggctttgtccgagccgcacaacactgggtacgccacaagggttggcaagcctacgcggtgcatctagtggggagatgaccgaatgagagttggccaaggacttgaaaccccgggtctttagccgagttgcgcctggttctctccatctgtgacgcccaccgggtcggccgtggttagtcctgtcatggtcaggctcgggggcgttacaaccacatccttaccttcttcaactctaatatgctgacgtggtcctgtcctatgcctgagatgctcctgatgaaggatatggatgcctttcgacagaaaaataagcttgtgcttaagcttgaactgagggaatacctgaacaaactccttatacgacatccaagagttttcactgacaccacgatcctgccacttaaccaagaactctttgttccctttgtccgtaaaacgaatatccacaatcttctccggaaacagaaattcatcttccaccaactctggaggatcaattgcctacaccttctgttgctcgccaagcactttttttagctgggaaacattaaacacattgtgaatttttgatgaagcaggaaggttaaggcgatatgccaaattcccaatgcgttccactatctcaaaaggaccaaaaaacttggcagccagcttgtaacatggacggcgaaccacagtccgctgtcggtatggttgtaacttcaaatacacccaatcacccactgcaaacaccacatctcttctcttcatattagcattatgtttcatgatctcttgagctctttgaagattagctcgaatatgttccaacattagatcacgctcctttaactgcacctccaagtcccaattatccgtagaaccaagttcaaacctcaccaaagaaggaggatctctaccatacacaaccttaaaaggcgatgtcttcaaagcatagtggtaagccgtattaaaagaaaaatctgcccacgccaaatatttatgccaagcccgtggatgactagaagtagcgcaacgcaagtatgtctccaaacaacgattcaggacctccgtctgaccgtcagtttgaggatgatgcgatgtactatgtttcagctgagtacccgacagtttaaacatgtccttccacactgcccccagaaagattctatcacggtctaaaacaatagactttgggaatccatgtaatttaaccacctctgaaacaaacttatttgccacatcaatcgccttaaatggatgttttaatcccaagaagtgtgctgccttactaagtcggtccaccaccaccaaaatcacattgacaccaccggaagtaggcagcccttcaatgaaatcaacaaaaatatcctcccataccgctgtagggataggtaacggtggtaactatcctactggtgaaagtgtcgagtacttgtgagtctgacaaatcgaacagccagtaacataccactgaatgtctttataaatgacttcccaatgaaaactctcttgaacccgcttcattgtttttaaaatgccagcatgtccccccaccttactatcacgatactcttgtaaaatcagcggaataaagcttgaatgtttcggaaaaaccagtagttgcttataccacaaacgcccattaaccaactgttaatgacttccttgtagctgattatcctgcaactgttttattacactttgaatatgctcatcctcatcaatttctatgtataaatccttaagttaaataacatatggcattgtgagtgccagcttcaatgcataatcaggatgctgcattcgagataacccatttgctgctttgttttcaacccctggtttatacacaatatccatatcaaaccccaacaatcttgtcaaccatctttaatactccatattcacctctttttgttccaacaaaaacttcaaactacgttggtcagtatggacctcaaactttctaccaatcaaataatgcttccattttaacacagccataacaatagccatcaactcacgctcataagcagacttcaattgttctcttggagtcaagtcatgactaaagtatgcgatcggtttcatttcttgcattaataacgctccaacgccggtaccaaaannnnnnnnnnnnnnnnnnnnnnnnnnnnnnnagtcagggaatcccaaaactggagctaagatcatagcctgcttaacatgatcaactccctcctgagccattggaagccataagagcatatccctcttcgataattcagtcaaagtctt

SEQ ID NO: 24135 - DNA, 1608 bp, Arabidopsis thaliana landsberg
atccatcataaaatacatccgaggcttcccttcccttcctccaaggtgcatctttataaagctccgacttttatataaacagttccattttttgcaagtaactcgaactgctctcatcaatttcgtaggaaccccagagataatctcctctaccaattcctttggaagatctgagatcgtcgtcattgtctcactttgcaactgttttttttttcccagtgatttcttgcggataaaggtagaggctgggaataaactcaataataatgagatacataaaccctaaatgatgctgggccactcttgggcctatgaatctatttgggccctctcgaaaatttgttttgtggacattttcttaattctatatgtttgctttgatatatactcgtcgttgataaccaagaattaagagtttaatcaatacatacacaccgttagtttttgcttatttttataagaaaaacaacaaattttactattatttcagatttcaatatactttataagacctgtacatatggctaatgacccaaaacatttgtcttgttgtatacgttattcaacaacaacatgcaccttcaatttatttaaactttttatatataaacggtcgagagaaacctctaaaaccgaagaaactaaacatgaataaacctttcttattcatagaacaatgtataagcgataaaagacacttagtaaacaagcaatttatatgtcaccaataaccaaagccataaactcgtcaaagttcaaatagccatcaccatcgacatccgccgctcggaccttttcggcagaagtctcctcggtgaatttctttccgaggctagtcatagtcacataggactcgctggctggtatcttcccgtcaccgtcaacatcacagaaaacaaacacttccttcaacattttctcaatgcacaaagtaaactcgtcggcgtttagctcgccgttaccgtccacgtcgatctcttcgaaaaactttacgatatcttcctgagtaaagtaaggagagaacgcaagagccacttcacgaaactcgtctaatgatagtttaccgtctttgttcttatcgaacttctcgaagacacgttttgcagacatagttgcttaagtgttttatatatgttatgtttgatactacttgttcctttgtttttttttttttttaaaaatagtgtgaatatttatagggtttggaaacaattaattataaaaattgatagatagtccaattaatgattaattaaaaataaagtatgcatagaaaaatttagtgattcaaaaaataaaggaggatatatatatatatatatatatatatgtatgtagattttatcctagaaattggattttttcaaatctgtatattattaatagttcttcacttacttgtatctcacagtagctcatattatgttaaaatggatttggctatctggaatagtattaacctctaaagttttgaaaaatttgtcaacaattagatgggattcagtttgacacatgtaagtaagtaagtaaggggaaaaaaaaacaagaaatgtaagtaaatcaagtttatttatagattaatattaaaaatgatagtttctaaagtaa

SEQ ID NO: 24136 - DNA, 3221 bp, Arabidopsis thaliana landsberg
taaactttttccatctcatttgcgtccaaaatataaatgtgacatgtttttattcccaaaccttttgtttcttgaaaaatcaagttccatacttactcaaatctcaaatcatttggtatttatatagatgattctaagccatttgaaaatttagcgatgtaggacactgaaaacacacttttttgcattaatagaaaaataaatgcatttgtttgttttggaaatcaccttaattgatttgaaaaaaattgttagtttctactctttgattaaaaatcagaatattatataacattatctcattaagattatttatttccatttaaacaattcaataaattatttttttggggttttgtgcaaaaaaatccatcaatctaatattttttgcaagttaaaaattgcaggtcaatcttatgaaatcaaaagtcacccgcaatacagctcatccgtgtagcaatgccgtaacacttgtttattatgtttaaaaacatatcaatggtcaaaattacaccgttttattctttaaaaacggcacggttatgctttaattgaaactgaatagggataatccaaaaaatttaggtttctatctccttggaaaatagacgatttagggttctatcatcttttttggcttctttaacatacaatttcctcttaattgggagatccttcttctattccatttcactcttaatctcattggaaaatgtctgatagctcaagctcaacctcacttgcggatccacatcacgattatgaaaatgcctatgatattcctaatcattgtttttgtggtggaagagcactgcctaaaccttcttggacaacgacgaacccaagaaggctttctgcacatgtgagaatgtcgatggaagtgtttgttgatttgggtgaatattttttttgaattgtgtttgaattttgttttgaaatttttgttcgaatttgttttgaaactgggtagattatggttgaattttggtaggatgggaaatgtcacatatggaagtggtgggatgaggctataatacatgaattaattaatagaccctaagttgaagagatgttatgcggatgggcgatgtggtctgaatggaatgaatttgtgggaggtgactacaagtgttagagtcatgctgccaaaggaggaagaccaccgtggaaaaacagaaagagagagaagggtgaagcaagggaagtgacaaaattgagtaaaagaggcaccaaaatagtaagttttttggcttttttaatgatatacctcgattttcaatgcttttagctatgatgtaggtatagtttttacagttcttttgttatttctagagtcttttatagttcttctcaggtcattacatatttgggatgcatttggggattatggagcattttggagcaaaatagacaacttatgctgtagaagcaatctgcacaccaaaaccgcgtagatatcgatcgacaccacccctggtgtggagcgacaccaatatctgacgggaattcaatctcgccacttattgaagttttgaagatttccaaattcgccgcaaaatgtttccttattttcaaagatgttcttgcatgtttttaggaacttatatgtagatttttaaggtcattgtttagacctaaccctgaataacttttgataacttttatttaccctttattttactttgttcttgagagccaaaaccgtgtggagcttcttctagagaagatctttctaaactctattctcttattgtttcttacattgatatctactttaatcatgttttgttctttgataatcatgtctgagtagttctcttgttgagtttagggattctcattagggatttagatgaattaggagatcgaaaaccatgttaggctaagatatttagaattcttcatcattgattgtttttaatgctagttctagagtaattaactagaacttgattttatgttaagaagtagtattcaaaatggcatctattaccagagctatcttaggtgagcctagtatttagatgcggattagcatcgatttaggtacttatgtgaacttatcaaacctgattataatagagttaggatcaatactattaagcatagtgagaaatgcggcaaaccatcggttactctgtaatagtaatttgaaatctagaattgttcgagaataatcctaatttactgctagatctactactaagatatttcttgagaatttctttaaacctaatgttttaatcatctgaatctacaatctcttttcttggtttcttgtcttttattttcttaatatcttgtgtttagattaattcgaaactgttagtctattgtgtgatcttgagagttttgtcgaattcgaccctaaagtactggagtcgatctcttaatttgagagagtagtcttaggattaatttgacatacaacaaatttattggacatggatgtagaaggtgatttgagacggaaaagacttgtctagcgtaggttcccacctttggaggataaccatccattgggagaagtggaagagttggttctccaaagatttgagtagatcaggttcgttggtgaatatatctggttcattggcgaattgaaactagaaaaggctgtttccgaggtccgcacccaccaggcgggaagaggttttccagtgatcagaaagaaaagggatgagggacaaaccttctcgattgcaggattggtgagtctttagatgattgtgagttcatgtcttcgaagaagcttggagttgtcgaaaccagggacttcaactctaggaggttgaaggggtgtggaaggaaatgattgagcttttcccttttccgcctaggagagacgatgcgccattgagcttaacataatgttacatttgattttttaaaatataaattttaaatagaaaaggattattttagaactccttttcacaaaagttcttaactagaaaaagtatattgtttgaataacatttgttttattatagatttacaaataatgaaatgtataacatacaaattttagattttatacataaatgatatactcagcacaatacaaataatgttattatcattttacactctcattgaatattaaaaatttaaatcttcttacattcaaatagcttgttaacgtttttaatatatccaatcatattgtttatgcataaaaaccggtctattaacacctctctcagcttttatctttagat

SEQ ID NO: 24137 - DNA, 3507 bp, Arabidopsis thaliana landsberg
tttcaaaccttgctagttgaaaagaaggaatggaagcttttggcttcgtgtagcaggagcgaacatttggtggagtcagcagaaaatgaaactttcttggttaagtggtacaggaagaaaagcaaagatttgaagagaatgatgacaacaaaggctgtaatggtgttcaagcttgacaaagaaggaaatgcttaaaaaaaaaaaaaaagaaaaaaaaaaagaaggaaatgctgtttacactcgagacattggagatctctgcattttcctctcaaaatctgaatctttctgtgtctctgcaactagtagctacaaatccgttccttccctagtccgtaaccacgtctatgtccaggcttacgacgagtatggattcatggatatcgccaagccttttgacgattcctgggtcattcctgcctcacctgatgcgaacccgaatcctttctatattccacctcaaactatagaatatactttatctacgatgcacccggatctatgaattttttactttgtcgtttcccgttactagttttcgtacccgtttcaatgctacttactcaggtagttctagtagcaatatatgtattattgttccaattaataaattcaactcgcttaaaaactaaaactcaactaaacatttttctataatacttttgtctaatcctagcaatacacactccatttactaatatatacattacctataaactgtgttgtatactaataccccatattcaccagaagacttatagagcatttcagtttggttccgtgtataccacatcatcagccgaatcaacaagtgtaaaaatccacgtgtgcatcagactgccacgtaatcaatcgtaaatagttgatttcaatagggatagtttcgtattttaattctttttaaggggcaaaaaaaacatttttccgtccattgaggaagcaaaggttttcgatattaataaaatccgagagagagagagaggaagaaggagagaatctgaagaagctgaaccagacgaaccataaaccgaggcgagagaggagagagcgagggaggtgatctcttaccacctcttcgtctccggcggcgagaaattcagtttcaatcggagaagagaggaaaaacaaagcgatacgcgagagaaaaagttgtgcaacgatgtcaaagaagaaatcggctgccatgacgcttaaggacttccatggcggctcaataccatctgatctccctctcccttccgctcctggagtgtaagtctctattgattcgttccctttagatcgccttcttagtttatatacttatcggagatcaatcgaatccttgttttgcttttgtgagattcgagtgatgttttctggtggacaaaatctcgtttatccctagggctattattagatctacatagaaattttcattttctgattgtttaggtctgttgttgtttatcctgatcgattttttcctttgtaggactccgaaggttattccggatcgacctgtttttgatagagcgccttgggggaattcaattggcaggccagatcagagagcaagaccgagttcgtctcatgctattagaaatctcgatgataaatcactgtttctgcctcacaatgtcaatatcggacgtaatttcagtgaagatgaacggaagcctctggatggtcactctgctcctcgtagagtggtcagtgatgatgtttttcggtttgcgaataaccgtttggagatgaaagcagactcggttttagctgggaggcatagtggttgggcagctggtcctttgactcattctgggactggtaatattgagaactcagtgtcaggaaatcactctaatatttggaatgggaggaaggaggtatcagttgctaacaatgagcctggacagtctccatggactaaacaaccagctgtttcgaatttggtccatacaagtgcgcttgaccaagtgtcttcaggaggatggcagtccaagcttttggttccttctcagatgggttttgatgttgttaagcattcagagatagataccagagtttataagactaatagccctgtgattagtcaaggggttaagccacatggaacacatgtagaacgggcactgattgctgaagatgggatccagcgtgggaaaaaactctcccgtgagtatgagaaaatccctggtccaacttatgtggatgctaagaaagcgaaaattgtagcaaacaccaacgataaacctcatccaaaatactctgacgttaagcctgctggacatttggtgcagccaaataactctaccaagctctggaaagacctaagctgaacctgctaactcggacaaagccacttgaaagtgtggagaaacctgtgaatgacgaaaaactggtatagttgttacaagtttctgaactgccactttagttttcaggtttcttttttcctcaactatgtttctgatacctcagttttgtatctgcaggaaaatagtgcttcagtccttatacaacgtgaaaatgcgacacagaaaagtttcaacaattcaaaatctggtttgtctacagatgagattcctaaccagccggctgagcggcccaagttgaatctgaagcctgtggcacagttgcttgagcagccagaagttaaaactgaaaaggacaggtaacaatgtggtacttacatttttttgtcccagctcggtaataattattttggagcttggggacataactatagttatatagaagaattgttcttaaaatttgtactggctggtgcagaagtgcggtttttggtggtgccagaccacgagagctggtgagtgcagtttgtttcatcttgttgtataactcactcttgttatgttgtccatttgtttatcatcatttgatttcctggacaggtgttgaaggagagaggcattgatgagcccgagcatcacaaattggatcaaccgacagataggtagaacgggtttctctacccactcacattctgtgtatactttctgcgatccaacacttacgattccattgagaccaactatctaatttaaagttctgtttttgttttttcttttatatcaaaaggatggtcctcaaaccgattgaaagagttccagagcatgcaagtcaaaggccagtgagttctccacgtgacatgagaacgaggaaattcgaccaaaaggatgggcgaaatgtaagcgacattgccagatccgaaactcagaggagaaactggcgtgaaaatgaaaacaagagcgcaagacagcaacagcagactcaggagaagacaagacatccatcaccagagacatggcgaaagccagttccccagaaactggattcaccaaatggaacagggattcgtcacggaaaagcagcttctgctcttgagctagctcaagcctattctcctttctctgaccctaaatctggaattggaagcagcaacagttttaacaaaagccgcaacaaccaaacgcagcagcaacccttctctcggttggtagggtc

SEQ ID NO: 24138 - DNA, 2988 bp, Arabidopsis thaliana landsberg
agagtttttcactgaacagttgtttgcacaaccttgggccgaggtattggctatgggcgactctttattctcagctcttgagcgcatggtggtgcgtcaaggtacagcttacaggcttacatggaatggggcccatcccccatgtatattaatccataacatatataataggtgcgaagagtgctacatattcttttgttccaaagaattctgtcggcgctgttagctattagaagcttctcatcctaatcggccgctaacatgatatgaacgggttttacttgttgtatgtctaatgttttagtatctatgaaacgtgtcaccagttgggtaactctaaaaaataacgtgatgtttgctgatattacatgttgtatgtatgttgtgttatgattgttatgtctaatgtctcgttgtttgatttatattagttaaatattaataaatagttccatttgcaacagtcaagatctaattgtatgctaacagaacatgtcaaaacaataaaaggcatcctacaaataaaaacttcatttacttatcatatatattaatattaattaagaatgcttgtttaagatcaaataatttaaaaatgtaattatgtataactagttgtacgctaacaaaacatgtcataaactttaaacaagcaatttcgattaaacatgattgtttacaagcatatatattaacaattgttaggtttagatatccagagagtacaaaatcgtaattatcgtagatgcatcagttttaatgcatatgtattttaaaaacacatgtcatcaaagtaaattctatgctacataaaacaatatcaggtagtaattatataaacatacagaataacgatacatcgaaacaacattaatatcgtaggaaagatctctgcaaaattacagaatgaggtgatagtaatacaagaaactaggtgcagtttgcgagcgtcccattagccaactcatacccagcaataaaatatttttttgcagcagtcaccacagcaacgtgggtcacttccttgcatgactgaatcacaccctcggcatacacttctattaaatgagcggcaaaaacacccgaatattgcacagcatcagcctgtgtaacttcattttccctgttaacaacaaaagctttcaatcgaagtttcttttccccacccttctttgcagcaaaacgaaataggtaaggtagcatttcagccaagggcaaaaggatattcttcaacttggtttcacgccataatcctatatagcagtctagaacagtaatgacctttgaattcacatcaagacatagccccacccaatgctttgagtcgacgagaaagggaaagtagaccctttcaaaaccagagggagtgcattctagtagatcatgatcaaacccgtacattcccttgtcagctgtcttcgagaatttggggtaatgcttgcataattcattgacaaatgtagaatcaatgaatgctacatcctgctgcttttctatgatattttttgctctccaatcaatctttatgcagttgatgaatatgtccataacttgagaaagagtaaatggatttacgctgtttaaggactcttcatgaatgaaaataaatagatgtatatttaaatctgctcatataatatatatatatatatatatataaatatatataataccaaactaggcacgactgccttcaattctacaatatcctggagttccgatgaagacaaggtccgatcagcaccaaaatcaatgggcctaaaacaccgggtagataggttataattatgttaattaaaatgaaattaaattatcatagcataacaaagatgaggaaagaataccaagtcagtgcatataaacgattaatcttagcaatgcggctaacatcatgaccaaatgtaaccgtcctactactcttggaggatgaaataagtgttacaggtttgagctgagaaagatggaagattagttagaaataatctgacatatatactaaattcacgagtttttattaaaaagcactttcatgttttatataatgcatgatattttgtcctcataagcaaatgttaaacatgcactttataattaacacatgctgttcaagaatataaaatcttatccaacttaaatcaaccgtgttttaaaaaaaactcatgaccaactacgacgagaactaatataaactaatgtatgttatatagttataaagcatgtcccttagttctataacaaaaccacgtgaactttagaaatatggaacgttgtggaaataaaatccgctattttaaaaacaaaaccataaccagataaactgagttctaacaatgatgcccctaagaacctatgaaattcatatctactaagactctaactcattcatagcaaccatgtcatcgcgggccactacttcagttggcagggagcctgcggccgaagaattttgtatcaccgagctggataaattggcctacatcgtggggggaacattaaaatgtggtacattatagcgcatctaaggttttttatgtaatccagctcttacctcatcatttaaagcaggagtatctgctattctatgtgcatctctgtcaaaaacaatgcttccaccctctggtttggataaattagcctacatcaaacccacaacataaatatgtggtaagatgacatcatacaaactaacaatacagagactcagatctaaccgcatcacttagagtaggtggggcagtgattgtttcttagtctttccccgacacaatctcatcatcttgtgggtgtggggtggatttatcattgatattctcatctgcctgaaactggaaaaccaaaaaacaaacatcaaacccacaacataaatatgtggtaagatgacatcatacaaactaacaatacagagtatcaggtctaaccgcatcacttaaagtaggtggggcagggattgtttcttcgtcttttcccgacacaatctcatcatctggt

SEQ ID NO: 24139 - DNA, 3981 bp, Arabidopsis thaliana landsberg
gctacatccaatttcacccttgtcaacatagtcatcagtttttcttcttctataaataggataaccatcactaccaaccttggttatatcttgctgatttttgggataaagtttagaacattctccatcaaccatacatggagaattgacatttgctgaaccacatgaaccgtgaatcatggagtttttgataacttcgtatagctctggttctttttctttgtcaggaatctcagcagaaataagtttatcaatgtcgtctgctgttggtaaattgctcttagcatgcatgaataagagaatgtgtgcatgaggcaatcctcttttctgaaactcaacagtatacatcgctgcaagtacaaacaaaacagaatgagtactttcaaattagatgattttgataaatagtaatgtagtatactaaaccatacttacatgcaacagtcttcccaagcatctttttcacagttaaatcattcattagagaatccagtttgattttaaaaatacgggctataatgtcaggtctgtcttcaggatttaaacctcttttatcgcagtatcttgttatctctggccactttgggttacaggtaaaagtgatgaaaagatctggaaaaccataatgtttacagatagccattgcatcatagtagctttgaaccatatatctaggaccaccagtgaatgaagctggaatcagtagttggttaccttcttcttccatagtggttgctccagctgcaactgcttcttttacagatgtgtagttttcacatcgaagtttcgactgattaaacttgatatagtttaatctgttagattcaatagtggtataagcatcacagaggaactgctggaacaacctctttgaacgtaatagagtttggcactcaacttccctctcttgaatacggaatgcaaaccattgtctcatgctgatacacttcttattcttcttcttactttttgatttaaaacacttctcaattccaggtctgaagccatcttcaccataacaaaattttagtggatattgcagagccaaataggaaatgtgaatctggttaatcctctttaggtgcccatttgattttttttctataacaatgtccctatcaggcatgccatgtcgaaaatctgcagggatcaaggctgcaacctctgatgtggtatgcatactatatgtcctgccatcaacaccttgacgatctgcgataatacgcatgtgaaatggctcttcatcatttgtttgaatcctctctctggctgtcctaaattttctaacataagggttgcaacggttaagcatctttataatgacttcaataaatttcgatgaggtcataaaatgaaatagtagaagtagaagttgtttgatgctaaagcaagttttctttgaaaacgatgtaagtcttgatctttcaaatgaacctgagataaatttgagttttagtaaataactttgtgagactttaatgtcttgtagaagttgataaaatataaaagatagatcacttaaggttgaaaatgatattaccatgtgaatatggaatagattttgcagaccctctaggctgagtagaagtagttgtttgattattatcatcacaattgactggcaaattagtgatatctctgaatactctgttgaaagttgatctaagaggaatagaaccattagtaaaagcaccaatagcattagatccattaaactgtgtaatttttctttgagaaattgttctgttaactaaacgtggtctcttctctgatggtggaggtaaatttagatctaaaagagggctgtttttctttttcccatttcgtaactttagactgatatgagtagtaagtgatttaagatgatgcatcaagattttatagaactgttaaaattaaatggaatagagaccataccaagttttagaagatctgtttgttagttaatataatattttctaggtgagcaaaatatctaaacttgctatgtttttgcattttttcatttaatggccttgaatgacaatatataaaattagcctcaatctatgtacccaattagccctagatcatcgtgaatgataatattcagtttccttttgtagagcaccatttatagtggactgtatgatagaaagtcggcgattatgttattatttctcagccactaaaggtatcagatcactacttaacttagctgccatatcaaataaattaaaacgcaaatgcatttgagaagttcagatttctcaaatgacagagaaacacaaataaatagttatagcatagagatagatatgtttgaatcctaaaaacatagcataaataaaaaacactactcaattcaaaaggtcacaaacatgaaaatagaaataagtttttgggacgatagaataattcaatgtaagtcttcaaactccattctcataagcttctcaaacttgttccattgtcacgtcctcatcatcatcatctttgaaactccggctggtattaacaaaatatgagggcaacagaaacttagtcattgttgttacttgtaaactagataaatgttaaaatctttaaagacttacatgtaacttgcaagatcaaagtaagggaatcttggatctatgtctagacgtgaacaaccaaattcactcgtcaagacattttcacctaacatacaaataacaatataaattctaaagatcacagaacacaagtgaaggtaaactacaattctctagagatgttagaaaactaaccttcaagctcagagattctccagaagcgcacaacacatacaattggctcatagttgtatgttggtctacagatacgtctagaccatttgttaacaaaccattcacagcatttcccaacagcaatgcacttaaattttttgttccctataccatttcttaacaaaccattcacagcatttcccaacagcacggcacttgtctttttgttccctataccattcgacattacttatgctacataatcaattcatctatgaaaaatataaagactgcaacttaacttattctaaatctataaacttaaaaacttaccaattatacataagttcaaattcaacatatctggactcataatcgatctcatcctggcgacaaacatagggaaacctctgaatagaagacacacttgacaccacaccaatagcatctatgcatcatagaaaattgcaatctattaatacagtgtagacaatcaaatacataaagcaaaaaattttacttactagtaacgtccgagacattctctgtagaagaatactcaaggtcaatggggaaaatccagtttgtgaaatcacatttctttatttctgacataggccaaacggatgtatcccacttaaacttgatatagaaatgagggttccaagtatacttgactgtgttggtggaggaaatgacatggaaatgagagatgtgataccagaaaccctctttgagaacatgcctaaaactgtacagatagttgcattttgaaacggtagctgtgattctatgatgctgctaattagcccaagaaaaaaccatagcatataaaaaactggcagaagatttcataggcacataaaaaaagaaccaatgttaaagaactctaaatcatatgatacaaaccttttcatcaaccaaaatcatggttgtaacatcatcataaaggggtggaggatgatcccagatacacaagactttcacgtaaacactccactgaatcgaattcacattcaaatctatgattttgtgaataggcgccataagttaccctctgattttttttttttggcttcttcgcttggctaagtttttagggttaataaaataacgatggttaagtgtatttatatatataaggtgagtaatatctcaaaagatgcaatgaatgacagtttttttaataaaaggaaatacaaattgtttcaaggttaaaactgatcattaaattatatatttaaaataaatt

SEQ ID NO: 24140 - DNA, 3980 bp, Arabidopsis thaliana landsberg
  unsure (1)..(3980): unsure at all n locations
acagtgcactctcctacgaccagctggaatcttaacacttttttttttaccatcaatgtgttagctacttctaggtgcaggtggttgttttgatgagattgatagctgaggagaacttgaagcagctagaagcattgatatagttgattcaccaatatgtgatggtttactgacactagcaattgcattgattttttttcttttttgaaagtcgatgagattatccttaagctgtatttgatgcttttttagaagttttatttggatttgtattacatgctgatcttggaggcctacgaactggtatctatagaggaaatgacaccaagataagagactgtatatgtaaaaatgatctaaataggagatatcacaatatattacctcttgaggattcttaggaagtcgatctctttttttcttacgcagaattgggttcttcgtatttttgcatttggttttgttatagcttgcttcacaataatttgaacaatgtatgattctcccatgtcttattgaatttccagagttggtcttagattcattaggctctttcttcctttttgtaaccctttggtcttcttggtggcatgcgaaaattacgcactcgaatgggtattttccctgtttttccccaaagtttcacttcattaacaggataaatgattcttgtatatgttcccgtccaaatttttgagtaataatattgagataacatacttgttaacatcgtcctcattgtcatttatgatagttaaagcatgcatacaaggaataccttaaacaatatgaaaagtgagacaaatcatatttcgaaaacaagaaaaacatgaatataatcacttacctgtgagatctcaccgacgacatgcatattgatggtttgagaagctcacagtatacccactctcaaactcaacaacctcatacaaagtggcagtactacataaagtagcacaatacctctcatcaaccctcgacttctccaacacttttaagtgttataagtgagaactggacatccgatgccaaacactgttttaacctccgagagatcctctccattatttgccttcttagagtttccaatagatnnnnnnnnnnnnnnnnnnnnnnnnnnntgattgtcttgttaaaactttctaaaatatctttgtgaacatccatgcattgagaacccagattgaagtatgcacgtgaccatgtcttaggttgtgtattcaacaaggcctcatatgctttaggatcatagtttagtaataacttcatctttataatcaaattccctcgtattgtaactataagcaacagaccagaacatgactttgtactctgaagatgcataattctttttccaatttgaatatatatgtctcgaacaaattctattatccacaattggaagctcggatgcaattacattcacaattccctacataaacatttgttaaaaacagatgatggttattcaattataatctaatagattttttcattaaaaacaaaactttttgcttatttgagatgatggttaggttatctcccaattgcaatccaaggtcaaccttcagctttctcgtaaaccacgcctacgtatctttatcttcacatctcacaatcactacaagaaaacaggtcatttgcaaggtaggtagtcctcctcgcggatgcgtcgtaaatatcactttgcatgtactttgcgacgcatttgaattcgtcgcgaatctctcatcgcaaaacaaaatttgtcgcaattgtttcgtcactgttgcgaagaaacaggtccctcgtagagcctacggaatataaacgtcgcaaagtacatgcaatgttgcgatgaatatgcaagtaagtgtgtcgtgtagagcgaggaatttgccagggatagttcaagaatccaatttaaacccagtttcacaaattggactttttgtttgaatttaacattaaaagtaaatcggaaaaaaaacagaaatcaaaagtaaatatgaattctgattaaaactgaaattgtttgatattctaagaaagaaaagcatcactacaagaatatagagcattaatagcaatagaaaatagcaattaacatagttttgctatgattaacatttcctttaatatgttatagcgtttggtgaaaatgaaacgctataatttatgtgttggaaaaaaaaactgacgtggatcaatgtttttggtttcgattaattatttgatagcacataccaaatactaatcgctatctaaataaaaaataaaatattaaattccaaaaactatttaacatttgacctaaagttatttatttcttttctctcttctttggtcctgccgtctccttcttcatcttcttctaactcttcctctctctctcataactcataagattagatctgtcttctgatgctttctccggtgagtttttggcaaatttatcgacgaaatcaactccacctcatcatcctctcgtacaactgtttctccggtgagatctcgacgacattgggcaacgacaagttagttttcgggacccttcgcgtctcctccgtcacctttttctagatctgtttccatctccaagccggtgagtctcactctatttctccgttgctatttcctagatctgacgccatctccaaaccggtcagtctcactctattacttctccatatttgcttctctcaattccaattttatccacttcttctccataattgtttttgtgtgttcttgatttttattttattaattgtttcgtgatagtttttgaattttgatttaatgtatgtttcagccatgaaataggtttgattttagaatcatctaagatattttggttgaaattgcagtttgtgctagtcatgttcttaaggtacctttatttctaagaatttttcttaacggaaaacatgtatctcaaattcatgggtggagtcgctacttggcttgttatttggctgaaagtgataaacattttactttgtctgtgtaggttttctatcacttgaagaaatcaatttcgtgcacgtctcatgtggatgttcctacgaaaacaagctaagtataagaggactgaagtcgaaaaaacaagctggagagaccaatgagattgggtgataaggtgaagagtcgtaagtgaacagagaagaagcttaagaagaagaggatgaaatgttcgaagtttacaagtcatggtcaagatgtaatcgtgtaaatttgtaagagttagtaggacatttaaagtttttgtacaaaaaaaaattcatgtataaaatagtagtactattattgatttttgtctttgtaaattaaaattggagttcttaaaatacaaaatacaaaatataatattcaaaattcaaaattcaaaattagattggtaataaaaatattaataacagaaactaaatgctattgtaaaatatatgatagaatcaaagaaaatgctatacttcataaagaagctatagcaataccaataaccgctatgttatgacttcgacttataatgacggacgatgatagagcgcttgttaaaacgctataatatcgttagatagcgttattcggacgctaagaaaaatcaatattcttgtagtgaatttttgggtcatcatatgtgacggtttgagactatagtttagtcttgatgagtgacataattagaaagttaggaaagtcacaaaacttgacggttttgcatcaataattttagttggtatatgcgaccaattggtgacaaattgtttagtttttatttgtgatagtttaagacaaaaaaaagggtcacaacgaatgataaaatatgacgattttgggacagttttttagttggtagttgtgacgaataagagacatgttttaagtaactaaatgcgacggtttgagactatagtttcgtcgtaggtagtgacaaaacgaatacgtagtatcggtcactcattaagacgttntacagaaaaaagttttactaagtaatt

SEQ ID NO: 24141 - DNA, 1453 bp, Arabidopsis thaliana landsberg
ataaacggtccctaacataaaccttaacaatctcgatttcacaaaacataatctataataatcgagtatagaaacacatacctcattctcgcgaacacacttctcgattactcgtcacgaacactctttacgaacacacagacgttcttactcgtcgattcaggctatcgccattgaaaacccccaaatcgatttgggaatttcgagaaccctaaccctaattttgtttctcaatttgggggctcgataatgaagttttgttaagggtaaatatgagttttaacccacattgattagtcacgtgttaatataattaacagtgtttacgacttcgtcaacgtccgttaacgacgagttaacgctgggaatgaaaacgggcaaataaatttgttcaggcatctttatacaactcaaatataatctgggttttattctgggtacgaaaaaagttggggcaagtttctggtagattttaaatagttggggtttttttcaggaattttcccatttttcctctagctggattttttttctttttatataaactaaatacaagtaattattggattagggtcgctaagaaaaactgctggagagcaatcatagagaattagaattgataaatctcaaggtgacgtaaactggttttataattcaaagtttattttaggaatctgataatcttacgtattctgcaaatctgttttcaattttgtagtactaacgttttttttttcctagtttaggatcaatcatggattccatggattcagagacacaaccacctgattattcaccatctttggaaaatcacaacatgtctccttcaaatggaaagtacaagttatagataataattattttgggttggccgaattttccaccctctactatttaaaatctcatcgtttataaaaatctatagaaacgaatagatggtaaaagttacctcaattacatcttgcctttttttagtgtgaggattaaccaacctccaatcgctgtagttgatgggtagcaaattcagtctttgtattctaagaatatttcagatcaaatgaagctactacaaagattttattgaaaataattgggttggctaaattttccaccctctactatttacaatctcaacatttccccctgaacttttggctccttgaaatatcaccatcaactaatatgttctccaaatacatacacaaacttttgaattcatgtgaaatactacgcctccaattgaaccaatgattaaaccgagattaaccataaatccgcgtttactgtaccgcgattgcgattaatccgagtaatcacccatgacccgactggaaaacgatgtcgttttctcatttttataactcatcaaaacttaagaaaacgacgtcgttttctcgtgttggttttctaaacagatcgaattcgactaagtaattgtcactgctccaaaaga

SEQ ID NO: 24142 - DNA, 1540 bp, Arabidopsis thaliana landsberg
aaaaataaaataaagaatattaactcaagaaaagatgcttacatccgatatttcgtacggacaactgaaaaaaagttttccggttgtaacaggatcaagagaagtggcaacgacaaccttagcattgcaatcacactcgatcggaacgcccttatcgcgcttcctgttttcgccgtacctcgttagcatccttatttccatacggtcgagctcctacataaacacaaacatgatgtactcgacgttagatgggcaacgatttgtactattcagatgtggagataaatacctcatcaacactagattcgccttggaaaagagacctctgagccatcatcttcactgcaattagtatgttactaaagcacaggttctatataatcctgtctgccacaaaatgtactaatcaaacgacggcgtatttgtattggctgaataaatttacaagtggctgacttgtcatatcattgcggctgggttttcactgatttgtggctgacttatgtcgtcatacagtatgtcactacttagcgtgttgctttaggttgggtctatcgaaattatttattatatcattatcgagataacaaacagcaactttatggggaaccgccagtaatgatttggtccacatgcacaggtacacacgcccgcagttaatattcaaaataatgcaaacgagttcgaaattattccttaactaaaccctccaataatcaaataacgtaacggctgagttattcattaagatttcgtgttttggccgagttatgagataccatatgttattatgatatatcaaaccagccaccaaattgttggttatattattagcttgaagatgtgcaatttgaaaacagaaaataacttttattttcagcaagtgtcgattgacaaaacatggtctgtcaaaacctctaggaagtatgttgttggatatagtatgatgttggacaaagtaggatgttggataaagtttgtaggatatgacctagtttcacggttcctctatttggaatgtggttatgatatgttaattacttgattttcacaactgttggctcaagaaaagcactttcagggtttggccgagttataacaaagtgatggctgagttattcctctattgtggttgagttatgttagaagatttcgattgttcgaactacataagagaaaaccacatgttattatgagatttgagtacgagcattactgttggttcgaccgatgtcatcaaatcagtcagaatattgctatgttttgctcttgctgtgtgtatcgagaaacaattatgatgttattctcaagatttaagcaaaagtgagttaatagggaaacgcgaataatgattggtctcatagatgcacgaacacgtcaatattcaagatgctgcaaacgagttcgaaattatccttagctaaacctccaataatctgatgctcagtgttgacgtggaatcaaataacgttcggctgagtagtcattacgattcgtgattgcccgagttatgagaaccatatgttatatgagatacaac

SEQ ID NO: 24143 - DNA, 2383 bp, Arabidopsis thaliana landsberg
attaaaatattaaaaaactcttaatttacagcgatcagaccatacgcataaatctctgggaaaacattgcggcaacattcatagaatagtggaaccaaagtgaagtcaaaccaatagtcctccttatcactactgtcaactcgaaaacaatcggaggtataaatcacttgtttaccattgtcccacaatgcttcgtaacattaacctatactataattctaaaatataatctgcataatctcttcagctgttgtgtctctcagcaacacatcatccacacgtctattctttgacaccgacgtcgatgaaaccaaacagttccttacttggtatgtatctctttctaatataagaatctcctcaaacaactatattccacatgcctaagtcactaccaccaccaggttaggagatagtggtaaaaaacgccaactatcgcaagctcctcctctaatgtaacaaaactggagacagtcacaatcaatgaaatataccagtttctacataatgaaaaccacatgttatattcaaagtatttctctctttatttataaatcacattaaccaccatttcttactgctttaagaaacctaacattaccaatgtaggaagttagcttcacttgctttgctacagttgtggacatacaaccacaatatggatggtactacatctaatgcaacatttgcaacaataaacttggaacaggagacacatcaatgtattacaaccattgcaaagaatacaacaacatttgccttatcaggtttgacaactatgaacgacctaaatgaggttatattcatacaaaatgatatagctcaaattgccttaagcctactccctcaaataagagatcgtcgttagcacttaaaggtctaattccacaaagctctcggatcacacaatagactaaggttatcaaattaagctaaacaaaataataaagaaaataaaagaaagaaaagcaagcaatagcagatgatggggatgtaaaataaaataagaaaacgtcagggttagggtattctcaggaaacaaacggttagtagatctagtgatagctaggttgttatcaaaccgttcttaaactcaaactctaatctaagaataaccggtggggttccgtgaaactcactatgcctagagcgaagattcccgggggcgttccgtgaaactctattcctaaacatgcatgctaaacgagttagataagttcaccttagtagatatgatgattcttattacacacctataaattaggcttatcaaataatagttctgataacagatacatatgacgggtatatatattatctaagatcaagttctagttaattactctagaactagcattaagatcaactaaagatgaagaatcctatagataacctagcaaattggtaatctactaaatcatttgattctctagtgagaaaccctaaccctaacaagcagactactcagacatggagattgaaacaaacaacatgattgactaagaaagcataaacaattcaatagagaaaagagttagaaaagatctcttcactgttattgaaaatctaatgaaactctgaaaacaaggggtgaataccttgatgtctcgaaaacttgatagaaattccttatgtctaaacaatgatctttaaaactatatatttgaactacaaaacgtgcatggactaataatgaaaatatggaacttaaaagcgttacgtcttctggggcaaatttctaattcttcaaacttaaaagcgtgatggacttctctgggccacaactggtgtcgatcgactctctcgactggatctaaaagtgaattcgtcctttagcttattttcttcagcttttgctccaaaatgtctcctcatcttcattgttgtccctctccatagaacacctaaaaagacactaaaaagattcgagaaataacataaaacatagataaaatcagtaaaaatagggatatatcaactcccccacacttagcttatgcttgccctcaagcaaaacataaaagccgaacccgtggaagaggttttgaaaataaaggaactcccaacattctctagcatgttgccatgatcatccaaactaagtccatatgcctaacaagtctaatcaaatcctaaccaacatgtacttctctgcaagcttacacaacattctagatttcatacctaagttccacaactatatccaccaggctttcatcgttgggtctcatcaaacaagctaacattcaagatccttctagactcattcctgtactataccatgataaatcgaccatttttttatatatttttttttctttggggttctttctctccccgagacttattctttttagagagtaaacaaaggagaactcgcata

SEQ ID NO: 24144 - DNA, 1532 bp, Arabidopsis thaliana landsberg
tgcaacagatattcttgcttatgtaaacttgatggattgctttttgtgcaggctgatatggggcatggacatcctgtcactaagcagccctcacgtcctgcaagtcgtaatacctttgatgaaaatgttgactctaagaataatctgtctccatctgcatcgcaaggcattggtgcaccatctccatacagctatgcagctgttctgggttcgtctttgtctagaaatggaactccagatccacaggccattgctagggtgcctagtccctgtcttactcccattgggagtgggagagtgagttcaaatgataagaggaacacaagtaatcaaagcccgttcaacggtgggctcaacgagtcttctgatcttgtcaatgctttatctggcatgaacctgtctggcagtggcgggttagatgaacgtggtcaggctgagcaagatgtggaaaaggtcaggaactatatgtttggactgcaaggtgggcataacgaagtcaatcaacatgggttcccaaacaaatctgatcaagcccagaaggcaactggcttgttgaggaattcacaattgagaggggcacaaggatctacctataatgatggaggtggagtagctactcagtaccagcatcttgatagcccaaactattgtctcaacaattatggattaaatccagctgtagcttctatgatggctaaccaacttggaactaataactattctccagtgtatgaaaatgcttctgcagcatctgctatgggattttctggaatggattccagacttcatggtggaggttatgtatcatctggtcaaaacctctctgaatcacgtaatcttggcagattcagtaatcgaatgatgggaggaggtactggtcttcagtcacatatggcagatccaatgtatcatcagtatgctgattcgcttgatcttctcaatgatccttccatggacatgaactttatgggtaattcatacatgaatatgcttgaactccagagggcttatcttggagcacagaaatcacagtacggtgtcccttacaaatccgggagccctaacagccacaccgattatgggagtccaacatttgggtcatatcctggcagcccattggctcatcatcttctgcctaattctcatgtgtcaccctgtagccctatgagacgaggtgaagttaatatgcgatatccctctgcaacaagaaactacgcaggaggggtaatgggttcctggcacatggatgctagtttggatgaaggctttggatcttcaatgcttgaagagttcaaaagtaacaaaacaagaggattcgaacttgctgaaatagctggccatgttgtagagttcaggtattcccttgaatgtcttttatcttttttcttgtgtacaatttgtcccaagctaacgtgtacttggggattttcatgaccagttcggatcagtatggaagccggtttattcagcagaaactcgagacagcaacaagtgatgagaaaaacatggtttatgaggagatcatgccacac

SEQ ID NO: 24145 - DNA, 2133 bp, Arabidopsis thaliana landsberg
gtgtttcattgtttgatcatgggacagtggatctttgggtggttcgaatagataagccaggggttgggattgtttctaaagccctaatggttgatcattgtgttcaattcctatccaaggttttgtggaagtaagtttcttttttatttattctgccttaagggaaggtattatttccttcagcttttagagctgcaacttttactcttttctttgcagtgagaaggatgcacagatgtgtctttatcatgtttcctggcagtctgatttcggattttgttgtgatctcgatgaaagaagtgctgttgagttagctggtttgtgagtttagctaatgaaaaaattagacaacaatgtttgtcctgaattaagctaacagaataagagatggtgtttaaattaatgcaggcgtacctggtgttcttgctgttgttcctgataacagtttcgagtcactaaacaaagactatgaaggtctgtcttgaatactgatcttatggattgaaaataatgttctacgatattgtttagaatctttgtgtagctgattttgatgaatatcagtgtataatctcacattgtagtaactttggctctctttctttttcacaaaaggcgatagtacgcaagattcaagagatcaagatgattcagagtctcctcccgtaaagacaaagaagctgtttataactggtatgcttaatacttgagattgtatgcattcttttggtcacatagcataatctgttatagtgacacaatatccatagcattttaaggaaaaatcatgcttcccccaattcattgcctgcatcttaatttacgaactaagctcattcagaagataacatttactaatagatcatgtatcttggtttaggactgtctttctacacatctgagaagacattacgtgcagcatttgaagggtttggtgaactagtggaaggtactcatgatttgctatcctatccaagggtttaaaaaatttatcattaggaaaagatagataatcacagccctagaacattcctctgcagtcaaaataattatggacaaaatatcaaagagatcaaagggctatgcctttctagagtacacgacagaggaagccgcaggcactgcactaaaagagatgaatggaaaggtaaatctagattttcgagatcttaaagcaaaatctttgttatcaactcaaagtaaaatctaaacatgaccgttgattcacagatgttatggtgtttcttttttctctgtgcagattatcaacgggtggatgatagtagtagatgtagccaagaccaaaccgttcaggcaaaacagaagtcaaccaagtttcgggctctagaatctgagtgttagggtgatacaaccatggggatttaagatgcttcaggcgaagaaagataaggcaagtagtatcatttttcatactagatcaaatataaatttcacattatgtgacagctctgcaaaaaaaattcacatgtacatatctatatttgagtttacaagatttcggccgaatgaaaggcctactgatacaagtattatatagttgtcaccttggggcttgggcgattaacacgcttaacgagtaaataaactactactatttattttttcagtgactgtcatatattacttcagatctacttattatatcacgttttttaagagaaaacgtattatataaaggtgataaacaaagtatggagtctttataaaagattactgcctcttcttcactatgagcaacaatggcagcaatgatcaccgttgactttcaaaacagcttcgcattcatcctcttttgtctcttctctctcctttgttactctctcttcttcaggaaagcaaagggctcacgagctggtcgtgatcttcctccgagccctccttcttttccggtaattggtcatcttcaccttcttctctctgttttagttcacaagtcttttcaaaaaatctcctccaagtatggacctcttctccttctccgcatcttccacgttcccatagtcctcacctcctcggcctcagtggcttacgagatcctccccccccaagatgtgaacgtctcctctaaaggaaaccctccagtgaggagtctctctggttcggatgtccagc

SEQ ID NO: 24146 - DNA, 1562 bp, Arabidopsis thaliana landsberg
ccaactccaaaccatgtagctcattttctggggggtcgagcccaaagtatatagtcaacctatataacatgaggaaatcgcaaattagtatatattatactgaaaaagtcttgatatcttttcaacaacatgtcttatagttggtactatattaggttttattaactacctgggaacgagcgacttggagaagatcagaagcttgaagagcaccatcgggacagtcgatggaggcttttgcggcttcaagatatttagaatatgctgagaggacgaaagtagcggctgtggtgtattggaggttgttccacggcaagaagtagagcaaaccgccaggggttttcttaacgttgttgtcacctttttgagcacagttgcagataaactgctccgccatactcttgtactctacgatctgttcactgctctctactttcccttcaagtgctagctgcatttgcaaatttttgtattatgtttgtttcttgtcaaataagtcagtgatatgtttctttagtgaaatagtcataaactaccttggcgaccaagacttgtgcacccacgaacttatcatcccaggcaaaaacagtccttggacctcctgtttctgcttctgttaggtaatcaagataaatctggtcgttggtggcacggtggagccaagctgcagcccacagcaattcatcttcatatccactgctcgcgtagaagccacccgcgttaggaatggagttttggtaaagtccacggtgagccttagcgaatgcaaataaatcttttgcatgaccaatgagtatattggcataggctttatcagatggtgcaaaggcgatagacgctgccgccattgctgcagctgtctcacctgctaggtcagaacctggatgttgagcatcgattttggtatgaagtacgcggagtggtcatatcctcaggtctcatccagcatttgtggtccgagtttccttcacccacttgttcgtacaggacattaggctgaggatgggctttaatgagataatcggcggcccacttgagagccctgagagcgtttcccttctcgtggtgggccctaagctgtgatgccatctctatattgctccaagctagcattgttgtcgtgaacgccaacggaaatccaaacttcatgttgtctcccgcatcatagtaccctccggtgagatcaatctatacatttttacaaatagcaaatattttagttgaacttgataaacatacattacaaaaaaaaaaaaaaaaaggatttgagtgttaaattacatgagcatcagaaccgtctctaagagcagaatctcctctccaagtaactctttggttcggaggcaattttccagaacgttgagcttcgaaatacaaaagactgtttttgagagcttctgcataatttgtagagacagcttcacgagccatcgacattactattaacacaatgcaaatacttgtccataagcattgtgaagatctatttttcaattgagacattgtttttcaattaatctttagacaatctcaagaccaattgtacaattgattttactttt

SEQ ID NO: 24147 - DNA, 1247 bp, Arabidopsis thaliana landsberg
tgtctcattatcaggctggcctttcaggcttgtgtttatgcaatttggagagaaagaaaccaacgtctccactccggcgtctctcgttctactgagtctatcttgaaggacatccagctcaccattcgcgctcgtctggatcctttgtctcgcagcacggctcatcaacctaacgctttgtccttgctaggaacttggttttcgttgttctagttcagggctgtttgttttggttttctagtgttgcaggtttcatctccccttttgtttgttgcaggaaaaggtttgttttctcctgtgttgggcatgtggcctttatttgggcttttgccattgtatgttttaaagttgaatggaaatttatgaattgaaaaaaaaaaaaaaaaatggtggaagatacccaaaaagttggtagctatagtgaagcagaaataacagtctattaagcacccgaaattgaagttaaattggataactttaataaaaggctgatatctatagtttcgggattgtttttttgagtttggcgctattttggatctgacatggagatggctcgtaccttacataaataccaccaccaccaccccccctttcaatagctattgttgttttagatatattgatacatcaatgttttgttgtctaagtaaggtatttgcattttggatttcgattcaggacattctggttaggcacggttttgattcatttcataatcgacttgacacaaattgcgtggatggtgccgattttgtgacctaaatactaacatcaaattttgtgacctaaaaaaagtcttatatattttgaaagttgcattatcgtcattccatttcaaagaaataaaaaagaaagaaaataaaataatcaaacccttgaaagaacttactcatttcttgcatattacatatgagtagcaatttgtattgcctttccactaaggatctacctcttttaggcaactgaaaatgttgaatttgatggatcataatcttcattgtacctagggtggtcaactcattttaaagtcagttctgatgtgatgtgtaatctttgtttggttgggcttttataactcgagcaacgagttcatattgatacggtgcagattttacatagattgttactataaccctaaatccaataaggtgtatgactcaacatgttcagcatccttaatgttctattatttgaaatggggacgagtatgcaataattgacggaaagaataatgagctttatgt

SEQ ID NO: 24148 - DNA, 4619 bp, Arabidopsis thaliana landsberg
gttcgagcttgagcaataaatgaagatcgagcctctcatcgtatatgtcatttaccaggtacacctttttagatagaacctttcatcaaataatggatctctaaatctggtttgaaatgtgaaaaaaaaaaaaaaacaggacgagagagcaaagcagtggagagttcaagcagtggcggtcgcaccagacaggtttgagaaccgaaagcctctccctgagaaatggagaggccttagggatgaggaactctcgaaagctgctgagattcccggttgtgtctttgtccacatgagtggctttatcggcggaaaccaatcctatgacggcgctctatccatggctcaaaccgcactcactctctgagcatcaaaagaatcatttacccattactcatagagagagaccgagagttttgatattgccattatcttctgcaatttctgtttcattgagtcttctcgtgacaaaaaatttaagaactagatttgtagtctcaagctgattagatcatattatatgtttgcttcctcttgtccgttttcacctttggagtagatttgtagtagagagcgtaaacaatattagctgaaaaccacaacaataatgttcagtgcttatctacactataccagaataacacatagcaaaattaacttattaaactctttagctcactgtttttatgaattaagtaatttagagatcaagtaacaatcatttgaatgtttgttaaaactccattactacatttggagtcttgagatgattcaaaatattatgtcaaccttcttcatgactaagcttctattttcaaaagtaagattaaatatttacttatatttttggtgtttccatttttttttttttttttttttggggtgatatacatgttatttcaactctaaaaatgtatcaaaccttattactaatataaggttttacggtatttcgacatatataaaaaataagaacatcagtatataattataaattgattttcactaaacagacatattgtcgaacatatggagggcaatagacgatctatatgatcattgcctccaaatcggagatttttcacttttattcttccattcttctctcttatttcaatcgagattgagtcgaaacccgaaacccacttatctcttcttctctaaagcatcatctatggagatctccggcgaagaagacaaagaagaagctgttactctccccaaagaagtaagcaaaatctcaatctcagatggtgacaagttcgtataccaaatcctcaatggtcctaacgaacaatgttttgagaatttccgtatggataagcctgtcttcaataaactctgtgatctccttcagaccagaggcttattgcgtcacactaatcgaatcaagattgaggcacagttagcaatctttttgttcatcattggtcataatcttcgtactcgagctgttcaagaactcttctgttactctggtgaaaccattagccgccatttcaacaatgttttgaatgcagttattgcaatctctaaggatttttttcaacccaattcaaattctgatactttggagaatgatgattcgtatttcaaagactgtgttggtgttgttgatagcttccacattccggttatggttggggtcgatgagcaaggtccgtttcgaaacggcaatggactgcttactcagaatgttcttgcagcttcgtcgttcgatcttagattcaattatgtgttaggtggtggggaaggttcagcttctgatcaacaagttctcaatgcagctttgactcggcgtaacaagttacaagtccctcaaggaaaatactacattgttgacaataagtatccgaatcttgctggctttatcgcgccgtatcacggtgtttcaaccaattcaagagaagaagcaaaggaaatgttcaatgagcgacacaagttgttgcatcgagctatccaccggacttttggggctttgaaagaacggtttccgattctactatcagctcctccgtatcctctacaaacgcaagtgaaactggtgattgcggcttgtgcattgcacaactatgtccgcttggagaaaccagatgatttagtgtttaggatgtttgaagaagacactctggcggaagcaggagaagatagagaagtggctttagaagaggaacaagtagagatagtggggcaggaacatgggtttagaccagaagaagttgaagatagtttaaggttaagagatgagattgcatctgagctttggaaccattatgtccaaaatatgtcaaccttctaaactttttagtttttttttaacaggtttcgtgtgtttagtctgttagaaatgatataagtcaaataccactatttatgtttgttgtatcaaatcaaatcaaatatatatatccaaaacaccaaatgtataacacaccgatatcagggaagttgaagaccaaaaggagagtaaaatatcaaaaacagagctattgaatcaggagatgttaactgctttttgctttttcgtaatccattttcgcttagcgttctctatagcatcctctttcagtttcagcagatcttggaaggactggttaaactgtgactcgatcaggtttagttctgtcttgagatcttctgggtaatcattgtctgaaatggaaagattgtaaatggttgacatcattgagcaagaatccagatacgagctcatcgattctgcatctcgaccagcttccatggaagcatttccgttgtttgtggagtagggaaagtaatagtctgctgatatgtctgacttcattgattgtccagtagcttcttcgtctttcgagttcacagtttgctgatttgctgcttcatgatcctcatggattagacgtggagagttttggttatcatgcgaacaggtccggtcagagtgaactagttgcattatcaagtcatcgatcatatcagctatcacaataacctcttggctagttaaatgcagttcctcaaccatttcctcagcgattgctgttgctgtgtctgactccagatagaatgcaaaatgtacgattctacatttacctgtattagggcattgaattgattttcagcaagtgaaaactgtgaaaggaatgaattggatagaagatttaattttataagacgaaccagacgggtcagcaatacggagaaccatagacgctgtgacatcatcgctcctctctcctctcaacctgaactctttattctctgcaatcctctgaagttcaatggtttgggaccatgggtagtcttcgttgcttgaaacacttttattctcattatgatccacatccatgggaagatgttcaagctgtggtggtctcacatgtttagatgatgtgcttgatgaagcaagcagagtagagttcttgcctccatcccttgcaaggaatgggtccttcgagagctcgagggcagttggtctggaagaggcaggaagaagacatttctctataaattgcctaacttgaggatcgtcaactttgccgagagactgaggctttatgttctgcaaatgcaaagtttcagaggggagcccaattgcatagataattgatgaaaataaagattgtgaaagacttaccgaggtgacctttttataaatttgagcctggtttctgcactcgttgtatggatattcacaggttaccatctccaacatacacatgccaaaagaatagatgtccacaagctcattgtattcctcttcgtacagctcaggtgccatgaattcaggagtacctgaaaacgctcaaaattttcagttacagtaaagttttcagggtctaggaaggaagatgttttatggtgtattacctatcacacttcgagcagtgggttgctgcagtacagttgcgagcccgagatctccgattttgacctctccagtatttccattgacaaatatattgtcacacttcagatcccggtgaattaccggagggttctgagaatgcaaatagttcaggcctttgagaatctgccttgcccagttcttgatggccttgggatcaaccttcctatgcttcttacgatatcttcacatcaaatgaaaaatggtgtcaacccatgtgatacacagaaaaaaaaagaatgaaagatcatcaatacaaaagagaagtggggagatacttacaccctgagactaccagaggtgaaaagctctgtgatcatgttaatggtcttgttcttttcgtcaacccaagagtaaaagagtttgatgatgttttcatgttttagagcctttagtagatgaacttcagaatatagcctttcaagttgaccaggcatctgcattacatcttcaatgctaactaggttccaagcaacttcaatcccgtctacttcgtcaaacgccttatatctgattttatacaagagttaacaaacaaatcagaatcactttcctttacaactaaaaacataaaagcataatatggtgtagaaaacatacacagtcttgaaagctcctctccccagaacatcatcatactaagcaacacaaaaaaaaaaaaaaaaacgaccccatcaatcactatattgttttccacaataatactgaaaatcagcaatcaacagatcttagctta

SEQ ID NO: 24149 - DNA, 4353 bp, Arabidopsis thaliana landsberg
  unsure (1)..(4353): unsure at all n locations
ctgccaagattgagtgttctaaaaggcatcttgtagaactatgggcaagtggagatctttcgaatttcaacatggaggatttcgttaaacaataccatgagtcaaaggataattccgaggctcaaaactctaagtgaccaagaccggctagcgaagaagaaccaagaagttcaaaaggtaaaatcaacgtaattcttggaggttccaaactttgccgtgattccatcagcgcaataagaaaacatagacggaatgttccccttaagtcaagtttaagtgaagaggtagattttcaaggcgcttcaatatcattcgaagaaaaggaaacacagcacctcgaaagacctcacgatgatgctctagtaattacgctggatgtagctaatttcgaggtttcaagaatcctcatcgatactggtagttcggtagatctaatattcctaagcactttggaaaagatggggataagcagggcagatgtagtaggaccgccatcccctttagtggctttcacaagtaaatcagcaatgtctctcagaacaatcaagctaccagttttggcgggaaagatgtcgaaaattgtagattttttcgtctttgaaaaaccagcagcttataacatcatccttggaactccgtggatctaccagatgaaagcggtcccctctacgtatcatcactgcctcaaattccaaactccaaacggagtagaaactattcggggagaccaagaagcttcgagaatttgttatttggctagcccccgactgaaaatccaatagcaattaacaaagcccgcaacgaaaggagtaatcccaagatttcctagcgggcagaaagtggatgatgttgtgatcgaagtgattctagaagcagacaaaccggatcaaaaaggtcggattggcgctactttatctggcgaaataaaagaagccatagttgagctgttaaaaaggaacaagaaatcatttgcttggtcggcagcagatatgccaggcatagactcacatataatttgtcacgagctaaacgtagacccgagttttaaaccagtaaaacaaaaaagaagaaaactcggagcggagagagcaaaagcagtgaacgacgaagtagataaactcctaaagattggatctataagggaagtataatatccggattggttagcaaacaccgttgtggtcaaaaagaaaaatggaaaggatagagtgtgcatagactttacagatctcaacaaagcttgtccaaaagatagtttccctcttccacacatagatcgtcttgtggaatcaaccgccgggaatgagttgttgtcctttatggatgccttctcgggatataaccaaatcatgatgaatccggaagatcaagagaaaacgtcatttatcacggataggggcatctattgttacaaagttatgccattcgggtcgaaaaacgcaggagcaacttatcaacggctggtcaacaagatgttcaacgaaaatctcggaaaaacaatggaagtctacatcgatgatatgctagtcaaatcattaaaaaaggaagaccacgtaaaacatctggaagagtgtttcgcgattcttaaccaatatcagatgaagttgaatccggcgaagtgcacgtttggagtcccatccggggaatttctcggctacattgtcacgaaaagaggaattgaggcaaacccaaatcaaatcagcgcttttctcaacatgccatctccgaagaatttcaaggaagtacaacgattaaccggtcgaattgcagcattgaatcattttatttcgagatcgaccgataaatcattacccttctatcaaattttaaagggaaacaaagaatttctttgggacgagaagtgtgaagaagctttcggacagcttaaagcatatctgaccactccacctatattgtccaaaccagaggcggatgagaagctctatctatacgtcttggtctcgggccatgcagttagcgggctcttgatccgagaagaccggggagagcagaaaaagatttactacataagcaaatccatgacagatccggagaccatgtatacgatgatggaaaagcttgcacttgcagtagtaacttcagcttggaagcttcgctcgtattttcaatctcatccaatcgaagtcttatcaaatcaaccgcttcgaacaattcttcatagtccgaaccaatctgggaggttggtgaagttggcggtggaattaagtgagtatgatatagagtacaagagccgagtcgccatgaaggctcaagttcaggccgattttttaacagaattgccggtacttggcgggcgggacaaccagaaaatcagacttggaagttacacgtcgatggttcttcatcaaaaaatgggtccagggtggggatcaaattgtagtctcccacctcggaaatccttgagcaatcattccggttattgttcactgcatctaacaatgaagcagaatatgaagcattaattgccggactcaggttggcacagggagttggagccgatgaagtgatcgcctactctgattcacaattggttgttaccaattcaatggagactatgaagccaaagattcaagaatggaggcatatcttgaggtggtgagagatttggataaaatttttaagaaattgagagtcattcgcatacctcgaggagaatatacaactgcggatgcgcttgcagcgctggcgcccatgnnnnnnnnnnnnnnnnnnnnngtcattccagtagaatgcatttcggaacgaagcattaaggaggagaaagagaacctcgtcataacaaggtctcgacctgcggcacgtgatcgtggtgagcttgatatagagttaccacctgtcaagcggaggaagtcaaaatgttcaaccgtttctgatctcggcgcacctaaagaaagcataagcgaggagccctttgacctgacagaggatgtagttccagagacaattatagagactgagccaccaatcgaggaggatatcctcgagccaaatgagcatcccgaaccggaaccacgagtatttcacgaagttgaccaaatttcggttaaagattggggggctgatttgagggagccaataaagcattacattatgacaggcgagctcccaaaaaataagtggcaagccaggaaaatgagaatcgttagcgcgaaattttgtttgtcaaaggacgcattgtataggcgaggtggcattgacccttacttattatgcatctttgggcccgaagaggaaaattgtcatgaacgaagtacacgaaggtttgtgtgggagtcattcatcaggaagggccatgacttttaaaattaaaagaatgagatattattggcccactatgattacggattgtgttaagtacgcccagcggtgtaagtgttgccaacttcaatcacctctaatccaccagccttcagaattattttcctccatctccgccccgtacccgtttatgaggtggtcgatggatatcattggaccattgcacagatcaactcgaggcgtacaatatctcatggtcttaactgattacttttcgaagtggattgaggccgaggcatatgtaagcatcaaggattcagcggtaaaaactttcatttggaaaaatatcatatgccggcatggtgttccatacgagatagtcacagacaacggaccacaatttatttcacacgaattcgaagttttctgttcggattggagaatcaaagtcagttattccaccccgcgatatccacaaggaaatggtcaagccgaaaccgcaaacaagacaatcctaagcaatctaaaaaagcgcttgaatcatctaaagggaggatggtacgacgagcttcaacctgtcttatgggcttaccgcacaactcctagcgttctaccggggaaactccgttttctttagtgtatgggatggaggcagttgttcgagctgagctcaacgtgcctggacttcgccgaatagaggctcccctaaatgaagatgaaaattctgcaatgctcgatgattcgttagatactatcaatgaaaggtgagattaagccttaatccggattcaaaactatcagcaagcagcagctcggcattacaataccaaagttaaaagcaggcctttctttgtaggagatttcgtgctaaagcgtgtttttgacaataagaaggaagaaggaccaggcaagctcggcattaattgggaaggaccttatattgttaccgaagtggttcagaatggtgtttacagattaaaggattgagaagacaggccagtccaacgttcttggaatgtggtgaacttaaagaagttttatgtttaaattaactcgcgtttttgttatgtacat

SEQ ID NO: 24150 - DNA, 2577 bp, Arabidopsis thaliana landsberg
caaagagagtgaagtatatttgtagaagtcagggtatgttatcgggcatgcaatttcttgatggtctttagcttatgtgtgtcactctttttagtaatgaacttaacttccctttttgaccacttcagagaacattaaagagagaaatcgagtgtttcgaatctcattcaggatgatttttctctcaaattttctctttctaatcacaatctcttgcgcagtcggtgggggttctccgtcgattttggtgacggtgaggaccccatggttcatggtgtttcaatcgtgattcgctcaaccttctcggaaaagttatccaaccaatatcatgggagaagtttctgcgagacactggcggtaagagttctatcattggtgttgcatcgcagagtggaaaagggagatttcacggcgagtgacgaaagaggaaggtgtttagatatggagactatagctgcaggatgttttagagggttgtcgcttgacgggggagatcatttacggcatggtgaagctaagctcccgttgacagattccatatttactccctactgcctttgtctctcaagactgcatggtttcttctcgaaaaatgtaagatcagctttttttcttcctcctcaaaacggctctacggtggcggatgggtacggttcctaggtcaccatctccgctcggtttgtgtcgtcctgattcgccggaggtcctgttccggaaaaaagttcacagtttctagggctacggcttcgaaagggtatttcgactgaagattagagtttcttacttaaccgatttatttaggtatggtgatcgcggatcaattttaagttgatggttttgtccggtttgatgtatgtggattgggcttgtaatcaatcaatatcataaaaacactaaaagtctctcttgtgctgacacatcacctttttcagttaacatcagtttgacacctttacaaaatcaacaacccattagaacatttcgtttaaatatagatcatttttgttgaccaatcaaactttagtatttgtacatgtcattctattatgaaaacgtaaattaaaattagcccaatccaaatttttttaaaactaaactttttatgttctaacaaattttagattagcccagcccaagttgtttaaaaactatttttcctatgttattacatgggctatactttctatactttctatgttatgttctttaacctgtttcgtttcaaactatccaactacaaatttttgtgaagccagtcagttataagatgatatttacgtagccagaatccaaacacgaaaccctaaaacctcactaagccgacatgaaattcacaaacaagccctagaaaaccgtctacaaggtacaattgaatcatctataaaccagaattgtaccttcttatcggcggaggaggcggaagctgaaggaaacatctgtgaagcaacaatctcagagatgaaacatgaatatgtgtgtgttgcaagaagcgagagaaggactggatgagatgggtggggaacgataggcacttgatatgcatagagaatccgtttgagacgagccatgatctgggtcgggtggtcgtcaagtttagtatcagagagtgttgagggaagagttcgaacaaggtgcaaggattatgcatcaagatcctaacccatgtgccaagtttttggaaccatattttcctgaagataataatggacaaggccaccactgaacttttacaacatttgaatcgcggattggtgtggcttgtatatatttatgggtagaagattcatgctctgttctttttgcttttctggtttgatatggaatcttgcttgtgacccaacaaaaaaaaagggtcttgaagatttttgaattatggtgtgtggatggattaaacgtgtcgtgttattgtgtaacctgaaaaaaataaaagaattttttttttcctttttttttccgctaaattgtaaatatttcacaaaatgaaaacagtttaggttacaaacataatttgaaacctaaaagtatgaatccatggcaaaaaagaatgacacataaaatcggttaattaaaaccaaattttcggtccatcttctcgacctaagcaatgaagctaaaggaatagatgatatacgatgacgttcaattctatccttcccaaaagagatgcacaagccgatgctctaatgcaactttgaatatacatatttaacccaagaaaaaaatgcttataatatacgacgaagtagtggatgcatcattatgcatgtgtagatgtgtagagagtaagcaagaaaataaaaagaagaaagaaggaagaggaagaaagaataaatgcaaagctggaaatgggcaactcttgttcccttcctttggggcatatttctccataaatagtctctatagatcccttgtctctggcacccattttggtgtttctttttttatggtcatgtgtttttaccatttggatccaagtaagatcttcacattagaaaccacgaccaatataattaagcttgggatagctttaacttttgtatatatgttgcttaacgtgtgtgtttcggatctatgttt

SEQ ID NO: 24151 - DNA, 1013 bp, Arabidopsis thaliana landsberg
aggaagattcaatatctaataccaataatagtcattggcatcatagagaaaagaggagacatgatcacatggaacgagttcaaaagttgataagacgattaaacccaaccctgtttttctcagagtatccacatgtcttcatcagctgaagcacaactcacacaccattatatgggtaatctgcggttgagtcaccggggcgtctcaactctttgatcatctccaaacatcgcttctcaagattcccgacaaggctaatcctgaaacacttgcgtacatcaaggtgttccaggtgaggacaaccgtcgagaatggcattcaagcctgtgttggttagtctgttacccataagctggaggtggtgtagtttgggcatgctttcagcaattgctaaagcatcatcatcacattcgagaggccccatatcgtctaacacgttgctgtcatacttgtcactggctggccctaggcggcctaaggagtttagcttcaatgtctttagctgtgggcacgcgtgggcctatagccttttaaatccagttttatacatgagtgagtgacctcgagggtttcaagcaatggaatttttgcaattgcgttcacaactcctagtttcgtcacccttggaaagcacattccaagtccaagacttctcagattccttgatctgcaaatatatgagttaaatcataaactataagaagaagaagagcaatatgttcttaaaaaaaccaataataataatattagaaattctcatagtactaatcaacttagaagcatgtaattaacaaaccatttgtttcaattgggacctaaaagatcaaactctaaagatgctttaagcaagtctatgataagaattctataagttgatgattttgtaatctttttataattataataacggaaatagtttgttcattattgccatggcaaaggacaagcaattatgtatgatatagcagtaattaaataggacaaaaacattgtacccgttgcgagtaaaggat

SEQ ID NO: 24152 - DNA, 792 bp, Arabidopsis thaliana landsberg
ttagttatttatgggttcagaaaccgtgacttttgtccaactttaaactcgaattgtggatagagtttacctcgtaacagagatccgtttgttgttgtgtgttcctcactatgagatctatccaacaacaccaatagcgtgatctggttccttcagatctgacgggaaaccgctcactaataactcaacttggactgatatctttcttcctgttctttactaaatattcaaatagattgaatgataaaccataaatcctcaaggaactacacataatatcatgagaagagatcaacatgaggttaggatccttacccaacaagccggtgacaaccggtgatgactacgactcacgttacgcggcgatctacttgacgttgccacctctacacaatagaaactgcatccacgaaccaaaccgacgactccgatctaaatgttagtgtcttgaagttgtaactctccttagtttctcaatgttatgatcgataatggtggtgaagcaaggttgcagggacgaagacgacgttatatacacatgtatatacacacttcatgattaggttttgttgttaggtttttgttgggcctataatgggcttagtgagaaattgagtctcacattgaaactttatattacaaataaaatcttagaattaatggatttgggtagataataatatggggcgctatactataggtaaaatcatataattaacaatcaaaatataaatatacaatcttaaacactaaatagaattatttttttaaagaaacacatctcaattcttt

SEQ ID NO: 24153 - DNA, 2325 bp, Arabidopsis thaliana landsberg
aaagttgtttggttaatatgtgacataagtaattattaatgtaacgaaaacagagtggattgtggggggtgtgtgaactttgattctatcttttaaaaaatgtaacaactggataacatcaatgcacaacctccttctgtccttcatgttgagttgagtggggacttagccagattagatttacaattgttaaaaaaagtctctttcttttctctggccctactctcccacccacatgctcttctctccctctctctctgagtctctatctctctctaaataccaatctcttgcctatttatttgactctttcaacattccctcgaactccacttgaagcaaacccaaaagaaaaacacacacaagacttggcttacaaaacaaacaagtcttcaagaaacttggaaagctaagagctatggctatggagttagagcttgatgatgatgtcttctttgcagacataagcaaacagatctctcttctcatcatggatgaagatgaacacttaaaccctgtttctctctcttcctcctcctcctctctctcattccaggtttgttcctctgtccacacacttcctctctatctctctctgtatgcctatttatctctcgacctccatgtctaacagtgtttcttgaatcttttgtggaaacagggtttgttcagaggaggttaccaaacggctccatatatgtatcaacaagaacagagcaaagggactggtgtgttcatccctaaatcgtctcagcctagaagaagacctcatcatcatcagaagcaaggtaggtatagttccttcaacgccaagcaacaacactctcttcatcaaaacagacaagagtatcagcagagtcatgagaactcaagaagtactctcaccactcacaacaataacaacaacaagagcaacatgaacagcactagtgttcatgcttctatcccaagaagaagctacagagatgcatcatctatctacacttgattaattttaacaaatattcttctgtgtgatcaattcatataatttaaattagatgcataagatttatttgttttgtaaattcagcgaacaataaaagggttgtataaggaaggtattggagatgtgtccaacttccaagtttgttcttgcttttatgtaactctttcttgtcattttagagatgcactaactttttcctccatttgtaatcttttaaggattgaatgaaaatcaaatttgttggttgatgacaacaagattgatagaggaatgtgtaaagacaagccccatgtgagattagcaaatgttccatgtctctctctctctctccaatcaatcaatatctttgggacatcacagaagagtttgccacactgtctgaatatataaaaaaaagtcagatctaaagagggtccaaaagactgtcacaagctcacacaccttctgtcctcccactcacatgccaatccctctctctttttctttgccattattatgaaatctcctcattcttttagtatttctaattatagcaaaagtgcaaaactatatgatgacactttccattaaaatcacttatttttcataatatatcacttattcacatatattctttcttgcttaaataaatttaaagaaaaacaagaatgcaaatccataacataatcataacataagtaaagattaatcaaacttctaacaaacaaagataatataaggttaatttatacacaatcaagaatcaacaaagcatgagagcaccaaattttttattttactatccaaacttgaaagcaccaaagttcaaaatttcaaaatacatagagactataaaaaataataaaaaaacagtattgatgaagattcctctacaacattttggtgtttattgctctaattattcattttgattcatacgtcatataatttatgttataaatggcggtggattcaatacgagattatttaatattttcggttatttaattaatgttaatttgtttgttatggtcttcattttcttcgatgagccaataagcaaatccgagagcttagtgtgaagtgaagaagagtttcaatggcggcaattttttctctcttccttttcttcattctcttcatcgtctctcttctcatcatcttatctttcatcgtacggccaagatccgtcacgatccccatcaagtttcgccacgtcttcatcaccggtggatcaagcggaatcggtctcgctctcgctcaccgtgccgtctccgaaggcgctaaagtctccatcctcgctcgttcaactgaaaagctcgccgaagccaaacagatccatccagctagctaccggt

SEQ ID NO: 24154 - DNA, 4688 bp, Arabidopsis thaliana landsberg
cccgcaatctcttcttctgagaggctctcagctatcacctgatcattccataacaactaacatgagtaaacatatctcaaacgagtgagatgcagagacaataatatatatagtataactacaaactgacctttaaagccatcttctttaatttattcattgcagaaaactgtttgagacgagacaaaacagccgggtcaagtgctctatctggtgcaactccattctcacagatccatggatgacctgaaaaaaagagatacatacaagagatatagtctattgttgtgtggctgccaaatgtaaccatttatttaagtgtaattgattacgtacgcaagacttcatgagcagtcaaacgttcagaaggactagagcataacatcttccggatcagatctttagcactgtcggatatgacaggccacgggtctgtatcaaagtcaatatatcccttcaacacagcatcaaatattccttgctgtgtttctgatttcaaaaacacaaaaccaaacttcaggaaaccttgtcaatggcactaattaagagaacgcacttaaacagctatatcgcgcatacctgcccagaaaggcgggacaccacttagtaagatatagagtataacaccagcagtccacacatcagcttctggaccataatgttttagaagaacctcaggagcaacataatatggacttccaacaacatccttgaatatttggcctgatattagagtaagactacacattatgcaaagctgaaacatttacatttccttactcatttgatgaatagaaagtcacactaatgtataccacaaaacacatcatggtacttaaatagattcagaacaatgagaaactcgcaactaacgattacctggtttgaagaaaacagagagaccaaaatcaatggccttaagagagaaatcatcatccttattaaccaacaagaaattctcaggctttaaatctctatgcataacaccaagagaatgacacgcctcaacaacaccgacaatgatcttggtcaactcagcagctttcctctcgctgtaatgacctctatgaataatcctatcaaacaactcaccaccagcacaaagctccatcacaatgtgaacatacaaaggatcctcataagctcctttaatagtaacaatattcttgtgaccagctaaatgatgcataatctgaatctccctcctaacatcctcaacatcttctttagatatcaatttcctcttggatatagacttacaagcatagtcaacacctgtggcaagatcagtacacaaatacgttgtcccgaattgtccttgtcctaacttacgactcaacgtgtaaagatcacgaatgttaggagtcttgtgaccaagaacatagtaagattgattgtcaacgttacgccgcataatgggttctttaacaggaatcacaagagctggattggtgttctgtttggagaaatcttggtctgtagtaggagaatgaacagaggaaacagtagtggtggtggatttggaattctcctcgggcctactatgattgccctcgtagattttgtccttaaaagaaccacgacatgaattgcccatgaaacaaactctctctatttcacaacttttttcactttcttcttctcctcatccaacgaaactgtttcatgaacaaacatacacaaaaaaaatcagataaagagaagccaaaaaagtatcaaactttggaacgaaatcaaagaacccacatcagatcaagcttcaaaaaacataattgttttgtaacataatcaaagattaaagaaaaaaagacaagagctcctgaaaagtcgtagctttaaatgttcatcgatcattagagatcccaaaaaagaatcaaagacacaacaataaatgaagaaatcatttggtaataaaagaaacatgagaaaacagaggatctagtaccggaatatagcagaacagcgagaagacgatgaaatggagacgaagaagaaatgggaaaaactcaaaaaaggataattattcgttgatagtttttgtttaagtcaataacaaaagagaaaaaatggtttctttgttatgttattgtttaatagtatatatctctatatgtgttgctgtttctggttgggtaattggattcgttgaatcattagagagtgttaaaaagattgattcttttgtggatttgtgaaatgatgaaggagagaggatggtgcaaagaagaaaggtcttttacgcggtttcgtctcaccttcttcattccttaattgcttgtttaattagtattaatttaagggatcatcatcttttactggtgtaatgatacttagtgcaagtagggagaataaaaaattgcaataatttgtttaggataaattatttattaagagaatgattataagcctaacgttatgataacattttttaagagttggatgtgcttaacttagctcacttcatgatattattattagatgcatatagttaagagttaatttatggttttgattagcagctcgagacaatgcacaattaaatgtgttcttgaaacgcaagttagatgatgttgacttttctcaatggttcaccaaacatgtcacattcttttttactttgctaagtatataggcttttttgaataaacattttggtatgtctacgttgaaataacatctagtccagtataaatcaaacttttagcactgaaagttttgcataattttaccaataattagtgaagtatataggatatcacttttttcttacaagaactaaggcatggggcatgtcattgtcgggtagtgagtaagatcgcagactacaatttgtctcgcacgtggtacaaatttagtttgggtgtactttttttttctttttgacatcacagtattgtacttacagtttttttattttccaatagataactttacaaaccgtgaatcatatcatttaaaaaaaaaaaatcgttctcttaaacggataagaagctagacctactttaaattttacattgtcgagtgttctttaaaagatcttatcatatgttcaaaattggggaacaaaaaatttcgaattcctaatggtaaaagctttctccaatagtttggagagagcgtaatttctataaagaatctgaatacgattatcgcttatattaaagtccaaatacatagaacgtacgaagagtattaaactttgatctacttctataaaaacacttaaaacattttctattttcataaaaaatctcaacaccaaaagataaaacctagtactctaagaaaagctgagtgtaatttttggaattttctctttgttttattaaaatgcttggccataagaaaattcaacacagctgccataaaatatgaagttgatcttacataaataatgttttaagtttctgctggttctcatgttgatagagataaatctactcatctaagattcacacttataatttagttgcatctaccagttcctctacttgtaatgctattatttccacaattgtataatcacagctaaaatgagaattggagcagaaatattaaagctaccgctaaattttggataataacaatcatacaataaattcatgtagcagcagagtcaacctacatggctacataccaacactaatgttcatcaaataactgaaaatgccagattctagtccaatggaaacatcatgtaatttatttattttagaaagaaaaactatctcagaattctctctcttactcttcagccatttagccactaggattatcaagtccttgaggaaccttcccaggatagtttgtggtctctgcagagtcagtccccaggttcctacacacccaacaccataataaataatccaacacactctcaaattatatttatattctgtcaaaacttattgtaattattgcttaccctcgatccacgataaccattgagcgaagctcacagttgctgaaactgaacaaagttagagatgttgattagttaaacagtttcaagttatacaaaaagttggtgcctgtagacatcaagtttttgtttaagctcttactgtatagacagctctttctttaggtcatcgcaacaatctttcccgaaagaactcaagagaccgtgcaagaagccactgtgagatacaattgctatctccttctctttccttgtccatatccttcacaaagcaaatggcagtagagagattcagctatacatatgtttacatatatcttcatgtggaaataagtaacaaaaatgaaactcaccatttgatgaactctacacctctggctgcaacttcttctaggctctctcgtggactcggtttccacagaacatccttgtcggtttcaatctaaaaccatagaggtcaaagcataagcaacttgccaacatttccacagagatagatattaaccaaataagatgtttttcttacaattgagaaatcaatagagggaaagagagccttgtactcagtgacgcttcttcgcctgtcacaaggatgatcaccctgcatccataaaaacaatctttaacaatgtgatcttcactcatctatataccaacacactctttaactacttctgtaccatagtttccctgcatagctcaacagcaagaaaaggcgggatatctaagctagaaatcgcaggacgatcgctgttcccagcattag

SEQ ID NO: 24155 - DNA, 3905 bp, Arabidopsis thaliana landsberg
  unsure (1)..(3905): unsure at all n locations
ttgctatcaaaacccatatgcagcagtgttgtttgcagaagttcgcgttctgaacgatcataggctttgggcaatatttgttttcaaagccatgtaagatttagactgtcgttttctgtcctttagagcgtggaaaatctcatgggctatgatgttgttgtcagtgatcatcctcccagggatgaaagccgcttggtagtcagagattatgcttgataagtgcttcttaagacggttaaccaagatctttgaaataatcttataactgacgttgcaaagcgcaataggtctgaactcccccatactcacaggagcttctgtttttggaatgagacagagatttgtatggttatgtatctgatccagattcccttcttcaaaaaatagttccacttccttcaaaactgcagggctaatctcactccagaaatgatgatagaaagctgctgaaaaaccgtcgggacccggagctctatgaagaccaatgctataaacagcttccttaatttcttcttgagtcaccctttgtgtaagttgcatattcatttcatgtgtgactcgttttggaaaatcctgaaaaacatctgcttgaagtgcatctgaagggtttgaggattgaaacagatcatgaaagtagttgactgcgacatccgaaatagctgcatcacctctgtgaacaaaaccatcgctgtcttcagtagagaggattctgttctgtgctttccttgctttcatcactgaatggaagcattttgtattcctgtctccttcatgagcccaagagtttctgcttttgagtttccagaaaatctcttcatcaatgtaaggttgattgagttctctcttcaaattatttctttctactgtagttgataaacttgaagtagccgccttatccagtttatatcggagtgtcctgattctttcttcagcgttggttttgtgaccccttttctagcgtgatatttgtctcctgcatctagtaattctgtctgtaaaggggatgtccgtctcactctgtctaataccaccatgccaacctcttaagactgagtctttaaacccatccttatgcagaaaacgggtatcataacgaaaacagcctctttggtcttccactgtatcagagacgtaagagaccaatggacgatggtctgattcacccagctcaaggaactcagtttctgaagcgggataattgttgtgccattctgtatttgccatagtgcggtccaagcagcaggtgactaggtgatctcctcgttgcccaacccaagagaatctatctcctatctgttttaggtctgtaaagtcacaattcctaaccatccttctaaaatcctggaaattagcctctggtcttacccttcctccccttttctcattattgcctaggagttcattgaaatcccccatgattagccaagggctgttccttctattaattccaatcctctctattctctcccaaagatcatttctatagcttagattgggatgcccatacacaaaggaaaagtagaaagatgattcattacttcgaacaaggcaatctacaagattaggggattgaaataaaactgaaagatctacagactgcttccaaaggagtactaagccaccattaagacctacaggtggaacagttacataaaagggaaatcctagttcacaagctttatcccgaatgtcgtcatcctgctgcttggtttctgaaaggcatatgatgtccgggagatatcgtcgagatatctccttaaagcgtcgaactatgaggtcaatggctannnnnnnnnnnnnnnnnnnnnntgtcctcatgttggaagtggtggttcagggcccaccgcgcctctcactgtggttgcatcaacttcaatgttatcatcgttgttctcccgtacaatattcgccagctggcttgtgcctacaccaaggtccaaatctttacgcttacgggttgacggtagggaggtctccatggtttgcatatgggatccgtcttgattcatcgcagacatggattcagtcgcctcaatttttatctccatagagttgtcttcgtcgtcacgcttacgtttgacacgatctgtggtagtgtcaggagccaagttgatcacacactcagagtccatgatagccagagggtaggcacaaggtggtagagaattataatgaggggttcctgagatatcaaggcagtcattagcagaagatggaaaagggttaaagagctgaccaccagcattcccttcctcctgaaacattgtagagtttgcagattgtaagagagcatcatggttaggatcaatatctgcaagatcagcttcagcatcctcaaccggaccattgttgctatcttggtttacaacatcctggttttggacattaacaacaacatgttccaaaccctccaaatcttcatcatcattaatctctctaattacgcccttgcggagcctggtcatcctcatcgtcatcatcatcttgttcttctcccccattcacgataacacaggcccctgagtcatgggtcagcatcccacaaacctcagaaaagcctcgaagcctttcatatctaaaccggaaaagtgggttaacacccgcagtgaattggaacttccactgaaaccttacgggaatagtgatgtcccaatgtaggagaacacgaacaaaatccaccctcgccacagcctctgcatcaaaatcaattttcagcacttgtcccagggcccgtccgatgtgctcgacgacgccacagttgagaaattggaatggaatgcctctgatttgggtccagaaaggaatgaaattgaggagcggcaacaggggctcccatcgttgaagaatcagcatttgatcattgaaagcccacggacctcgacacaaaactgattccaaggattcttcatttgggaaaatgaattgaaaatcccgaccctccactatgcggctgtgaacaagtccggttttgccccagattcgcggcatagaagcgatgattgaacggaggttttgtcgctttggaatcaccggacgcccgaaaaggatgaaacggttttctgcgacacgttggttcacaatgtcttcaggtaaagcaatgggttcgtcattcacacccaaattgaggtcttgnnnnnnnnnnnnnnnnnnnnnaccaatttttgagagattttgatagaagcgaagaggatagaaatttgcagagatgatattgaaaattgtagagatttgtcgaattgcagatctgccaataaataggcacataaacgcaaccggttgatgaagcatcacgccagatcgtggatccgaacgtggagatgaaaaccagagaagtggtggaaaagaaaccacccactacgccggcgaaagtgatggaaaccgtcgtccaaccgacgagaagaagatgataaagtaaccgtcccaaaatcgcattttgtgtcgccatttaataaattattttatctataaaacaagatgttacaaatgtatttttgttgttggtaatagttgggacaataattaataagtatgaaatacaccgtggaataaatatatatacttttttgttataaagttatgatattggtgtattatttattttttatgttttattggtagaaacttatgtttgaatttgattacacccctggtagattttttataactaaatcgtatttaagattgtataattgtgttttgattgttaattttaagattttatacgtgatatattgtcatgtattaacctcgatccaaacccgtcttaccatataatcccgtcccttaaaaataaacatcatattcttatttttctttttaataatacttttatattaaaaatatataattcaatatacactgcgggattaataatttcttctttttaaaaaccgattagttgttct

SEQ ID NO: 24156 - DNA, 4356 bp, Arabidopsis thaliana landsberg
tctgtatacattcgagtttgagctagtggtgacttccagtgagttcgttttggagttcagagccgatcgttacaagtgtgcggtaagcgaatgcggcctaatccaactcttttaaatccctttatgtccatgagcttcagaggtcagtggaggctgttattttgcagtctttgagatttgagacaaacactagactgaagttagggcatgacaagagctgaaatacattaatgctatatgatgaaacattttcttttaaagttgggtcgatttgacaagtttggtgtgcatgttgtgtggtgtcacttagtatgattatcattactatatatgtgatgttggtaatatgtataatttatcaattaagtcacagtatacatctatgtgtttatatgtagatattacagcgaagctaacattgtatgaaaagtatttgtatatgtttgtatacgcatattacttcattcctcgagtgcattttgatcttgttgccaacctctggtcttctttatcttctttaatccttggtctctctattagcatatattacaattaaacctctattaagaatgatattgtctgcagaaccatatcgaaataaaggatcttgtaaatctaaattgcaggaccagtacgagtcaaaatccccgtaagtgacttcttcattttcacttgcactcttatttagtttatcgtgactgggaagacagatgatttgtactcaagcaatgcagggaagagaaactggttctttcacaaattatttatcggggttttggttctattgattgtgtgaagactcgtttcgtttgtaggagttgcaagcccttttggagggattttcctatagtcattagcaatggtcagaacattcttgatgctatactcaaaactccaatgccaagcatcaatcagtaaaagcttttcccttcaacatagtaaactcgcacatcgctcgatgtttgattatttacaattccgtagataatgtggtcaaaggcctggatacgatcggtggggttgttgaacaagtactcattattaaaaaaaaacggttagcttctacgaaagttttagatcaagcgatcgggatttgcatgtttagttgcatgtttaggagggtgggtgtctgatccagtgtaagacaaccgtaagatatttgttacgtacataaccagcaacatagcctaatatatgttgagaaccgaattgccagtcaaaaccattgagagcctcttttacaagtaatacattcaagttcatggagcaaggttgtaactcctacaagttcactatttctaaaatcagttgctttttccacgagaaatcaccaatatgaactcatcaattctctgagcttcacggagaaaaacgctacgactagccgaggggtaactcaatcatgtggatgttgctttcgttgtagatgaagtgactcctacaatccagatcgagaaaattgtacttagcagatctttctaacagagatattaaaaaaaaaaatcatccaatatcatatgccaacagagagcaagggcaaaaagatgtatccacaagttcttccaatatagctaatgaaccctacaacatctacagctttccaaaacaaaattcacgaacaaaccttaaacaaggatcataaaggttctactagttgggaagatattaaacacgtttaaaagtgaactgagaagttcatcatgagttattcatgcttctaaaagtgtaataagggtttttcaaactcattagaacaacaggcaagagagtttctgagtgtaagttacaggattcacaatgtgatgattctagaatgctttatagtaacaaaccttttaaagtgatcatactcttaaggaaacataagaagaaaagcaactgacaacaaagcactcatcaacaacctagaaactgtgcaagctaagacagtcatgagcagactactactcacaccacatgcccaagctaatcaagacaagttcaattccacacaaatcacacatggccaagcagactagaaattgctgataaattataaaggctaattaagtagaatttctgtgtaagttatcagttcaagttacaagaaagtttttgtgtaagttaaaggtttcacaaataaactatcagcagactagtagagactgcagctaacttatgatttataaacttcagtcactacacaagtccaagctaaatcaaaataagttcaatttcaaccaaatctcacatcatagccaagctacacttacaagcaaccatcagcagataataaaggataatcaagtagtgttccaaaacttgataaacagctaacctaatcaatgttgctgattatggtgatttggcggagcaggtggcatgccaggatgaggcggagcaaacatcggagcaccaccggggggaggcattccagggcgagaaggaggcggtccttgcataccatgaggtggaggaggtcctctcatcataccaccaggtggaggaatcatcattggcctttgctgtccaccatactgaggcggtggtggaccaggatacggtggtctcataccataaggtggaggaggacctccttgaccagcaaaaggaggctgtggtggcatttgtcccggaggacgaataatctgtggtggtctagagatctgaggctgcatcattccaggagcaggtccaccaattccacgaacaggaccagataaaccaggctgagcttgaaccaatggaccagtaggtactccacgtccagcagcacgaccgattccgggaccagccacagcggttacagatccagatttggcgcgagattcttcaggtggcggtggaccttcgacagtcatcgaaatcacttcttctcctctaagtaaaaccaaaccaagcgtacgacgctcttctctttcttcgttcgtcttcttattacctttcgccggaggaagttttcgaaactcttcgcagtcgccaagaacaagattcatgtggcgatcgaacgccatgaattttccgattagctgtcttccgtgttggattgttactcgcatcctgtagtttatgaactgaagcatcttggagctcttcgacatcgacatttttgccggcgacttgtatacgccggagaattaagcgaagaattttggcagtggattggggaagagggggaatttctatggttttattcgagaaagaatgaatgacactttccttcttgttgggctttgtttcaatttgggcctagttagaatgggttaggctatacataacataggtgtattgccttttttttttttcaccatttgtcaaattaatttatatagtatagttttgtaaatttattattattcattgaaaaaactttaatgatttctttttgtctaagagcgaaaaaattattattattctctttaaacttttattaaatcgttgaatctccgagatattgtacatagagtattgtctttcgattcaagagaccatttttgctgtagaataaaaaaaaagggagaaacgaacaaaagatccaccaacacggaaggattaatattaactggatttattggattaactctgaattatttcggttatacatatatcatctcctctcatcgatagtaaagtaataaatatttttcatagaggtgtgtggctgtggactatcttttaattttagaaactgctcactcaatcaaaataagaaactgcctgttattaaattacctaataaagatttgaaaaacgtttcataaagacaaattcaattagtaccaccatagttcatttcttcccctataaataaatttgatcttagtattgtttatcactcaacaacaaacacgagaaagaattatatattggaatatttcaaacatttttttttttattatggctatcaaaaacgtgattttatttctagcggttttatgcattgcattgtctgtaaatgcccaattaccacaatttccggcactttttccttttccatttccatttctaccgagtcctggtgtaccaggattacctgatataacaaaatgtttatcatctgtgataaatattccagggtgcatcgtagagttttcgcaatccatactcttaagaaagttcggcaagataggttcagcttgttgcaaagcaattttggaagccgaaaccaattgtattccgcaacttccgttcaatctgttttttcctcctatgctaaaggaacaatattcaaaaactgttggcggatcctcctaccaaaaattagaacttagaaaccaataatgttaacctttgctttcttttttttctttttttttccttttactttgtttaagttggaaaatacgattaggtttccgatttgtatccaaatttttc

SEQ ID NO: 24157 - DNA, 2055 bp, Arabidopsis thaliana landsberg
  unsure (1)..(2055): unsure at all n locations
tatattctttatgtttttactcaatcaacattatgggtctcggaaaccaaaaaccaatttttggggtttttgaaacaaaaatataatatcaaaaaactaaaactaaaatctaaaatttataaactaaaatctaaatccaaaaactgaatcgaaaatcagcatccgttcagggccataacatagtcttagattgtagtagcgaaacagacaaacatcagctgtctactatgtattaaaagggtaaatgttatgaataaaatctttaatatatgcttagttaaatgatatgctattaaaaatcattaaagatgttggattaataaagaatagagtaggtatttaaatttattgaaattactcttttatatattatataaaataaatattatatatataaaatgaatttgatttaagagaaaaaaatattaagaacttgaccaatcataacgtaaaatcatatgtcgaaaaacgaaaagaaaaaaagccgtaaaagtaaaacttaaatcggaggggcaaatcggtcatttggaaaatcgtagaagattctaatatctagtcaagcggcgagcgtgactgcaaccgttcctcctcctcctccgtcgcttttttttttcctcttcaaaagaaaataaaaaaccaaagccgcacgcgtgctcttcacgcgcttccacactctcctcctctcgccgatcatcgctgcgattcccttctccatctccggtaacaattgggtgcgccgtctccaagccctagaacaatttcccagtatctctctctcattctcaaaaatcctaattagggtttgatactgaaatcaacaccagatttggctcaatcgtaacatgtgattgctgttacaaaccacgaacaaaaaatggttgataacagtaacaataagaagaggaaagagttcatcagtgaagcagacatcgccactcttttgcagaggtttttgtttcgtttcgttaatattcgatatcatctcttataatttgtggcggcgtttgattttgacctcgttttgttttgcagatatgatactgtgacgatactgaagttgctacaagaaatggcgtattatgctgaagcaaagatggattggaatgagttagtgaagaagacaagtactggaattactagtgctagagaatatcagttgctttggcggcatcttgcttatagagattctctcgtccctgtgggaaataatgctcgagttctggttcgttaatgacttctggttcaaagaattttgattgtgtagttttattgacttatctgatgttacagatgtatattgatcttgttaaaagattcaattttgcatcagagttttttccaattagggtattgtttcagcttcttgaaatgttggttctctctggatgtatggaaggaagatggaaccttgtttgctagttctgtttcttgtatattcacaatggatgcaaacgttttgttccggggattcttttgttgtacctagggagatagcatctgatgagtgattattgttctcaatattgttgtgtagagtaaaagttctatttgttttgattttggtgaatagcatttaggtcttaaggtggaatgaatttatgtatcatgtgatagctgttgcattacaagatgtaattttgcaaatttgaatgaactctcgcttgtgcaggatgatgatagtgatatggagtgtgaattggaagcatcccctggagttagtgttgatgtagtaacggaagctgttgcgcatgtgaaagtaagtaagaaggaaattcactgagaaattttcttagattcttctttttcccttttcaagtctttgtccgatttctctatgannnnnnnnnnnnnnnnnnnnnnnnnnnnaagtggtggttactagtactattcttgggtattgatgtttgcttattacgagttcctaatgaccatgatgctaagtttcctgcttttctttcctttattaggtgatggctgcttcctatgtgccaagtgagtccgatattcccgaagactcaacggttgaggctcccttgaccattaacataccttaca

SEQ ID NO: 24158 - DNA, 2209 bp, Arabidopsis thaliana landsberg
ctatgttgatcagctcttactaagaacattgtatcatcagcgaacagaaggtggttaacacgaggactgcctgttgctactctcaaactaggtaaggagccattactttgggcttttaggcataaaccggataacacttcattgcagatgatgaatagatatggggatagggggtcgccctgtctaataccacgttgtggaataaccaatcctttagcctggccgttgagtagaaaggagtaagagacagttgtaaagcattgtagaagccacctagtaaaagtactatgaaaccccatcttctctagggctgatttaataaaatcccactccaatctatcataggcctaactcatatcagtcttgactgccatgaaacatctctctttagcacttgaagtttttagatagtggagggattcatgagttatcaatacattatctgagattgctctttgggaaacaaaggctgactgattctcagagatacaggcatggagaattggttggagtcttttagccaggagtttagctattatcctgtaatagacagaacaatgtgctattagcctataatcagaaactttctagggacagggaacttttgggattaatctcacatgtgtatggtttattcttgcaagtagaatgccggttatgaagaaggtttggatttcagcaataatctcatcacctacagagttccagttggattgacagaaactagccgaaaatccatctggacccggatctttatcagcatggatagagaagcaagcttgtttaatctcagagacattaggcattctaacaagttgagcattcatatcaactgatatacacggtgaaagagcctcatttgccacggaggatctatctccttccttagaggtaaaaatatcttgaaaataatctgagatggtctttaaaatttcatgttcctcatagacacttgtaccagaagagaattcaataacagatatgttgtttaaagcacggcgtccttttgttgcagcatgaaaatatccagaatttctgtcccccagtttcagccacaactgtctgctgtgttgcttccaataggcctcttatgtctgataagcaataagtagtctctggttcaggtcatcgatattggtttgggaagcagaattactactcagtgatgtttccagctcatctcttagggagcgaatttctttctggctattcaagtggtgggttttactccatgagataatggcatctctacatagttgaatacgatgatccacagagactgaagggttatggcgccaggtattagtgaccagctctctgatttctggattatcttttaagttcctatcatatctgaaaagggtctttcttttcttttgtaagggttctagtgaagtgacaagtggacgatgatctgaaccctcaaatcttaggtattcactacggtctgagggataagcaataatccaatcgctattagccataactctgtcaagccgacatcgtaccatatgagtgtggcgcctaccccgccaagataggaagttaccaaagtgttttagatcaaacaagtcgtaggaagacataaaggaccttaaatcagtgaaagaaccttcagttctgtctggtcctccagatttctcctctctgcaaatgatgtcattgaagacgccggtaatcaaccaaggaccagatctagtggagtagacttcctgaaggagagaccacacctgaagtctttctgatctctctggctctccataaagtgatttacccttagcagttatttttgtgtccataaagtgaatataggagctgataatttccacttgtaaacttgacctccagaaaagagctaaaccaccagcagcaggagaaaggggtgcaaccaaatgatttgagttattgtctagccactgaagcgtttgcaggacattttcagaggtattcttggtttccatgaggaatagaatgtcgggaaatatcgatttacgaatttcttttaaccgctggactgtcatgggattccccaacccacaacagttccagcttactatccttaaggaagcggggctaatggattatgaaaatccactttatttttctgggctgcaggaattaagaaaatctttggatttgcacgtttcttcgattttggacaggcagccttagaggaggggttactctccttgtagagctgcataagatg

SEQ ID NO: 24159 - DNA, 707 bp, Arabidopsis thaliana landsberg
  unsure (1)..(707): unsure at all n locations
ccaaaacttttcagtttgtttaattttaaaagtaaatcagtttgaaacaaccatcgtcatccgaatatatatataggccagtgagtccacaaaaccaaaaagctttcctcaagcaaataatcaaatgtatagtttttgcctttttgtcctgtgaaagaaggacttacaatccttgttcagctttactccgtttttcagccattctcttcttgatctcatgtgctgcattgaaaatccccattgttggttggttacacacaaagcatttcttgttcttcgtgtgatgctgcatcattacattaaacaaaactcattagtatttcttcacaaccaaaaaaaaacagactcgtaattgtgatttaagttatgatcatacctttaaagcacaatgctcacagaagtaatgcttgcatttggtgacaactgggtcaacaaaaggctccctgcaaatgaagcaagcaaagggcaatgcattttcgtcttcgtcgctatccttgtcagcctcatcatcttcatcctcaactcccatagctttatttctcttcctaactttctctgcttcttcccactctttctctatctgccatcctggtttgtaatccccacnnnnnnnnnnnnnnnnnnacgaatctccatatccacagtatccggtttctttgtcatcctcgctattgcccgttcgcccttcgtattctgctcttcccctc

SEQ ID NO: 24160 - DNA, 1966 bp, Arabidopsis thaliana landsberg
gaagaagttgatcatggccactcgcatatcccgtcaatagcggacataatatgttgacttgactatatagcatcgttaaacccatgtgaaacttctacttaaactatttatgcatttatacgatcatatttgtgggctcttgttttatagtaaaactatatattatagatgctgacaagtgacaacaatatataaggtttgctggacaaggatatggagtttaattattaagagcgtgaggaacgttgaattatatttaaatggtaaatgccaaaactcttggttatatttaacattatatatcctttgcaatccctcaagaaggatacattcaatttttggtggtcttttcaaaagtggaaatacaacaaaacaatgtcgggacttaggcaagtgtttcatctcttacaacttcattttttgtttggctatgaactcgtacaacttcgtttttttagtcttattttttgctataaactcttacaacttcatttttatagttttatgttttgctataaactcgtacgacttcattttttttagttttattttttgctataaactcgtacgacttcattttttttagttttattttttgctataaactcttacaacttcattttgcattcattcatacgttgattaataatatacttacttgtctaatatatatacagaagattggatggcaagatcgcaattataacaggcggagctagtgggattggagctgaagcggttaggttgttcacggaccatggagctaaagtggtcatcgtggacatacaagaagagcttggccaaaacctcgccgtttcgatagggctagacaaagcaagtttttaccgttgtaatgtaaccgacgagacggatgtcgagaacgccgttaagttcaccgttgaaaaacacggaaagcttgacgttctgttaagtaacgccggcgtcgttcttttcagccaacccggcgtcttggaaacaccgggaagcatccttgatttgaatcttgaacggtttcaccgaacaatggctgtcaacgttcgtggagcggctgtgtctatcaaacacgccgcacgagccatggtggagaaaggcacacgtggctccatcgtttgtacgaccagtgttacgtcggagatcgtggtcagggacctcatgaatacacggcgtcgaagcatgggctcgtcggactgattaaataggtttgtggtgatttagggaaacatgggattagaataaacggcgtcgcaccgttcgctgtggcgacggggtcacggggatgactagtcacgacgaggagacggcgaagcagacggaggagtattgcgaagccagagggatttttaaaggtgttgtgttaaaggctcgacacgtggcagaagctgctctgtttctcgcttcggatgattcggtttatatcagtggtcagaatttagcagtggacggtggtttttgcgtcgttaagcctatttgaaactaaataaataaataaaatcggttatttacttattaaagtgtgtatatttttttcaaccaaataaaaacattattatataggaacaagtgtcactattatggtgcataattcagaggtcaaaccaattcttgagccattaaaaaagtaaaactcacatggcacgatagagttgacttttaagatacatatacccccatgtataaatatccacacatagctctctcgtagctctatccttcaaattttcataacgtctcaacaatgtctggaaaaaggcaatttcctcatctgattttgtaacctttctgctcaactttatacccatatacataaatgtgtgtttctaatgatttgttttttttttccagattggatggcaaaatcgtaattattactggcggagcaagcgggattggggctgagtccgttcgattatttaccgaacacggcgctcgagtcgtgatcgttgatgtacaggatgagctcggtaaa

SEQ ID NO: 24161 - DNA, 1420 bp, Arabidopsis thaliana landsberg
tgaagggtgcatcctttagacatccaactttctctttagttctcaattttcacttccatctttcggtttgacatagattccaaccgctatttcaaaacatagaaatcaatattaaagtaatatggggggtctgtgcaaaaaaataaacctaaatttgcaaacgaagtacgtacaggaaattgtgactattatagtctgggaatgtggggccgaagtaaatccttgaaggcccatcctcagtgaataaggcattcttccctaaatagatatatgaaatttagggtttagggttagataaagaaaatttcaattatagttaaaagtatatacgtaaagtagaagagtttgacacaccttcaaattccacaatcctccataaccagttgataaccacaagtggctcgtagttgtaagttggagcactaataaggcgataaaacttagaagttaataatacctcacacatcctctccacagcaacacaggttatgatcatatcgctaaagcaaacaagattccaaaccaacacatattaaactccaaaaaattaaatctagaattttatattcaatatatttgaaatatgacatgtctacacttacagattatctttcatgttgaaagtgacatatctgacgtgatagtcagactctccttgacgaaagacatatggaaaccgcttgaattttgagacacttgatatgactcacattgcatcttccaagaaggtagagaagaatattaaagaatgataaatatagaaacaaattgacaatatttaatagttcatcaacttacctgtagcaaattgtttgtcatgttcaccggcatcttgtaactcatttgggtacatgcagtcaatgaaggagcgagtagatctaggacttctaggccacatttttgttggccaagtacactcgatctgaaagagacagtacgcgtacttgatagggccagtggatctcttcacgtggaagtcagccatgtagtaccaacccccttctacgagactaccttaaacttatacatgtagttcccaactggaaggattgcatcgattttcgaaccctaatccaaattaaagaccaaatcttctactatttctaatcttgttcaacaaaaaacggatcctaaagacatgcaaagaagaagaataggttgaaatgacttaccttttcgtcacagagaatcatcttcatcggttcaccagcaatgtctcccctcttattccagatgctcaataacttgacatacacgatccagttggtcctctcaagattgaaattgcccagaaaatcgactcttgccatcagaagttgaaaagttgcagataaaatgctagggttaaacagaagagttgagagactcccaattttagggttaactagactctaatatatatataattgagtaaagacgc

SEQ ID NO: 24162 - DNA, 1416 bp, Arabidopsis thaliana landsberg
gagcgggcctgcaaaatgagtgaagagaacatttcatatacagttgtttctaataagaaaaaggagattttcgaaaactcaaaacaggaacaaagttaaaagagtgagagagaaagaaagagagaagatgaaggtacaggagggtttgttcgtggtggctgttttctaccttgcttatacgcagctagtcaaggggcaacctcgcatggagtgccaaactagatgtggcaatgtcgcagttgagtacccttttggtacttctccaggttgttactatcccggagatgaaagtttcaatcttacttgcaacgagcaagagaagctcttctttggcaaccatgccagtcatcaacatgtctctcagcggccagctttcgtgttcggctagttagatccagagtttgctacgatagtcaaggaaaacagactgactacattgcccggcggaccaccctgggtaatttcactctctctgaacttaacagatttactgtagtaggttgtaacagttacgcatttctccgcacatctggagttgaaaaatactcaactggatgcatatcaatatgtgattctgccacaacgaaaaacggatcatgttctggtgaaggttgctgccagatccctgtccctagaggatactcttttgtcagagtaaaaccacatagctttcacaaccatcctactgtgcatctgtttaatccttgcacctacgcctttctcgttgaagatggtatgttcaacttcagttcttcagaagatcttctgaatctgcgaaatgtcatgaggttccctgtgttactagattggtctgttggaaatcagacatgcgagcaagttggaagcacaagcatatgcggtgggaacagcacttgtctcgattctactcctagaaacgggtatatctgcagatgcaatgaaggctttgatgggaatccatacctttcagctggttgccaaggttcttctttctttcatgttctgagtagtaatatttttcccattacatatcttgttgaatcttgcgttctttttctttgtgccagacgtcaatgagtgtactactagtagtactatccatagacataactgttcggatcccaaaacctgtagaaacaaggttggaggcttctattgtaagtgtcaatctggttaccgcttagataccaccactatgagctgcaagcgtaaagagtttgcatggactacaattcttcttggtaagtttccctcactatttctcgacttgatgtttcccagatcaacttataataatcatctctctgaatctacgatgtgtgtgatcagtaaccaccatcggcttcttggtcattctgcttggcgttgcctgtatacaacagagaatgaagcacctgaaggacaccaagctccgagaacaattcttcgagcaaaatg

SEQ ID NO: 24163 - DNA, 1575 bp, Arabidopsis thaliana landsberg
cagctatgcataacacgccgcccccgtgacagccaggcactttactcaagccaagccatcatcatacagcctacaatgacaacaatgcacattttcttcatgcttgatttggattccaacagctcctcttctaccctctcaaaaatctctttctctagcttcatttgcatcctctcaaacaccatcttcttgtgatccgtggactctgttgtaatatgcgaaatggtttcttcaagtacagtcgttcttctagccaatctctcaatctcatctaacaatgcttcgtcaacccacttgaaagtgtggttatcatcgataagctaccaaaaaacagagatttggaatcaaaattttcaaacaacaacccaaataacaataaaattaccttatgtgatgcagcataagcacatctatagtaacggcggtatggattggcggcagactttgaaattagcgccgagatactagcttcacaccaacatagctttggcacaccaaaaactcttcttctctgtccgacatttgatgttccactcgtagctccagatgaattactcatattagagctctcacttatgttgaaaattgaagaaatttgatgttgaagagagaaaatcgaaactgggttctaagatttttgggttttttgatttggggattcttctcatatccgtatttatttgggtgggtatttcgggttgtctataactcgaaccgggtatacatacggtttaatcaactgggtttttggtttggcatcgggtccgtacagtaaaccaacaataaaccacgaaattcaaaaatatggggatcgaggtctttaactttacttttagggggaacgcggtttttaactttagtttcatgtagactagagtcgaggtccgaaatctgtggagttgtgagcgtatataaaacttcccatggggatacaggtcgttcacccattttttttttaaacactgctccacaaaactaaaaattatacaattacccgcatccgaacaaatatgaaccgtatccgatacaaaacccgaatacctaggtcagttctattcgtgaaatcgagtctcctcttattcgacgacctgccccaactataaacatgacttttacacacttgacataacttcgtttgtatcgcttttttgaaattctatatattattattgtttgagcagaaactaagacaaaattaagacttttctctcttgttcttctccactgggtcgatctttacgaggttcacttgtacggattcacttgaacaacagattcgccatggccgccgccgtcgcagcaccgagactcatctccttgaaagccgtcgggaagctaggtttccgtgagatctctcaaatccgacaattggctccgcttcactctgcgatacctcatttcggaatgctgcgatgtagatcgcggcagccgttttctacctctggtatattcattcctcttctctcttcctttgcggttttggcatagatttgatctctctcaattctcaacatctttgtggtattacagttgtgaaagctcaagctactgctactgagcaatcaccaggggaag

SEQ ID NO: 24164 - DNA, 4905 bp, Arabidopsis thaliana landsberg
  unsure (1)..(4905): unsure at all n locations
tgttcagtgacgaagttacagatatatgagtttcgaggaacaattagagagttagagatgattaagcatttcttgaagatttttccatgtttgaaggnnnnnnnnnnnnnnnnnnnnnnnnnnagtcatacactatttaaagaccctacaatttttgaacgtgttgggaaggtgatgaacttctacaatatgttatcgagttgcagtgttcaattactagtgcgcggttcattgtaagggaagtgactgcactgtgaagtatttgtgggagtaaacacagctcatagttttggtcaaagtctacttagttttctgttgccttttctcattgacattctgttacgttttttgctatttttcaaaatgttacattgtcacgaggcttaacttccttgggcaaacttttgcattgtcataatgatgagggatgactgaaaccattcaaattagaaacaatcataaggcaaaagaagaagaagaagaagaagaagaagaagaagaagaaaattcgtttgaatttcaaaccagttaacaaaactgaacaatttctgaaaagactggcagataagttgtgtttcataccgcaatgcttagagtttctagatgtggacagttctttaggagaactggcactgcttgccatggactctcgcccctcctaaatcgtaacaatttgaggttgttgaacaccggcatcgactcacagcatagagagagcaccggcagcaatagacatttttgcaaccacatgtttcaaaacacttgtcttgtgcgtaaaaaaaagggaccaaattcaggttttcttcttttatatcccatggatagaagaagatatgactagagaaaacaaaatagcatactgatctcgagagtactagaggtcaagcaaagtttatgaactttttcgtatgccaagtcgaagagcaatatcatcctcatcatcttctaaccaaccattatttggggctcttgctcgttcgatttgatccttagttactacacgggtgtttgagcctcaaaaagattttgaaaattagctaagggatagtcgtctgcaacaaaatcagagtaacctaagtacacaagatttggtgtatcaaatgagaaagagcctgaaccaacactggaatctatttttagggtcttgaggcttgcacttgacacggtcgcatccgaatctaatacctttatattagccatctctaattcctcaagcgcaggacaagcaggaaagagtatctcaaacctagcaacacaaaattcaactgaatcaagaacaagagttttcagcatcggtaagaaaatgctctcagtccaccaataaagatcaattccacttcctatcttcagcttaactagtttggaaaccaattggaccaaaaacgatgcatagatcaaggtcggaaacaccacggactttattaacgggataatttccctgcaaagataatattctatccacaaaatgcatgaagctctctagaattcccgcttgccctcttccggatgaagaaagacagagtcatcgaattcaagattaggaacaaaatcaatgagatagcgccacctcttggagagaagagaagtcaaagcagtctcctttgtggtaaggaaggacagtatatgacaaagaagctcatctggtagactgctaacacgatccatcctctgaactaatattttaaaacaaatggtgctatttaattattaaattttggatgtttcagcttctcaaaagcatttttgcacgtctgagagtttcctgtctcttggcgtctgtatcaaggtatataccgagttttctcatcatcttcaagctctgagttttatttttcggaggagtaaaaagggttgtctactctagggtttggctagaggatggataggattagcaatctaccaaatgagatcatttgccacattgtatctttcctttcggcaaaggaagctgctttcgcattgattctgtcaaagaggtggcagaatctctttaccattgtaataaaacttcagtttgatgactcagtcaagaatgaagggagtttgaaggattttgtcgatggagtattggctctgcctaccagttctcgtgtaaggagttgctctctagaatgtcgaagagagtttgatccgactcattatgatgatttcaatcgttgtatatgtgctttgctgaagcgtggtatcttggatcttaaactagacatatgtgctgggagacgatattcactaccacttgaggttttcacttgcaaaacactcgttaagctggaacttgggagtgattttggtggctttgttgttgatcttgtccctgaggatgcttttctaccagcgcttgagaccctccttcttaactatattcggtttaaagatctccgccgttgtgcgtttgaaaagcttctttctgcttgccttgtgctcaaggaactagtcatacataatatggagtgggaacgttggaaatggtctggcaacatatccagtccaacccttgaaagacttactattagtcatgtagatctctatgagtgtgagtttacgagaataaatttagatactccgaatcttacctatttagagttgtctgatgctgtaccggatgactatccaattgttaatcttgactcccttgttgaagttaagctcgatcttacgttgatggtagatcacaagtaccatggatatgtagatgacaacgacacgatttctagcaatccaacaaatctgattaatgggttaagaaatgttgaaatcatgaacttgcaatctcctaatacttttcaggttagtgtgctattgtttcttctttctctgtaacatgttattacagtttgagtttgattaaaacaaaaatatgaagaatcaaaatcgttttaacattcaggtgtgcatcttaggtttcttaagatgttccagttctcttgttacataaatgaaaatatatcctagaggtcgtcttcatccaaatatatacatataatgaatgactaattgatttattttgtttcaggcattttcttacttccatgaagcaataccggtgtttaaaaacctttatcatttaactatcacaaataatgatactgtaattgggttctgttgggaatttctaccatttgtgataaagaagtgtccaaatctaaagactcttgtcatcgatgtacgatcaatacccaaaagtttattgtacaaatgcaataaaaccttgtagatactccttgattttcagtttctaatattttctcttgctgagttgcttcagggtccattgcactacaatgaagaccgacccaaatctgtttgccactgtttgtcgggatattctttcttattgtcatgtcctttagaggtcttacagataaccgactatagtggaactcctggagaggtggagcaattgaagcattttctagagaaactgtccggtctcaagttggtgaaacttcattctcttacaagatttggtagcgacaagaaaaagttattaatgcttcccagagcttcctctaagtgcaagatcaaggtcacgttttcttaaaagctttgatcctcctagttgcaatctatctgttgtatcattttggatagtgaacactcttactcacttatatcctctgtttatcttttgtcggattctccttgttgtcctattttgaacttatcaactttctggagcctgttttgattcgcttttcatttgtaatttgctttgatagattcttaggaaactgtaaaatgaaactcagtatgtatattattaggcgtggataattctaaaagcctaaaattttcctttttggtttcttattacacaaggtacaagttctagagtgattgggaattgaattttgctctgtagtaaagtatgtgtcagggttttataatctcttttgcaacttatttttgcttcttgtccttataccttcggtttatgtcttctttttttgagacatatactgattctttttaaagcattatgattctctagagaatgctcttcttccatcgctcaagactctcattcttgattcagttaagttctatgatcgttgtggttgttgtgcattccaaaagcttctttctgcttgccctgtgcttgtggaatcagtgatgcgtaatctggaatgggaagattgggaatggtctggctgtgcgtccagtcaaacccttgagagacttactattgaccatagatattgggctgaacataacttggagagctttacttttgatactccgagtcttacctacttaaagtacattgattttgttccggaggagtatccagttgttaatcttgattccattgtcgaagccaagctccatcttattctcactgggaatcaagattaccctgtaagatacctaggccgagaagatgatcctattacaagcaatccaactaatttgatcaaggggttaagaaatgttgagatcttgcatttatctactgcaactgcgcaggtaattaagtgtgtttggtttcttctatttctccaatgcctaaataaaagaaagatgaaaaggagaatcaagcgtgcatctcaagttacataggatgttccagttacgtatatgacgaattgtttttgtgatgttttgtttcctataaattgcacttattttatttttatttgatttcagatgctttgtttcttcccccgtgcaccacttccagagtttgtaaaccgacatcatttaactattggtccaacttatcacgagtgttttaactggcgacttctgccaattttgctaacaaagactccgtatctaaagacgctcatgatcaaggtatggccatacttttgcaagtaaaaatattgacaatccgcaaattccccccgtccttgtatactcctaaatgtttaaaataatattctgtcgattgagtcagggtcc

SEQ ID NO: 24165 - DNA, 2760 bp, Arabidopsis thaliana landsberg
ctatggatcggtgtggtggttgggtctacggcgcaaggaatcatactagctatagtcactgcttgcatgagttggaacgagcaggttaatatcaatctgaaatatttatgactctttgttttccgtactgatgttgcttacatcttgaatttgcaggctgccaaggcaagaaagagaatagttgtaagaacttcttcatttggcaatggacttgcttgaatggttctttatttccatttttgagacaagtcacattataattttttttcttcaattttgttataatcatcatcacagaatattggagtgaaaatgacatctatataaacaatatttctatttaacgaatgcatatttatcacctttttttcttttgtggaaagatgcatatttatcacttatgtaaataatattacttagcattggcttgtataaattaatataataaagttgtttataagaaaatattataaaattttaaatttaactagtatcttatatctgttttacctatctgttattaagagtcggattcgaaactcatgttaaagtaaatttaaaagagagaaaagtggttcaagttcatttactctatttttcaaaaaaaaaaaaaaattcttcctctttcatgtagataaacaaatataattaataaaattatttattttattctcatttacttttttttttttgcctttccttctaattactactatacgtttactctaattttattctcaaaatttaccaatcatacccaataagtttaatattattttaaaattcattgtctaattaatgtttgatttgattaatcgacgaccacgagttccacgggttgtttttaaaattgatatatcatatattgaaaaagctatctagaagaagtacccatagaagaagactctcaaactgaccgacacaaatcgatactattgagtgttgagcaaatactagatccccaatttcgatacttttacgcctacttcttttgcatgcgtggataggaaacattaatttacatatattggtttgtcagaaaaatatagtaaattttttattaaaactaaagaaaagtgtttgaatatattatttaaccgccatattatgtaagataacaatgatacattgataccatatcgagttggtggatgtaactttgttttgcctatgcaaataattttgataccaaggtagcctaaactgtcaataaatcatataacttctacaacatgttagcatgattgtcaatgttgttattatgatgctaattatgttagcatatagattaatacatgatcacaatgttttctctctgcacactgcgatcgatttttaatatggatttatccagtacaaattcgacaatagttgttatttcgcaaatagatgaattattgaagaaacatgagattatgttgcattaaacatatatgattttttgtgcaaaagctttgtttctattcaatcactcaaaactattacaagacttaggagaatacacattctcagtgtttgaaacgacaaagttaaaagcagtaaacgaaaaagtacgataatccaacgatagatccataattactttcatacaagagttgtagaacacaatgtcacatgccagaaaatggtaagtcggagacagtaccacgaaagatctgagaagtggtagattggtcatagtccattaacataatgacgttgaaaatgactttgtagcctcgagtctcgcagacacaagatactcttcacaatacgatagcaaggcaattgggaaaatcaagcgatttctcggcttaaaaaccggaaaccaaatacggacactcgttataaaagttctctccataaaggaggaaagtgagataaatgttctctctataaaaaaggagactgagatatatgttctcttcataaaggaggtggaaccaaagttttctttgggaagtttgcacaccgtggaccctcaaaatcatgcaagattacacggtgacaatattgaaattgtcgaccctcgcacggtcttctgaaataagcatgtgacatatggcttgcttcacagtgtaaacggtgaagatgatatatagtagaaacaacagaggccggaaaatgcgggtcgacgaaatttatttttatattacacttattttatgattttatattttaatgataaatatcatattatatcaaatcatgattacatgatactttggacttatatgaatacataagtatataagaaagaatgtgacagcatagattattgattgtatatttgtatagtatagtaagatcgttaaatgtctcctctctgaagtcgtgcgtttacaaggaatttaatggaagatccacttttattgggagatgatcagttaatcactagaaacctcaagtcaacgctgacatggtggatgaattttacggcggagctgaagaacgtcagctctatggcggcgcctatggccaccgtgacagtggctcaatatctattgcccgtgatctcggtcatggtcgccggccactgcggtgaactccagctgtctggtgtcgctcttgccactgctttcgcaaacgtctccggcttcggcatcatggtaattagtttatcctctgtttaaaccacgttcaagatccaagcgaaacttaacaagtcttggaaatttttgcagtatggtttagtgggtgcacttgaaactctatgtggccaagcttatggagcaaaacaatacactaaaatcggaacttatacgtactctgcaatagtct

SEQ ID NO: 24166 - DNA, 1380 bp, Arabidopsis thaliana landsberg
attaattaagaataagcaaaaagataaatcctaaacaaaaaatattcttaatccgaatcttcggtaaatctggagaaaaggaaatacccaaaacaaaatcaaaagggattagggttcacaaagcattatataaacaatgataggttaggtcatctcttcacaactcattatatcgttcaacaacaacacaactctctctctctctttgattcagcctcttcaatatctcataacctttttcttcttcgcctctcagcttttgttcatctttcttccttccttttgttttgtgtataccaacgaatcatggccacagcaagaatgaagaagatcttcagcttcgtgtttgtgatatttacacttctcttcggttgttgttcggccaccgtctacaaagtgggagactccgatggatggactgccaaggaccacctctattaccattggaccgaggataaagagatccacgtgggagattctttgatcttcgaatacgatcacaacctcaatgacgtcacacaagtctccggtggtttggaatacgaattctgcgactcttcttttcctaaagccgtctacaacacaggacatgatgtcgtaaccttcacggaaccagggtcttactacttcatcacctcaaaccatactcaatgtacatcgggacagaggcttggcgtttttgtcgtccatgacccgtcgagtccgagtcctctaccactaccgagcaagattattccttctagacatgtctacaaggttggtgactccaaaagttggggcgtttacgacagtgatttctattacaactggagtaaagagaaacagttcaatgtcggagacggtctccttttcgaatacaacaatgaagtcaacggtgtctacgagatcagcggtgaccttgaattcttaaactgcgacccgacttctccaatagccgtgcataagacaggccacgatatcatcgagctcaccaaaccaggaatccattatttcattagctcagaaccgggtcactgtggggctggtcttaagctccaagtcgtcgtcggaacaacactcaatgttccaaagttgtcacctttagagcgtctcacaaggtggttagacattttaagacaccactaagcgtctgtgtcatctactcaaccatatgctactttcgttgtcgattggtttaagacttgctaactaattactagttaaaagtctcttctttcttatttttttcatagttttgttgatttgttagttcttatttttcaccgatgtaaactatgaagtttcttcccattcttattgtaaaacatattttttaattgaagtagataggtgagaatatttagaggcgatcaattttgaaaaattttgaaacccatcaat

SEQ ID NO: 24167 - DNA, 2399 bp, Arabidopsis thaliana landsberg
aagctcccggagcttgttgtctgttgcctttttgctattttgagcccctgatcccaacttgagtctgggtgtcggctgcaggtgagaacaccttcaagagaatgaaacgagacaatcaacattttagtaaaaacttgacaaaaacaatggttgctttggatggctcataaattagtatatatcacaggaatgtgctttcatgaccccttaaaataaaagattggaatcatgtaggaatcaatgccaagaggagtaactcaaactataacgcatgcctcatactaccctagttttgcctaacgccaatgtaatcgtcaggattccttcctagttactaagtgattttccatcaaaagatcaaatcttgacgggcatacctgactcttctttgtggggatggttgtatttcgggtgatcagtctcgtaaagacaccaccaagtgtttcaataccgagcgatagaggtgtgacatccagaagcaacaattctttgacatcaccgcggaggataccaccttgaagtgcagctcccatagcaacagcctcatcaggattgacacctttgcttggactctttccaaagatctccgcaacaatagactgaaccttggggacacgcgtcattcctccaactagaagaacctcatcaacttccttcgcacttataccagcatccttgagacagttcttgcaaggatcgcgggtcctctcaatcaagtgattcacaagagtttcaaaccttgaccttgttagggtgatgttgaaatgctttgctccagatgcatcggctgtgataaatgggagattaatttcagtttgagaagtagatgacagttcaatcttcgctttctcagcggcttctctaagcctctgcagagcaagtctgtctttggctaggtctattccctcagtggtcttgaactcattaaccaagaagtctagcagagcattgtcgaaatcctctcctcccaagaaggtatcaccattggtggctttcacctgaaaaaagcaatttaataataagaacgattctcaaagaaaaagcaacagaagacctgacaaacataagatcacatgggagataattacctcgaataccccattagaaatctccaaaatagatacatcaaatgtcccaccaccaagatcaaacacagcaatcaacccctccttgttggtcattccataggacagagcagcagccgtcggttcatttatgattctctcaacatcaagaccagcaattctaccagcatcttttgttgcttgtctctgagcatcattaaagtaagctggaacagtgacaacagctttcgtgacagattttccaaggtaagcttcggccgtctctttcatcttcgtcaagataaacgctccaatctgactaggagaatactgctgaccattggcttcaacccacgcatcgccattaggtgcacgcacaatcttgtaaggcaccatcttcatttctttctgagtttgtggatcgtcgaactttctcccaatcaaacgtttcgttccagatactgtgtttgtaggattagtgacagcttgtcgcttggctggtgtacccacaagaagttctcctttcgtgttgaatgctacaactgatggagtggttcgagcaccttcagcattttcaatgactttcggattctacaagatcagataaaacacacacaaagttagctcaaacatcaaaacctcaggaaaaaaaaattataactcatttagaaatcagcagcttaccttcccctccatgacggcaacacatgaattagtagtacccaaatcaataccaatgacatcgtttccagcaggcttcgagctaaatcaagaagaataaaccttaagaaacagagaaacatagcaagatctttggtggtagcaaataaatggaaagatcaaatacctaaaggctctggaaaagcttctaaaattctgacccagataggaactgttcaatgatgctttcccactgcttgaaagctgcaacaagattgaaccagatcaggccaaggaaattcgaacaaacatcattttcgagattgcgagaaatgaaccataagaaaagagtaaaatcagatcatgtaagttagctcacttgaaactctgatttcgctaacaggtctcgtaaagatagaagaagatcgagagaagatataaagacttacgcatctgtaagctgagaaaggagaggaaacgacttcacggcgtcgaatagagcggaggagagctgcggtagccatggtttcgaaattcaagaggtggtgacagatcagtaaaggaaaattgcaaaatgatgcgatgaaattgcgtctgtgcaaaagctagggtttagggtttttgaaggatacgaaagttgttttctagaggttgagggaagattctagatggtga

SEQ ID NO: 24168 - DNA, 2051 bp, Arabidopsis thaliana landsberg
taatttaatcaaccccttccccgtttctggccaattatagctatcttaaattactagacaaaatagatttctatcttccctatgtttgacaaagaaagagcacaggacagaaacaacaattcttggaacaatttcgaaagaaataacaagtgtaaaacaagtaaagatttacagtaattctaccttggtattaaccgtaatgacatttttctacacatgaattttctatctgcctgcaacaagaaagaggaaatgaaaacagtatagtaacctcaacagacaatgcgagtacccatgtaagacggacctgatgtaagaaggacttaagacatataataagaagatggctcagctgctgtgcggatgcggcaaatgaatcatgctcttgtttactagtggcagtgttgcaccatctttcctcgatcctaaaagcttctcgctgcaaaacaaaactcatagtcaacaacttactaagctcattacacctaagtacatttataacaatggagcacttcaatctatatttgtcgaactcaatccaactgttgctacccgcttttccaaccattaaaacaaaacccttttaatcaacactactttctcataccaaatgcttatagtagacctttacaatcatttataatcataccaaatgcttctagtagacactacaatcttaatcaaatgcttatagaagatgatcatatgatctaaaagactacaaatcataacgagtaactaagttagctaaattccatataatcaacagtgtggctcagattagattcctgctcatatactaaataacaagaaacatccctagcatattccaaagcgaacagaggggcaaaacggtcaatatctcaccttgtatacggtggcggacagaagatgatgaagtaatcggctccggtggcgcaagtgtaagtgctcgtcttatcgtcataggcgtagctgtatgctcgtgggcacgcatgcttaaagaagagcgagtaaaccgaaggctgacacgtgtccggcgtggcgtacgcatcgctgcagcaataccttgggtctccgaatgcctcgcacgcgctacggcaagcaacaccgttcccattcccacgcgtcaccagctttaggtctctgggacacgcgccgttcaagtccacgagacacccggtggctccgcatcctccaatgacgattttcttgggcaagattagcatcgggagattgtaaccgtcgacgaggctaacgtcgtaaaaatctagtcctcctgtgccattgagagtaaactcggcgagagttgctggaggtttagctccggagcctgaacattcgacttttcccgagccgcaatctccggttaagcagacgaaagaacctgaactccgatcttgtgaacacaaggttcgtgcccagagacgaccggaccacgactctggtattgcgacggttttagattttcctctagagagacgaaagccagttgtggggagcggcgcagagttagcaccagagagcaaaccgggccatatcgtgttccggcaacgattcgtgatcttgaacgaaattggctcaactgctgccatgtgaaaccaattcaatcaaaatcgtgtaaagattgttaaactcgatagtcaagcaataaagaagcaaggaattagacagcgattattgacctgaaagagatgagacaaaagccaggatcataaacaagaggatccgattcatcattgctgttgcaggaggattcgatcggattctaaagttgaatgcttgaacgagtaaagcgagcacctttactttcgaacgatggaaaaaccggcggaacagagaatataaagagagtgagagtagtcgatagagtagaagagcttctctgtttctttgaaacaataaaaccgaaaccggattattctagttccaaactgggttggtgaaccgaaaattaaccggttttacggttatccatttagcgatgcgcacgtggtatttaggttgtggaccatgaaagttcaaacatgataaaagttgataatttatagagagcactcccatttccaagg

SEQ ID NO: 24169 - DNA, 3853 bp, Arabidopsis thaliana landsberg
  unsure (1)..(3853): unsure at all n locations
gaaacatggttttgctttatagcatatgcatgatcgctaagggtgaagcggcatcatactcatgattcgttaatttcagaatgtgaccaagttcgtgggaaggatatggcttaacggcaaggatggttgtccgggcaagtgggtggtgtttaagttaaagtattggatcgaatgattgtaatagcctatagtgcaaacactcatgtcgttcgaaaccttatatgaataaagctggcttgtttctttgtgtgaatctgtctcttttttacttatgaatctcataatttccggtgagaattacacttagagcgaattcggataggacctaaggacacttgagttatcctcggatgggaacaacctcaccgggcggacagcccgggatgggacgttttacattcttcccatccactcgaccaccaggtcgagtaacctcagctcaggccactcgatgacattactcgaccacctggtcgagtatcacttcgccacaccacctgaccacactcgaccattcactctaccactttactcgaccccctggtcgagtatcacttcgccacaccacctgaccacactcgaccggacactcgatcacgtcttcacaatctactcaaatccgcactcaaccagacaagctgagcacaaggaagagaagaggagaagacaaacggtttggaagcggccttgacctccatcggatcacgaagcccatcttagcccattatcactctatgggccgggcgattaggttattggcccgtctactatcattttatttcgttttgtataaatagatgtcttagggttctgtcctgagacatctagtcgacattgagtttttgctttagttttatttttctgttttactctggctgcgccgcttttgcttctgcaacctgtaattcgagatttttccaagttattcagattccgcatttgatttcatctgtcatcttgtttctctactctttatctctttacttatgcaatattatcatttatctgcgtttatgtttttgagcatgttgtttgagtagtgacttagaattcttaaggatgagatagagtagttgtggaatccgtagtctgtagaatggttaagttttagaattgattgaatccctttaggactagttgcgtttactgcttatttctttctgattaattggaattcgatcccaagcattcccgcacccagaaggtgttcgatggaatgcttgatccactagttcctgagatatgcgtctctatcccaagggattggccgtttagagcgtttattgactttatcagtctgtacttattgcctgcatagtttgaatccgttaatgggaattagtctgggctagctttgcttgaggatttctatcacgggagtgaattgatctgttgttgaacctgttgtctagggatagcttgattgcgcttgttaaccattcgaataggctaggataccactctactcgattaccccatccttaggaattcctcgtctatcttatttctctgttttatcgttatcgcttatcgttctcattgcctgtttcttagtttttacaatcactcgaccatcttactcgaccacacccagtgtctggcaacagactgtgcagtcgagtaagattgtcttgttttctgtctgttactcgaccagtatactcgaccacacccagtgtctggcaacagactgtgcagtcgagtatagctgtttcatgtcctgtctgttactctacctgttactcgaccacatcctacttctggcatcagcctgttgtggtcgagtgattttagtaattctgttattgcttctgttttctgcatgttcgcttaggactgttagaaaccccaaaactgttattgcttggcttgacttagtgacttctgatcacatttcatctgtttgcatcacacccatttggattgacacctaaaatactacaacgacatgattggtgttttaggataattgaccataaaaacctattatcaattagttcacttagtatctaaacgaaagcccttctatgagcatacttgttcttttttaaatgcctaggctcatctatgatagttcaaataacaagtacctatggtgggcatacctattatctaataccaagttctagttagctactctagaactagcattaagaacaatcaagatgaagacatctaaatatattatcctaacagggtttttgatctactaattcatccaaatccctaattgagaatccctaaacccaacaagagactactcagacatgattatcgaagaacaaaacatgtttgaataagaaatcattgtaagaaacaataagagaatagagttaagaaatatcttttctaatggagtctccacagggtttgctcccaagaataaaagagataataagtgtgaggtctaaacaatgaccttaaaaactagtcctgggcgttcgggtacccgaacccgatcgggtcctttttttgggtatcgnnnnnnnnnnnnnnnnnnnncaagaaccattcgattaatgcaaattatcggttcgggttcggttcggttctaattcgagttcagttcggttcctctattaaacttaagaaccactgaataaccgaatattttcaagtatgttcgagtatcggttaaaatcgggtatttagtaaccaatttatctaaaagaaccaaatttttcaaaacaataatgtcaactccaattttacttatgcagacgatgcaaattgtctaaattctgaaaccaaactgcagacatagacatatagataaagtgatgcatgtttgaattaaaaccaaacacgaacatatagataaattgctgccttgtcttaactgaaaccaaagcaaacacaaacagattcattgtctaaattaaaaaggaaaacaaaacacaaacatttcaagctttgtcttaaagatacctgaaacaataaaagacaaagtgtattagagactagagataaaaaaacatacgagcatcaatcaacaaacatcagaaacacaacatgttgttattttgaaaagaagatagatcaataccaaaagcacttaaaacagagataaatgcatacgaagcaattgagaattattacctaaaacccgactatgagttttatagtgcttcaacgttgctactcctgttgagttccaaatttccaaactctaaaaattatttaaagaacaaaatttcagtaactgaaagccaacaaagctacaagtataataaagacataaagtagaactaacctttctccagctcatcttgcgtctcaaagtcataatatacatgtggattactcatagcagcttgctcctttaacttcatctctaacttcatccattggtctgtgcacatcaaaacctcaatggtgtaatgactaagacaacttctacttggttccaaaaggcgtccacttgtactaaaggcagattctgatgcaactgatgacacttgcatagcaaatacgtcttttgctatttctgataatacagggaacttaccagaattgcgcctccaccaatccatgacatcattctcattaccaaatatattactcttcggattctcagccttttctttcaaatacatgtctaatttatcctttgcatcttgaactcctatcatatcaaccatctcatcatacacagactgcattctttcaaatccacgaccaacagaaacatccggaatttccatctcctcctcaccttatctagcagcttgttcatggccagcagaattgctcccaacagtattagaagatgatgcatcagtagagacttggngataaagtctactatacttccttaaaagactagtcaacacagaatatgtagaatctaaca

SEQ ID NO: 24170 - DNA, 748 bp, Arabidopsis thaliana landsberg
caaattattaaacaatttttttatagttttgatgctaaataagttatataatgaaattgttttgacgatttagatacaataatattaggttcaaaatgacaatactaaacaataaattatcagatcatatcaaaaataaaattatttttttcgataacagcaaattattaaacaacttttttttattgctagataaatgatacaataacctcattcgatatatataataatattcaaatcaaaatgacaataacaaacaataaattattatattgaatcatataaaaaataagagatacatgcaacgaataattaaacaaacaaattaagtaataaggcaatggatagactaattaatgaaactaaaactgtggattatctattttgtcgtctttcggagaatctaaacttcgaccgacttcaacgtatctaataatcctaaagtaaccttacgctcacagttcggttactttaaacttcgtcaaagtcattttgataaacgtccacatcacgaaacggtccacgtacgtctatctcgtggataagtctccagccgctgtttcacatgcttatctcacagctttgttacgataacctagtcctatgctaatatctttaactatagttaaataattttaaccaaaccacggttaagtgtttcaactacataagtagctttgccggtgttttacaaacaaacaacacatacaaaaaaaaagaactcttttgtcgactaatgtgatttatt

SEQ ID NO: 24171 - DNA, 1660 bp, Arabidopsis thaliana landsberg
gtgagatcttgtagctttcatagatgtaaggttgaaggtctatctattgaagatttgaaatgacactggcctgatctctttggagatttcaaaaattatatgattgttaaaacttcattgaacatctttctttctgaaggctccactagagcatagagtgtagatatacaactcatcaattgaatgtcctattttctcatgatttttttctagggttgctgtctggagtgtaatttagcttcatttttgcctttagtaggcgcaatccacctcaaaacttatgatctaaaaaactcacaagtggtgctctgttcattcgatatttgtcatttctcttaaatttaaataaactattttcgtattcacacaatataataatattattgacaatataatattttatttcactttaataataatcataatcataatttattacatattcattctataaaatgtaactcctataatgtttgacaaaaaataactttacatataaatacaatataatgtattaactgtcatctcgtttatgttttagtagaaaacatatgattttacattaccaagaaaaataaatcaatattttattacaatatattgtattaactgcaattgtgtttatgtttttgtggaaaacatatttctttgcatttatcgaaaataaaaatataaaaacacaaacaaatgtatttaaaaaacataatcatcatcatcatttattgcatattaattctttcaaatgtaacttccacgatgtttgaccaaatttattaaaaacaaaaccacaattaaaatccatgacaaattaatttctctataaatagtaagacaaagtcttatgaccatccgcaccataagtctttgattaaaagtggttcaaagttggaaatcagaatggtggtgcctcttcttcaagacgacgccaatttgagaactactatcaatatagtgattacagattctcaaaggcgggtggaaagggtggtaaggggaagcagagtgagtgtaaagaaaaggcagccatggagataccagagaaacaagctgatttaattgaggagtcacaaccgaaacaggttaggaaagctttgttttcgtctttagaatcaatggatttggctgcggttgggctggaggttgagccttcatgtggtaaagtggatagcttagaagaaggggagctgattgcggatcatgagacagctttgcatggcgaaacaataactggagtcaatggggctgagaaaattggtatgacagttgaagatgtggatggggacgatctgttggagatttgtcctagtcttcttgtttcagttaagactgataatattgatggaacaatggagattcctgtgctgaatctgaggtctgaggaggcagacacggaaatgatgagttctaaagaggatgctgaggaggaaagtgtggtgagggatagtgatcttgagccggctcggaaactgaaaggtaatggggttctcatgggtgttagttcaaagaagaggaatttattatcgtcaccacggaggagagttctcgcttagggaggagaactagccggtgaaggagtcaacccaacgccccaggggatggtgaagggttcatttgggtggaaattaaccccacccaaaacccaagggttattaaaatggaa

SEQ ID NO: 24172 - DNA, 4865 bp, Arabidopsis thaliana landsberg
aaccattgatagctgacaaaagctcccgaggagccacagttgatactcatctgaaagttctgttgctctcggtacatgccctttgatacttcaatttgaagaggaacaactccatcttccccatagctcctctgaggtacgttgcagtctagttgatactgattggattgatctgtgaattgcttatcactcgaactataatcaacaaggttcagaaactcatccccaatcgagaagccattgttgttaccactgtttttccctgaattaggcaacaaccatgaagccgcctctgcttcatcttcatcctcttcttcttgaccaagcacaagtctgttctctggatctgtcactgttgtctcacatgaatggttagtggccgtggaactgtaagagtactcagaaatgggcagaattggaactcgttgatggcgtctagcaagtgggtttgcggaatgaatctctgaatcacaggttgtgcatagagatgcagcatctgccttgcagaaaaaggcagccggggctcgctcacatgattgacagactcgaacacgttcatggcgggaagcaagacgattggcagcatgaacttgagcatcacaactggagcacaagtaggcagaatcagcccggcagtacacggtgcaggcggctgatcggcatgtatcacaggcttgtgcccagttactctctactttcaacatactaaccgcagatgttgtagttgtttgatggtgagtgagatcgtatctaaaggcagcaggggactaagaaggctatattagttgttgaatggaaatggaaaggaaggatagaattctgagggctggacacgtggcgagaagtttgtgggtttgatgttgagtgatcatcttgtggctggctgagtttttgagaaggggtccagtgcagagatgcttacagctttggaatcatcaaccagcacgaaatgtgaaagaaagaaaaaaactaattgtcttcttatatctttgcaatggcaccaatagttactactttttctctctttcttcctcaataagtgtaaacacctcttcctatgtaatcttctataggacccatccacatgttacctaggttctgaaacgtgcaacttctaactatttttgtatcatctactactattttggtaaagctggaaactttagtagctctttggcttgaccattagcctaatgtttatcttgattcttaacttttgccatgttctaactgttcaggtttctctcatcgtctcatgatttcaattataaaaattaaatgatcactgtttagcattgttaaaaagattatgactcttaaccatttgttatcttcgaatgatgctaggtgtcttttttggtgatatgttggagataatagatatggcatgtcctaactttgtttccttccacatcaagtcggtcaagctgatttggccaacggtggagatccaaggagccaattggaatctgccaagtcgctacgagtctctagagattaggagccacaagttgaagcaaatggtgggtccaaattaaggtgaataacgatagttatatcaacatcacctgtggtctgtttatacaagtccaatttgcttatgatcaccatcatattcatagttacaaaacatgtataagtctatcaagtgtttgtcacatctcaatcacctttttgagaatatgataaaactcgatattatctttactagcttttattagatttcaaacttgtggaagtaatcatattcatgtgttcaaatctacatgggtcaaataaatttggtggagcaacaaagtttgtttttatttacatgatgttctactgatgcaattaaaaacacagcaactaacaaaggtaaaaactgaggatcaacaaacaaagcttgttttcctttcttggcagtcagaaagggctaatctcacgagccagtttcagtaacaactctggtacaagacgctttctgggaggagccaacgagtctttggtcagcccatcattgtcctccgcatgtatcacagagattatgtcatcaaagagttcgtctttacctcctcgtaagggatcctataaacaatactctcatgagttttattgtactcacactgagctaagtgtttgtgtgtgtgacacaatgtaaggtaagttgactgatttatgtggcttacctgaagaaataagtcagtatgtgtctttccgctgtataaaacaagctcggcttttgctccaacagcttgcagagcgtctgtaaaagttttgctgcaaacgaggtggttttagtatcccaaaaggtttcatcagtaatgtatcacttcaagaagatgatcatatatacctttcatcgcatggtatggaataatctgaggatccgtggaaaagtataataggaggtaaaagagaagcagcttttccaacaactgggtctttcagtcttacttccggagagaatttctcaaaggactcttctccttccattatgctgcaagttggagttgaacattagatctgatcagactgcgtttaggatttggttaaccaagcatttaccttaggaaaatcgagcgatacagaccccgattatggaagtgatcaaccaacttgtatagattgtacctattgaagttcaaaatgataagcagatcaattgctgtacaccaaaaagcacatagaagccaacgggaatccaaaagcttagaagataccctccagataatccaaaataagcttttatctgggacactgtccaggagatgctctctccttttaattctttagtagcttgttccaatagagcacaagcggctatatgggcaccagctgattgccccatcaggtagatcctagagagacaagcagatacatgcagttcaatagccgagagaccaattggaagatcaaatggtaaataaaaacaaagccaatgagatgaaacctgttggggtcacctccaaatgcagagatgttattgcagacaaatgagattccttgagaagcatcagtcaccatatcactaattgttccctgaggaaagttcctataccataaagaacggattgcttggtaaatgcatgaaagttcttcctatattcataaaagacgactagttttttgaattgtgtaatttgtttacctgtagtcaaggcatgctacaatgatatctctttctgctagctgcattcccaagagcgagccccaagctttgtacctaaatatcagtacaagattagcaaacatgaacttattaacaagcaaccagctagtacaagaagatgaaacttgagtgagtcagtgagataagaatacagagcacatcatgatctttacttttttctttttgtaactcaaacatcaacaaaagaacagtgaaggggaaaacttctataagtgggacacgagaaattgcaaaacaaacaaatttcaacattatgcagaagagaatgctgtaaatctgatgtgcaacccacccaataatccaagctccacccgtcacaaaaaccacaaccggcttcaagccatcgttgttgcttggcaagtacagatccagcctaccaaatcaccgttcatacatcaataatctcaagacaaaggtgatgtgataaaagcaggcattcaacataccacttaaggccgatgtgaaaggagaaggtaagattctattcagttcacacacaaacctgttccttggttgatctccatacactatactcctccggacttgctttgagaaaaaataactatatgcaactgcacaagataatacaaacttgagacgaggaatcaaagactaattttccaattaaaacaacatcttaatcaaaaggaaaaatcctttctatgaatttatttatcagcaaagaaaaaaaaaaaaaaatcaaaccttgaagaaagccaggcataagaagcatagcataacatgtaagggcaagtaattttgtcatccatcgatagcctaccctgaacaaaacttaacaattagatcaatccttgctcaactggaaatataaaaagaagaagttaaacaagagcaaaacaacagcacatggagtaactttcataattagagtaaagttccaaaataaaagacagagaacttttatatatcattggattctttgcagagcaaggcaaagccagctaatatctacacgaattacctccctaagcgtaatcatcaatatacctaaatccaaaaacagggacaatcgagatcagtacccgaggtatcgaagaagcttgaagctaagtccagtaattagatacgtttcagctgccgcgtggccgatatcgcgaccgaacgattgctgccggaaaatccgacgaggtccttcgtcaaccggcgacttcccggaaactcgacgacgtaacggttcaccgttaagaagagtcgttctatcggagtcctcatcgggtagaacttcctcgatctccgacaccgtcgaggtcatcggccggcatcgctgctccggttgctgagtctgaagaggcgaatgcatcttcttcgccgtgaaatagtggatctcaattttccaagattcttcgtgttgctcttctcttttgaatttcaaactctttttgttatcttcgcttttgtgcgctttccatttccttctagacgaggaatgtagtaaagtagtgtgtagatataaccaaaagtttgtacaagacgacgacgttcttagctcttattgatgacgtttgatcatgtaatgatgtgtgattaaagagaatcaaatgtcagacagtaatgaaattattcgcaaaatattgattattctaaaatgtttgttagtcatttcatttgtgattggatggagtagtgtgacgactttggaagctagtattagcaaatcatgggctttaccacg

SEQ ID NO: 24173 - DNA, 810 bp, Arabidopsis thaliana landsberg
  unsure (1)..(810): unsure at all n locations
gaacaaaaccctagagaaagtaaatttaaagattgccttccacccaaaagccacgtgtgatgtgaagaaacaaagttgaaacacgtggactgaagaagccttagtcgtcgctgttcatcgccgaactggttagcaactcagagaactccaaaaccatggaaaccgccagagcttcaagagaagtctatcaatttttaattagagaaccccaccaaacttcatcagcaaatcaggaaaggaaagatctaccaaaggcaattgactcccgaaatccaaggaacatcgacgtagagtaagtctttgagctttcaacaacacctaaaaacaaacaaaaaagcactcgtctccataaaacggttagagaaatagccacaattgcattagattcaaccgagaggcataaaaaactttaatctgcaactcaatttgttcttaaaaannnnnnnnnnnnnnnnnnnnnaaacaaatcgagccctttaaacaaaggaggttcaaggaattatattccaaatggaaacacaaaagacctcaatcaaaccaaatataaagaaatcgagagatgaaaacataaatctaaacggaaatcaatttggccaaaagctagacgagacaccgaagataggcggtgaaactctggaccttagctagcccaccgccgctaaagaagccaacggaagccagacgcaagcagaccaccgccgtaaaaaaccggacagtgtcagaacataaacagatcaaacgttgcccaaaaagtcgctggacaaaagccagacatccatactgaaaaagccatagattctggacagaaaa

SEQ ID NO: 24174 - DNA, 829 bp, Arabidopsis thaliana landsberg
catgtttttgaggaccttctgaagatgaaggcccccaacagtagcccctcgcaaggttaatatgttagaataacgaatttagattgcgatatggacgaaggccctaagccgaaggtccaaaaaaacaccttccctttgctagaatagcaatagttaatgacagacggggccctccaacttggagcgcactgggcgtataaataagaacccaccccgagcacatttgatacgctattctgccgcctgctttgcttgctcaattttttagctcttgcctacgaacgcttgcttggtttcttagactttctaagcttcgactttaaggacacgttttcaccatttccgaagaaaagatgtctgaagacaaaaaagttgctgctgagacgaagctgagcgagtaggagaagctccttgaggaaaagactgctggatttattgagtcaattgcaaaaacaaacatagaaaagattatgaaagaaattctagaaggcttatctaaagatactgatgacagcgccagctatgatgcagaaagtggaggcgaagattatgaagatcggccctggcgaccaagtcatgcagtcttcgggaaatcaactatcaaacagagccatcttgataatatgagaggaaggtattttcgagatacgtctagtgtgagggctgacacagacagggttgttcctgcccccgaagaaaatgaagttgtgatctaccgaagcttcttcaagtttccattcaatgatacactataaggcgacatagataaattccaactatggaatgcaaattcgtaagatttccatgcatcggatcccaactcaggtga

SEQ ID NO: 24175 - DNA, 1871 bp, Arabidopsis thaliana landsberg
  unsure (1)..(1871): unsure at all n locations
tgcatagacatgataattgcaaattcagatcaggttctaattgatagggaatgacatcagataagcgagtttcgatcaaagtagtatagtcaagttacaaattcaaagcagggtgcagtcttacttcagagatacaatcgattatgcaatagagaactaacaacatgtgcattgaacttacttcattgaatcaaaacatgcttatcggtttgaaatcatcattatcccctatgcaaatgagcaatcctaaatgcaaacactctatatacaatcctaaaatgatatacaatctacatgacactcttttttttgtgaaataattttctgaaattttttcaaatttttatggtttttttatgccttagatgatgcaaaatttgaaataagacaagaaaacacaatgttaaacatgtcttgaacgctcccccaaacttaaattacacattcccttgtgtaatagaaatctgaaagagaattcaagaccgaaacacaaaacaaacaaagaaaaataaaaagatgttatggagacatagtcatccatactctcttgggtataggcaggggctgaagttgaggcgggagggtgttgctcgttctgtccggtcgagcgtgtggaagctcgtctctgcctactccttggnnnnnnnnnnnnnnnnnnnncttcccgaggctcaaaagatgaagctcggggttgatcgatcctttcagctctccttgcatctgagctcgttgaaccgcttcttcttacttcgggggttggagacggtggccttggcttgctctggaagtccttgagttgagcagccatactcttgagagacttcttcattgttctcctcttcttcttgaaacccttcattgtctttctgtgaaggttcccaagctcttcaagtacatcgagcttcttgtgaacttcagcaaactcatctcctccttggttagcaccttcttcataatgagcttgctcttgttcgctggtcccatgctccggttgatcaatatgttgctcaaactcgatttgctcctcataatcagcttgagtaaattactcatgttgctcatagtcggctggactatattctggtttatcttcccgagctcctccaatgtcgatgttcaaggcagagggagatggcatgaaattgatgttgcgtcttgtcttcaccgaagtctggttctcgcatggtaggggtagaagagaaggtccaagctccgagtggttgaacttgaagagatagcgatctgccggagttgttttctcaagaaaatccttccccttgagatagtcgaggtcaatgaacttaggcaacatgtcaggggctccaaatttcatacccacggctcctagtattggcgttaagagaccgccaacacaaagactcccgcaaattcccgagcgatggatggttgcagcatactccttgtaactcaataagtgatccaagagaacaacactcaacgaagtgtctgctctatcacccgccatcttcttcccatctcttgtttccctcaaaatgaagaccaaagattggtatatcatgcatagctcctcttcactaacaaatccggtagccttctttggaaagaggatgttggcgatgcattggtggaggtatctaatcacgggattacggattgaagaactcttgctcttggttggtaagaagggcttcagaccgggtattgctttccaaagagatttcagctcttcttgatcatagtcttggcggattccttctccacttgggaacccgaaaatggtatcaagatggcatatatcaagagtatactctacatccctaactttgaaggttatgtaaacaagacctcctctctcttctttctaagaatcatcaacacaaaaatgaacc

SEQ ID NO: 24176 - DNA, 2636 bp, Arabidopsis thaliana landsberg
  unsure (1)..(2636): unsure at all n locations
gactctgaattcactgtttaagtcagtccaactctgggcatgggagagattttagagtaccagtcctttagctagagtgataccaaaaggtgaacctaggatatcttggtggcactcacaaacatctaagaatgtgagattgaatcttgttgattttgattggcgttcttacactaaacctttacagatttggaacccttctcggttttannnnnnnnnnnnnnnnnnnnnnnnnnnnnnnnnnnnnnttgatgatggattcgtttcctttgctcgatgtatgagagtttctcagcttgttggggttggtattgtggaggattactatccaaaccgagtggcaatgcagttcgggctggctcaagatcttcctggtttggttactgatcatagcagcttcacagaaaaagaagcatgggatggttacaataagtctcttgatggtttaatgctttacataccttctcgtgtcgctacgacttctgttactgaaagatatcgtgactggtggttgaaatctatttcaaagttttttctggattcttcagaatcaactgaaacgtttgatgcaagtaacccaattgatcattatgataataatgatgaggatgatgagctactgcctttgggtcaagtgcttcagaattttggagagagctttcttaagaaactcgaaagatgtagggcgcgtaggctagctaaaaatcatcgattcaagataaataaagacaagattggtgatggtggtgcatcagcttcaacagaattaccacttagccagttgtttaaaaaggaggtgatgaagagaacaagtgagcatttgaaaaacaagggacggaagcgagctcgtgaggatgatgtaagttctatggatcacaaagatgatgacgttaccatcgctcagatgatcaaatctagaaggaatgatgaaagtggaagcaaaggaaagaagagtagtatggttcaaagaccatctaacgaaaacaactcttcagatcctcttgttgattctaatggaggtataattgacatttctgtgtcaccatcagagacaaggcaaacgtgtgatgatgagcttcatgtagatagaagcaagaaagaagagttggtccatgaagatgaagaaaagcaaagaagcaatgagaatttgtgcagtgaagctgagaaagaagaagatattgatgaaagattgaaacagagaaagcttgctatagaggagatagcattgaagctggagacacgtgttatggaggttgagaagagtttgacaatgattagaaaatggaaaaccagaggcaaccagaccaatcatagagtttctgcttaagtattaacaaattgtgtcttaactattaatgatcagaaatttttcaagaggatctcttaaggaagcaaacacaacaatgtcacaattagtaatctatgtggagaacttatcagacacaaggcttattatgtattgttgcgtagagaaatgtgtttgaatcggtcaattttggtttattatatgtgttggtttggtttggtttgggtggaccacttaatttatggtttggttcgatttaattaatttggtttttattggtttctctgacggtgaagcagtatctcggagatcaagatctgacattgttatgtgcttgaattcttcatcaagctcgtcagaaaaacaccaaaaggtttcaaatttatctgaaattcgtgaaaccctaaaaagggttatgtcaaggtagaagagacagaacaaagatagatatggtaaggaagcagaagtacgggaaggtagtgttggtttcttgcatcgcgcttctagcaaccggactcattgctgactttctctgggctacttctcatcgattctcctccgccgcaatctccgccggattatctctaccttcttcacttaccaccgtaatcgttcctggccaggtgaattgtgatctgttattgatataattagatctcaacatctgaatttagcttcaaaagatgatttttacttcaatgttatacctagtttcaattgcttgagtgttaagttgctatattttactggttttaggagaaagatacaaagaagaagaaggatagtgcgaaggaaaggaaattgtctaatacgtttcaagatttgcctgctcctgaattgaaatgggagaagatggcagcttcacctgtacctcgtctagacggagctgcaattcagattagggatcttctttatgtatttgctggatatggaaccattgatcttgtgcattcacatgtggatatctacaatttcactgataactcgtggggaggaagattcaatatgccaaaagatatggcgcattctcatttagggatggtaacggatgggcgatacatttatattgatactggtcagtttggtccacaatgcagaggtcctacagctaaaacatttgtgcttgatactgatacaaatacatggaaggactttgttcctttaccagttcctaggtattggattatattatgctctgtgtttctctttcgatgatggtcaatgttgacaagtttaacattcaggtttgcaccagctactcagctttggagaggaagacttcatgtgatgggtggaagcaaagagaatcgatttacaccaggacttgaac

SEQ ID NO: 24177 - DNA, 825 bp, Arabidopsis thaliana landsberg
  unsure (1)..(825): unsure at all n locations
aaggatgtccgtggccaacccaaaaataacatctacctcctcctatcacgatgagttcttatctctcagaaaccaagaaccaaggcttcacaactcggcacgcaagacaaatgagttaaggaaacctcgagcaaacttncgaatacgacgactgacgactgctgcgtccaattgcgtcaaactagaaaccttcaaaacgcgatcctatcaaaatagatcaggaaggcaaagacaaggagaaaagtctaacctctaaaaaatcaccaatctcaagaccaagaatgatgaagaactgagacagctaacaaccacaacaaacaacaacatcagggagaagaaagccttgtaaacttagaggtcgatcgatccaaacaaataaaacagaaacttcttcttagcaaggaaacaaacccaatatgaatcaaaggttgagacgaggagactaggaacgggaggaagagcaacggttggactgaacctgactaaagcccaaacaccactcaacataaacgacaaggagacaataagcacaaaagcgataaaagattaagaacaggacctgcaaaacaatagcataattctcacagcagcaccgtagatattactcatccggaacaaaatattttgcaaaaaccatatcccacaaaaaaatgtcgcttcaaccaaaaccataaaacccagaaacaaactccaatcaaaccataagagtcaccaaacgcaggccaaaatcaacgctatcaaacctaaacaaactaatctcaacaacacagagaagaaacaagagaaaggaccatcctacaacaatcaagcagagatcctctagat

SEQ ID NO: 24178 - DNA, 768 bp, Arabidopsis thaliana landsberg
actaccatataattctctctaagtattcacaacattccaaattccaaaccaaattccacaactatatccaatcagcattaattgttggatcttatcaataaagctaatatccaagaaccttctacattcattcttgtaatatactttaatactttaatactttttttttcccgagacttttttttcaaatcattctttcttttaatcaaaggattacttatatcatcagaaaagatcatcgacatccttccaacctctgtgtgatcaatccacttttacgtttagggtagaccataactctcacgttgagggtagaccattacaaatagtgtgtgtgttgtatttttgttgctttatttcaatttcttacggccgggccagatttttgatataatttgggagttagttcttatatctcgtgctcaataactctttatctctgataatgaaccgaagcatctacagaaatatataagggttttctgcaaaataaccttccaagtcgatctcgttgcaagtttaccctccaagtccgaattatataagtcaatcccaccatctctaaagtcacccgcaatacaaccttccggtatatcgatgacgtggcactcgataactccgttgaaaaacataatgattttgtgcaaaaaaaccctcaatataattttttttttgcaaaataaaccttcatgtcaaataaatacaaaccacaatctgaaaaatctcctacaacatagcccttccatgtatcgatgacgtgacagtcga

SEQ ID NO: 24179 - DNA, 924 bp, Arabidopsis thaliana landsberg
  unsure (1)..(924): unsure at all n locations
caagtgctcaatcttcttcttcttctcatcagcagctnagggatttctcagcttcacgcaaagcaatctcatattcacgcctctgattgtaagaggcctgctcttctatcttgcgttgagcttcgagtaattgttcttgcaaagccacaaaagaagttgagtcacctgcttgcttccgcttggcattgacaagagactctatgaggcttcctactctataaggaacgcctctcgaatccctcttagtggactgcaaagtatgataaaagctgagagtagagaatgaaaattgaactcgaaaacactaaattgggaaacataaaacgttacctgaagaaatatggttgtacattcctcagctgtgagctcccgttcccgcgaagtgccatctgaaacagcagaagtttctgccttgagctcagactgcctcaattgcaaattcttttgatataactccgcaatcttctccgcctttcgatcaacatacgtcccatcaggttttgtatgtgttttgatgaaaacgtcaccaatattgacagttttgcccaattgctcttcctgtaatgaaaaaaataacaagtcatagaaaagtagagaaacatcagattaaagttgcaaaggagtaaacagagagaagacttaccaattcgtctcggatttgatgatatgacttcgaccgtgagaagggtatgtgaggacctagaccgttacggtcagacatacgagcatttgaacagatttgacttctttcttgagcttcttcagtgtcccagtacgcagtcattgttttccatagagtttttccgatccatttaggtttattttgactagttcttgcagtgctaaccatgcctttcattcgccttaaacaaatctcattgaagtaaaactgaacagtccatgtgatcaaagtatcccaatggt

SEQ ID NO: 24180 - DNA, 869 bp, Arabidopsis thaliana landsberg
tttttcaaaattttcagaattgttttttgatttttctcaaaacagagatattaccaatgcaagactcaaagaaataaaatcaaaacaaaacacaacgttagatggttagttagtctctcccccaaacttatttcacactgtctcggtgtgaaagaaaaatccgagaaaagactaacgaaaataaagaaataaaactaaaagaaataaagcggtatatacaagtgatacggtggagtggctaaggcatggtggagtagtctctcgaggcgttctttctcctagacgagtgtgatggagtggcgggtgttgcatcattctcatcactctccaaaatattgtctctatcttcctcctcatttgaaggaactacaagctaatcctcggaagagacataatccggtggttagagcttcttcaccttcttaagtagcttccatattgcttaagattgccacttgtttatcttcctttgagacttgatgagggattgaagaaacttctccgtcttggtctttggcacaaatgtgaattcgggaagatcatacttgttgaggttgtaagggtcatctcgtggacatggtggcaagtcttctttttcaatctccataaattgctatacatttggtacttgatattcctcacttggcaaaaacataatgtcttcatgactctctacatttgtgatctcctttgagggtagtatgcattccaacttgttatcctctcgatccgtgtacaagtaaatgaaagcatcatcgctacgtttttaaagagcgagaacgcaccaagttctcatagtcaatgtattcacgctttgggagagcattgaatggagaaagatctactcccgctttaacaaaaagtggtgt

SEQ ID NO: 24181 - DNA, 614 bp, Arabidopsis thaliana landsberg
tacactattgttagagagttttttataatcatgttgattagttttttataatcttgtaaaaaatttcaaacagtttctttattttggtaatacttttcattactttatatgactttattttgtgaagaaaaatatagaaaatcatgaaccaataacataataatataaatcatgaacaattagagactttttttctaattgaataactcaaaacttttactgactttataagaatatgaatctaatacacaacatcgctaactattggccgaatcgagtcgaaggattcttagctcgttgtgttttgcaggcaacggtacacaccatatggcgggaacgaaatgagcgtaaacacggcagtctcccaaatcctgtagcccgactagttaagtggattgataagcacatttggaatcatatatcagctattaatattagtggagacagaagatatgatcgaggtcaccaattttggtttcaaacaagagagttggggtaaaaaagtgcttcttcttggtttttatgttcttcaaaaacgttggacaggttgtaaacacatataccttttttttttgaaactaatttaactttatttcaaaaaacaaaaagagtta

SEQ ID NO: 24182 - DNA, 809 bp, Arabidopsis thaliana landsberg
tctgtctcatgatgttaataaaggccactagatgaataatgtttattgccaataataataaaaaaaaaacaaaagtaaattagaaacagcataagcaactctaatgtaaatagttgcttcgctttttttttttttttttttttttatttgggatgaacgtggttgcccatgaggaaaaaacatggtcgtgaatcaaatgttgctcacacgaccgattcacatccagttgccttaacaaaagaagaaccagcttaagattaatgtaccatacaattcttcaacttataatccttaaaaattgagggttgcaaaagaatctagtataaattaattttcttcacgaatcactacttttccaaacatacaacttagcacgttctctaatgtacttagaagtgccacacacgaacgcaagttgagaacacaaagcaagactatataaagggtgttcatgttcaagtctaacataaccaaaacaaagaaataaaatagcataataggtgtaatgagatcctcaagaaccatgggaatagagaactgcatagtttatgttgtggttctaagtgctattgcggctacggtgacatcatacccttactcatctcctcaaaccccaagttacaattctcccagctatgaacacaaaggccctaagtacgcgccacatccaaaaccatatgttaaaagttccccaccaccacaatactacactccatcgccaaaggtaaactacaaatctccaccaccaccatatgtatacagctccccacctccaccgtactactctccatctccaaaggtaaactaca

SEQ ID NO: 24183 - DNA, 449 bp, Arabidopsis thaliana landsberg
cactgtttctcagacttttccgacgcaacttgacggatgtttccaatttgatgtcttaatcttagtatacacattcatagcctcttaagtcttatcctgagcattactttcggggtctttgtgtttcaagaataacatttattggcggatggagtctttaatttcttcttaagacttttcaaagaactcttaagcttagcaactttctcgtgtgaatatgtggatatactacagcaaagaaaggacataatcaaactttatatcttaatttaaggatttaaaatttaagcttattcgatttcgaagaaaacatgtttccctatcttatgcgcttaacatttctgagtagctctagtctgaagcagagacttctatttggccaaactgtatgtaaacttattcagtaattcattttttttttatcctataaagaaacgtgtgcaacaagc

SEQ ID NO: 24184 - DNA, 848 bp, Arabidopsis thaliana landsberg
caaccctgctgaggcagagtataaagtagtatcgccacacgagggcgattgaatatgaatggcccatgctgcaatatcaagtactgctggatgcctgtataaccagatcagttccaatatgatatcctcactatccaaacccgacatgaggaggttggtcctgattatcaaactaccaaactgtataggcacattctggttgatatgataggtagcaaccctgcctcctggcgttgaaattgtaataccccctattgatgtggtgaaaaggtaattggcacttggcactaaattttgcactgataaaactatgtgatgcaccagaatcaaaaagaataattgcaggataattcaaaactgaaaagataccagtcatgacgggtgctccctctggaatgtcagccatggtggtgaagttcagtctgccttgcctcacttgcaccttctgtctcttgccttggttctggttggcattctgtccctgcctctgctggttcctggggcaattcttggcataatgtctggtgttaccacaagtgaaacacctgttgtcattggcctgacgatattgctgttgctgttgtggctgattgttcctctgaactagaaactggttgcggttgggtgcctgctgctgctgttgtggccggatcacccaacgtccttgctgttgctgaggtcctctgttctgagtgtcagacacgatcctgaagcgctgtggctgagctgaaggtcctgccacaggggtcttctcttcttctctgcctgacgagctgtgatacagtcctcctgagaaatggccatgttgactaactcattatagctgttggcctgactgtgttgagacg

SEQ ID NO: 24185 - DNA, 1909 bp, Arabidopsis thaliana landsberg
gatcaaaacatccattgagttcgtaatcgcaatcctcgtcttcccaccgtattccccaagttggttatcaaagcaaaacggatggtcacggtacgggtttccttggacgatttcttttgggaaagctccagagaaatcaagtcttgatgtagctatcaattgtatacacataaagcttatcgtctttataagtcatgtgtgtacaatatatgtcttcaacattccaccaataatcatcttcattcttgtatgtgaacaaacagttttcttcggtaatacaagctacaacataatcctttgttctctcgtttatccaaaaacaagccaaatttttgagaggagacgtcaatttggtttgttttcctttatatgacttcattgatggaagattgatcatctcgcgagtaaacacgttcaaaagatataagaaatctaaactaggatcattcatcaagagccaactactccaactagccataacaaagcttttcaataaatcaaatccaagacattctacttcgaaggagaattcgcgatcttcactgtgatgacccaaaaaagtaccatcctcgtcgcgcataagttgccatggataccatataggtcgcgtacatgatcttgaaactaaataccattgtgagcaaacgctcctcgctcgatgataatccttagtctctaatccttcaaagattgatctcaaaatatcgaaacaaaggttggaccaatcactacgaattctagacattctctccgtagtgcctacgataccaatggaaacctaatttgttttttttttttggcatcaaccctctttaaaagcaaatatataaatatcaaagccttaggaacaaggcggtgaaaacaatgtaggcccattaaggcccaataacggcgttaggaaattccaaattattttgaaaaagctttccgatttcacgctcttttcctcttccctccaatctcattgtgtccaccattttttgcatcaaccctatttaaaagcaaatatgtagatattaaagaatgcggtgaataatacaatttaggcccactaaggatcaggcggtgaaaacaatgtaggcccaataatgacatagcctttcatctttctctactcaatccaaaacaaacctcaagtcacacactcttcacctaaacagcatcaatggcgacttctctctccgtttctagattcatgtcctcctccgccaccgttatctccgtcgctaagccgttactttcccccaccgtatccttcaccgcgccgctctccttcacacgctctctcgctcctaatctctctctcaaattccgcaaccgccgcaccaattccgcctccgccaccaccagatccttcgctacgacacccgtcaccgcctccatttccgtcggagacaagctcccagactccactctctcctacctcgatccatccaccggagacgtcaaaacagtaaccgtctcatccctaaccgccgggaagaaaacaatcctattcgccgttcccggcgcattcacaccaacatgctcacaaaaacacgtccctggattcgtatccaaagccggagaactcagatctaaaggcatcgatgtaatcgcatgtatctccgtcaacgacgcgttcgtgatggaagcgtggaggaaagatcttggaattaacgatgaggtaatgttgctatccgatggaaatggcgaattcacagggaagcttggtgttgaattggatttgagggataagcctgtgggacttggagttaggtcaaggagatatgcgattttggctgatgatggtgttgtgaaagttctgaatcttgaagaaggaggtgcttttactaatagtagtgctgaggatatgcttaaagctctctgattcttatgattttctcatcaatttcgtcttcttctctgt

SEQ ID NO: 24186 - DNA, 1621 bp, Arabidopsis thaliana landsberg
gtttaggtttatatatcaagtcatctataaccttttagatctagaatatagtattaggccatataataggcatccacataatttacaatattattcataacactctctctttgatgactattataaaaatgtggtcccaaatgcgcatatgagacgatgctgcctcgttaaaaactttaccagaaaaacccgatggaaataactttggttaaaagaaaaagagtgcagcgcgtctctcctcctcctcatgagtacatcacttgaaatcttccagatgccgcgatccaattatgatgaagtaactacttgaaatagtagttgaagacgccttggtagtaggctcggcaaacctttaattgaacaattttgtaggacatgtacttcactattcttcatttaattggtctcagaggtgacttgatatgagtcaaattaccctaatgactactctattgaataaagaggttgttatagcactcagagatcgaattccacaaatttctcagatcacacaatagactaatagttacgaattaagctaaacacaaaatattaagaaaataaaagacaaaaaagcaataaaagagattatttgtagattcagatgattaagacgttgggtttagggaaattctcagcaaatatcagaatattaaatctagcagtaaattaggattattaacgaaccattctagaattcaaaacactaatatagagtaaccagtggcgttccgcgaaactcactatgcttaatagtatttatcccaacgctcttgtaaatccttagaactaagcaagcattataatcaagtttgataagttcacctaagtaatccacgctagcctgcatctaaatactaggctcatctaagatagttccagtaatagatacctatgtcgggtatacctattatcataaaatcaagttctagttacttactctagaactagcagaaagaacaatcaaagatgaagaaatctaaatatattatcctaacagggtttttgatctactaattcatccaaatccctaattgagaatccctagacccaacaagaaaactactcaatcatgatcatagaagaacaaaacatgtttgaataagaaatcaataatgaaattaagaagagaatagagtttagaaagatcttctttaaagggagtctctagatggttttgctcccaagtacagaatagaaaaggagaatagtctctccaagcttaggtctaaacaatgaccttaaaactatatatctatatatatatgtttctaaaacgtgctgaaccttctttaaaaataagggaaagttctgggctgcaaatcttcataacttcaataaaacgcgtctttgaattgtcgtcaggtattgtgtctctcgacacaaggggtggtgtcgatcgacacctacacgatttttggtctccgaatttcttctgcaacataagttctctgttttcctccagaatgctccattatctccaattgcatcccaaacttgtaaattcctgaaaataactataaaagactttagaaataacaaatagactataaaacatatacctaaattataggtaaaagcagtaaaaatagaggtatatcaacagtcttgcaatatgtca

SEQ ID NO: 24187 - DNA, 1026 bp, Arabidopsis thaliana landsberg
tcgattaaaccaaaatgtaaatatgacgaaacctcataagaattttatcaaatataagtccattttatttttttaattagataaatagtaaatttgaaatgaataaagataaataattcatggacgaataaaatacaaatgatagaacaaaattctcattttcattctttatatttttggtcaagaatattgtcattctattcatttttgaattatagtaagaaacagataaaatgtgttcgtcttataaatgatgaaactcttaaataaaataaaatctatgtaaccaataagctattcttatttagttaaatggaggaaactttaaatagattaattttctctaaataatttctttgcatacctcagtagcaaaccggtccggtcggatctgaattgaacaaatcaaaccaaaatcagaaaccaatccggttttgaaaagattactaatctttcaccaccaaaccggttcgaactcgaatcatcatcattacagattattcgtcgtcttgttgttgttgtttacaactttcttgactttcttgaagtatttctttatgttttcccatttctcttcgcatctcttttcggtgatcacttgtaagtatcctttcggtgaatatcaaagatttctcactaacgcccatatgtttaggcccacgcccatttgtttagccccaataaggctgaatcagcatatcagatccatttcatcctacagtacacttttaattcgaaagttgctccgacactttaggcccacgcccatttattttcacttttttgtctaaatatatatacatatgatataatattctctctctattttttttttccctttcaaattgtaattgtcttgaaaccaaattgaattgttgactcttgttttattattttcattattttctacttaaataaaaaaacgttgtgattattgattaatctagtagatagattaaattattgtatcatctcaatctaaatcagattaggacataatatttgccacacaggaacataaaaaaa

SEQ ID NO: 24188 - DNA, 463 bp, Arabidopsis thaliana landsberg
cattataatttgcagataatatttgctaatgtttttctcaccatatttttgtgtactacaacactcaggacaccatggaggcggctgcagcatctcattcattgttagggtttgcaaagttcgcaaaaaaaaaggtcaactttatgtctatacttaattaggctctcttgttctctttaaattggacaggagttcgtggatacgctataatattttcttatgtttttctcaccatcctattggtacttctacatttaggtcactttggagtcggctgcagtatctcaatcattgtcacatacgccaccagaagtcaacttcgatggtgaccccatgaaggtaaacagtaacaacaaggctgtgttattcgacatgaatatttggtaactaaaaaatttgcaggataaatcacttgtaataggtctcctcattttatatttgcgaaaaatagtaaaatgcattt

SEQ ID NO: 24189 - DNA, 624 bp, Arabidopsis thaliana landsberg
  unsure (1)..(624): unsure at all n locations
ggttcggtttgaattggttcatctaaattaaacacatgctatcaaaacatacccaaaacagaaccacttacttttttgggtttttaacccttacaaaatttgtacgcatcttcttccacctttaaaatcttcctcctgcggtaacaatgacagaaaatctgaattaagtttagtctaatattacatttcgatagcttgggtttcctcttgtccaaaaaaacaggtgaagtgagcaatggaataactttaaggtaatggtgattggaacgttaagtacctcccagtggtgtaatctcttttccttgagcatgatttttatgtcacttgtgtagaattcattacctctgtgcaaatcgatcttcgcaagagaattggaccatggtggaagaaaatctggtttcatggactaagctaacttctcttnnnnnnnnnnnnnnnnnnnnnnnnnnnnnnnnnnnnggtaacctgcagaagcacagtaatacaaggaagaacagattagtgatcgtgaagcatcttgacaagtttcagcaactcttcacagattagaaactttggttatcgttggttgttttagctgttacggttctacttaccgccatgggaactcgcttgtggcgatcc

SEQ ID NO: 24190 - DNA, 1602 bp, Arabidopsis thaliana landsberg
atggtccaatcatcgtgattgataattacgacagcttcacatacaatctctgccaggtttcatttcttaacacattctcaaatcttcactctacgcttgttagatttttgatgtggaatgtttttgaatctgttttggtgtaaaagcagctgaatttgcaaagtccttgattttgttagaaatgtttattcaagtatgcatggtgattgaatgttaaaatctcattatttcacaatccaatctagtttcgacatgctaatagataagactatgtaatgtagtttctctcttgtttatgtatgtgatcagagtcgttatgttgtaccatcaaatcttattgtcgaaagctcttcgtttcttgtttggcgttgtaaggagtaactgttgatcaagcaaaagctaatacatcacttctttgctgcctaaagtctggtcttttgagtagtatctttaatcatgttcaaagtttgaattggtgattttgtgagttgttatttttttactttagattgtttattcgttgttggagtatctcggtttatcatgaaattttggctgctctgagtatctcacataatgcataataggtctctaatatacaatttgatcatgtctcacttctagtatttattgtgatcgttctcttcatatggtttcttctgctttagtataaacaaaattttgagaattgttatctatttctacagtatatgggagagctaggatgccattttgaagtttaccgcaatgatgaacttacagtagaagagctgaaaaagtgagaagaaactatatgcattctgtttaaaacgtaatctagctagtcaattggtgttgattcctttattatgctctccttcttgcagaaaaaatccaagaggggtgttgatttctccagggcctggtaaatattctggcctctgaaatttattttctgattatgtggtgtatctttttgaagtgcccgagaagaagataacacctttcttaaattttataggtacccctcaagactctgggatttccttgcaaactgttttggaactcggaccacttgttcctttatttggagtatgtatgggtttgcagtgtataggagaagcatttggaggttagttgtatataaacaagacatcttatttctccgtatcagtgttctataacatggatttgttctttattatgtatccacaacttaaatgcaattttgtttgaacattgattaggaaagattgtgcggtcaccatttggtgttatgcatgggaaaagctcaatggttcactatgatgagaaaggagaagaaggcttgttctctggattatcaaagtatgaatcaaatttttttctgtgttgtctaatatagtaaatcataagtctgtaaaaatgtgtaataaaacaaatcttgttggtttcagccctttcattgtaggtagatatcacagtctcgtgatcgaaaaagatacatttcctagtgatgaactcgaggttacagcatggacagaagatggtctggtaatggctgcccgtcacagaaagtacaagcatatacaggtaaaacccgcacaagtgtgtactgtaatcttattgccccctccattcaaa

SEQ ID NO: 24191 - DNA, 1151 bp, Arabidopsis thaliana landsberg
ttataaaaggttagacacatttttatgttgattaaatagttgttttgtattcaaagttagtaaaatagaatttaaatctaaatgggtctaaatgggtatatgggtttaaatgggaaaccctaatagacctttaaattaaataattttaaatagggtgggtttaaatgggtcagattttaaatggggcgggcttttgaaattgactattcatgatgcattgtttagttttggtaactaaaatacaatgattaagttttttgatttgttttcaagtgatttttggacttcactttgtctcttttgcaaggtatgggacaaacaaacgactcttaagaacggcgaatacaaaggagaagcggttgagttttcgaagttgtctcctacggttgctgacgacttttggaacactatagctacatgaacacgatagctaggcacctactccgatcttccagctcccgacactaatgtagatgcggttttgtgtgacacattggtaaagatgaagaatattgttcctacatcagtcgcgcagaggattttagctggtactgcacttactgaattgttccttggctgcgatctagacctctctagttgtgagtcatccattaaacgagagcgaatggacttggactacctgattcataccagctcccttaagctaagaagtcgagtgtacttatttctgggcagagacgataacaattatttctgcgggatacccaaccagcatattacttcacttctctccatgataaacctagtgttcgaacctaacgagcagtaccttgttcctgacccttctaaggccgttcctcgacgacgccggactgcagaggctcagcctacagatgagcatgttgtcggtaacgatgagatttatgaggattatgcttatccggcacctctcgcgcacgctcagccatatttgttgctctctgaggatccagcaccgtaccgcctttcaccaccaccagcaggtgacgatatctcacagccgatggcatggatgatagcatcgacaaagaagaacaacagtatgatgcaaaagatgtagagagccatatctaggatcaggcttgaaaatgcactcgcagaggaggagtagatgatgcagatcgtgagaaccagtctgagactattgagga

SEQ ID NO: 24192 - DNA, 1714 bp, Arabidopsis thaliana landsberg
gcgagtcgaaggtgcgcccgttgcttgaggaggcctcggcgaggcgtgaatctgcctgggtctactgtccctgcccgaggctgggctcggacgaggtgagatcgtgtcccttgagcggacagaggttttgtcctgtattgcgcccatcaggcctttgcagctttgtgctgatggtgtttaccaatcgagtttaggagtcttgggggtacccctaattatagtcccagacaagctgcatgcacacgaatttatgatggaaagaatgtgcaatgaaagaaaatgaattgcacgcatagaaacaaaaaatcgtatttaatgttttatttccttcataaatataggatccctccaacagccatgcagctaaacgcatttgtcggcgttttgagaccggggggtcctcgggccgacgagtgagtgtcgccgcgtgccccagcccagatgggtcgagcgcgtgggcgagcgcgaaggggggaaaggagcgaggcggccggagaccgcggtgagagaggtgggaatcccgcggccttcatgttcgtcccgcgcccaggtcgggtgcgcttgcagtaggggattacaagcgtccacgcggagagggagcgagcggcttcaagcgagcgcctgtcccgtcctcgtccccgcgtggccaaccctctctaagagggccctggtccttccttttataggcgtaaggagaggatccgggtgtacaatggggggtgtagcagagtgctaatgtgtctagcagagaggagctagcgccctaagtacatgccgttgtggcagccggagagattttggcacccagctggtgtgatgtcgtggccgtcggaggagcgatggagcctggcggagggacagctgtcggggctgtcgagtccttgctgacgtcctcttgcttccgtaagggggctgagagccgccgtcgtcacagagcacgcgaggcgccatcattgcttatctggcggagcgagctagatgggacgccggtcttgttcccgtggcccgagtcagctcggggtagggtgatgatggcgcctcctgttgacgtggctggtctgcaccctgggttgggtgatgtgtaagctcctccgaagccgaggtcgagtctgtcttccgtggccgaggtcgagtccgagcccctgggttgggcgaggcggagaccgacggctgaggccggggcggagtccgagcctcgggggtcgggcggagcggagttcgctgtcttctgggacttagcccgagtccgagccctgggtcgagcggagcggagttcgccgtcttccggtcttagcccgagtccgagccctggggtcggcaggagcggagttcgccgtcttccgggtcttagcccgagtccgagccctggggtcgggcggagcggagttcgccgtggcgcctttggcaaggcctgattgcctgtcagactcactctgtcgagtggcactgcagtcggagtggcgcaggcggcgctgtccatctgtgagactggccagtggagcggtggagtgacggcggtcacactcgctctgccgggagcgcgtgtcaggatagaggtgtcaggccacctttgcgttaaatgcccctgcaatttggtcagttggtgtggtgatttagtcaaggttgcttctgagcgaagccaaggccttgggcgagccggtgatgtgtccgccataaaaagggggctcgggcgagacggaagtctctcgaggtc

SEQ ID NO: 24193 - DNA, 845 bp, Arabidopsis thaliana landsberg
tactagaatttggttatgcaacctttagcttcttcattcagttttgtttgtttgtgtaatgattatagattggcttctctattgtgcagaaacattctgtgtgggaagaattgatgagtcaattccatctgatgattgttcacttctttttttttcttttcttctctaattggccagtttgtggttctgataagtcggaattacatagactctggcagagatgagcctcaattagtagctttcttcgaattctgtttgtatttgtgaccctgatgtttgtttgtttcgatttggtttgacccttatagaactgttatagccattttgtagccaaaacttggagtagttcacgacttaacgtggttaacacttgcttctttcgaaaaaaggtgaatccttaatcacatattcgaatttatttggtcctattatgagatccaagaccaaacgacaaaagcgtgacaagtaacaagaagcctgtaaatttcaaacagaaccagcacaagaagtaataaatctacaaactggaaaaagaaagataaaaagaagtaactaatcttgtgtctataatacaacccccatcacctaacgcacacatgtaaagccacaatgcgaaagactttttttttttatcattttgaacacactcaaaagccaccaacatttgttttatcgctagatttttgagccggtgtatatagatacacacatgcatgaaaaatgacctacaagtgtgttttcaccttttaaaactctttgtgggaggtggtgatgcgggtctctcgctgagaaccttgttgatgactcttctgaaagagaatggccactccggtgaatttaggact

SEQ ID NO: 24194 - DNA, 723 bp, Arabidopsis thaliana landsberg
  unsure (1)..(723): unsure at all n locations
tccccaattctcctccgccttcactttctccgatagatctggcgacgaaaccttcttctcacgtttcttcgatgatttcgtcgatttgtcctgtttctgagtctccgccatgcttttacaaatagcttcaagcttagcgtcgactgaggaatgaagaggtttatattcaccgaaatcgcctccgatgtgagatccgttatgacgtaggttagggaagttaagccgggcgaaatcgccgcgcagcttgtacgccgccttatcataggccaacgcagcttcctccgccgtgtcaaaagtcccaagccagagacgagtccgatttctcggcaaacggatctcagccacccattttccccagtgacgttgcctcacacctctgtaaagcttcgtcggcttcgaaggaacaccagaaccgtaagcgaaacaagatccagcgactccagattgcttcatcagtaacggtttcgggctgagaagattcgagaaagagttgttgttgttgtgatgcgtcggaggaagaggatgatggatctgagactggatctggtggatctgagaagaagagaggttgttgagtccgattaatgacccggtttgttgaagatccgcccgtatgaaaacggctgggtcaagaacgtgaatccgggtaataccggggagnagaggagagaaaggtacgagctcgaatcgtaatcaggcatactgttcctgtgtgaaatgtac

SEQ ID NO: 24195 - DNA, 892 bp, Arabidopsis thaliana landsberg
tattgccatttttggaggatggatatgatttggaggaatagttaaagaaagtgctaaaatctcctttagtgagtcacaaccgttgaccttcaccgcaaggcacaagagaccaagtctctaacccaacacaacacaaaacccataaactgaaaagactaacctaccctatcttgccatataaatccctctcgagcaacgcatgttaaataaacctaatttatacattcattctcaaagtcaaaaggagacagggagagagagagagagagagagagagaattcaaagcgttttttttttataaattaaaggcatgagaggttcaagaacaggttcttcagacatgagtgcttggtgttctgctgttgtgttattgtctttaatacttttgttatctgttcgtgaaaacaacgcttctaattcgattagaggttctcaattctcaacgaaaccttgtgaggagatttacatcgtcggagaaggagagacacttcacaccatcggcgataaatgcggcgacccgtttatcgtggagcgaaacccgcatatccatgatcccgatgatgtctttccaggtcttgttctcaagatcgcacctttttacttcaacaggaaattgtaagacatataacaaatacgtttcttttttctttctcttttctcttcttttaaaattttgtttgaagcatactttaccttaagtatgtatgtatatattactaaaggattcaaaaataaatacagagatttgaaagaaacagagcaaaaacagagttgtgtaccgtgagttgattattgatgttttgtgggtttcaagttcatttagatttaggtgtatatggtaattatcgataatttttggtctttggggtggaaaatttgattaacaaaatt

SEQ ID NO: 24196 - DNA, 1601 bp, Arabidopsis thaliana landsberg
ttattttccccaaaaccccccaatccctctccctctctctcatattctctccctctccctaagccgccgcacctacccctgccctaagccgcgccgccacctgcccaaccgccggttcgccgccccctgccccgccggttcggccgccccgccctcgccagctcggcgccccatcgccgctcggccgccccacgcgccgctccctgcccgccggttcggccgccccctgccccgccggttcggccgccccctgccccgccggttcggccgccccgccctcgccagctcggccgcccctgcgcgccccgcctagggccggttcaaccgacctagggccggttcaacccccccccccttctgttttttttatttttattattttattttatttactttctgtgatcataattactgtattttaagtagtctaatcactgtttatgctatgggaaataggaagtttaatttaaaattccgttatgctattgattcacgtagttaattgtttaccctgtgcaatgttgatcaactaaaagtgattaggtttccatcagtatatataaatatgtataacagaattattttgttaaaaaccaattgtgtcattagtgcataagatttaaccccctgcgagacctttcccgtttctttctaaccataacaaatgcgttatcgaatgtcatacttggtgcatattcactttatttgttatcttgtatggtgtactgttcttttgtattaaatatgtggatggatgtatgtatgtttgcgctcgcatagagaacgatccggtcgaagagcccgaggaattcgcaggagaagcccctgagcagcagtcggttggtggaggcaagtgtcctttgacctatctctgtcctaatcattctttaattcacctcccgcatcacacatttatacctaaggattgactagctttttgttatccatgtccttgtttacctatttgggtcggattattactgcttagtttgatgctattgctcaactttaatcaatgaacatgatgtggttatctatgatacgctgttttcccgttcttatttatgattatacttgtggcatttaaggggactcgagcggtttctcgagtgcctctccgtaaggacctattcaatggatgaccgcccgggaaaacagtgcaaccatgagggtggaatggggtgcccttagctgaataattagaggatccggggtgtagttggcttagccgtcgtgccgtcaatggggctcggtgtatgcggctcgctctaccaaggggggtgcagaggttcattcgatttgattttgttagtcacccaccttggggaggtgtactaagtttgtacgattggcgaaatctaacgagcagctagtcaccaggggagtctttgtaaaggcctcgtagtggatccctagccattcacctcgggagtgtctaagggccttgcaaaccctggcgacatgggatacatgacttgtgggtacagggtacaacctctgcagagtgtaaaactggtatactagctgagctcacagtcaagagcagctcaggactctcgcatgattaatttatggaacttaaattcaatttatcatttgca

SEQ ID NO: 24197 - DNA, 2536 bp, Arabidopsis thaliana landsberg
gtgcataatatggaatccaacaccttcatgatccttcagcccttccggaataagatatcaagaatatgctccagcacatcatgcaaggccaagcctggggggtaatggaacccgctaaaaagatggctgacttaaacagcaaaattgacaaaacgttcgttgaaatgggtagagggatggaatcattgaacaaaagggttcaatatatagaaggcacaaccgcttctacatcaaccacaccaggatacatcccagggaaaccaatacataattcaaaggagtatgcccacgcaatcactctaagaagcggacgagagttaccaccaagaggagagccaaaccccaacactgaggacagtgtggttccagagggggaggatttttatcaagatgatgttttggctgacaaaacaatcgaaaagcccatccttgacagtcaacgcactcgaccacaagctccgccagctactaccttcgttgcaaaaccaacagctgcaaagaccaaagatacagtcttcgtgccaccccttacaaacctccacttacattccctcgtcgatttaaaaaagttttggttgcaaaatatgaagccctcctgaaaaaacagataaaggatatgcctttagtggactgtctcgcgctaatacctgacaagcacaagtacgtgaaaaaactgattatagaaaggatcaaagaagtccaaggaatggtggtattaagtcatgagtacaatgcaatcattcaacagaagattgttcaagaaaagttggaagatccaggattttttactctaccatgcaccattaggcaattgacttttagcaattgtctatgtgatctaggagcctcggtcagcataatgccactctctgtggcaaggaaactaggattcgttcagtacaagccttgtgacctaaccttgattcttgctgataggacttcaaggagaccttttggcctgttagaggatgtgcaagtaatgattaatggagtagaggtccctactgattttgttgtgcttgagatggatgaagaatctaaggatcctctaatcttaggaagacctttcttggcttcagctggagcagtcatagatgttaagcaaggaaacattaatcttaatcttggggaggatttcaaaatgaagtttgaaatcagggacactatgaagaagccaacaatagaaggacaaagcttcttagttgaagaaatgggtcagctagctaatgaactgctagaggagcttactgacaaagataaccttgaaactgctttgaccaaaagtaatgaagctggatttctctcttgtgagaccttgagctatgagatgtcaatagactcacacaacgaagtaccaggatcaaagatctttaaaggtgtcattgcgtcagaaacagaggatgttacattgaacgaggaaggctcaactgatactcgactagaatgctcaaccaaacagctaaagtcaagcatgagggcatcaaatgattggttagaattcaaggagaggtctaaatggcacgacagagctataagagagctaacacacactatgaaagagctgaaggatcaagtcaaagagctccatgggaaagccaaccaagcaccactcgacatcaaggacgtcccaaatgatgaagttattcctatggttagaaaagaaggatgtgaattcacattagaatagtatagaaaagatgattatccagatgatgaataaggagcttaccaagaaagggccattgagtactcaattacatacttgtcacgagagcatgctgaatttaatgttgtatctactaaggaaggagaggagacgtcaattctactctatcaccctccttgagcctaatgagtgtgaggagtcaagctagagacttaaaacaagctcacttgggaggaagtccacgtctatccctgtatatagtttttattttattttattttgttacttttgatttgttttggttttggctttgattctcagggaatgaataacagctagagcaacatcagggatgtaccggagtgttcaaataaaaaattacatttttttttgatgaatcacttgatcgcaagatgggagtaaaagctcgggagtgcgatctagtagtttttggacaacatctttctcaaagacaatgtcaaactacttgatcgcaacatggaagtggtgtgattgagtgatctcctagtggaattgcccaaaccactcaatcgcaaggagaagtgaaaacgcccgacatgacttcaatgacaacccgcctgaagacatgccatccagctgccaggacattgcccaacaaaaggaaatccacctattaacagagggaccacaccgttccgcaagtcccgcaaggcactcgtctcatgagccaatggaacacaggaggaagaatgctagaactgtacattcatcaagtaaaggccggataatatcgggccgaagaacacatgatcatcgtgctccacaacctgctggggttgcgatctagcacaatgacgaggagatgccgagccacatcaaaacctgtca

SEQ ID NO: 24198 - DNA, 1025 bp, Arabidopsis thaliana landsberg
attttttgaaagagttctcaaggatgttccatgcacaacatcgaaaacaaccttcaataaaaagcattatttctataatatagttctaaagcacaacataacgatgcactgaaagcgagagcctccaagactggcaaagtaatcggtagtacttgagaatctgtattccagagatttatcagcagatgacttttgtgaagtaacctctatctctaccaatataagagaatttggataccttgttgttctttcctgcatctatttcaaagatgatcgatgttaaaacaatgtataatagttgagactgtccaaatgactttcacacgaatccaacaacaacaaaaaaacactatacagtttatcttttacctgctactggtcacagttgataaattgaacatcgggaatgtgttggattttgtagtaatcttctccacctggtaccagtttctccttccactccctcttcattccgctaatcttcagttcctttaaggatgttatgtacttgagtccatcaggaagttccttcaacttttcgcaatcatgtatagtcaaagtacgaagacatggcatcgacccttcttctactatccactcttccaactctgattcttcagacatttctagcgcacataattgagtaaatccgccttttgagcacaccattctgctcccaacgaaagccttatttctcaatagaaccgacttcaaatgaagcaacttttctagaattggcattggatcttcttccatgcggcaataaaatagatgtatgtgtgcaaggtggggaggtaattgatgttgatcaggaatctttgacataggtcctgccaatcctaactcttttagatgaataaaatgatccagaacaaactctcccacatgatcaaccttatagatttcgggcgtaaaaaggaaattaagcgtttcgaggtttcgcaattcacggagagatgacgatagagtttcaaaattgcacctttcgctcaaagatacagcgagataccggagcttagtcatac

SEQ ID NO: 24199 - DNA, 638 bp, Arabidopsis thaliana landsberg
ccttcttttttggtcacaaaaaataaaagctagtcaacaaaaaaaatcatattgcttttttgttattttgatcaaaaccgtataaaataaggaagcgaaggtaaacatttttattcccaaataaaatatgaaaatgattgtaaggctctctgcaatagcaatagtggttactactctgctcctagcatctcaccttgcccattctaggaccgagccttttcttctttcaccaaattcaaaattccaagccaattcaaaaccaattcatcgattactagcttctctaaccgacgcgaagatatccgtgaaccaaattcaaactccttgttttccatggtacaagcattgccctccagttctatccccatcctcataaactcatatgttttctgtttaaaatagtattcaatgtttcaataaagaaatttaatatatgacaaaagttaattttgttgtgttattgtgtatttacgctatgtccgtaattttcttagacctgaaactacagcatgtaatattagtttcgttctaagcgtcactcgaaccggcgacctctaacgttcgcctaagatctttaccagttgagctaacgacacttggtcgttttcacatttaactttgatttcacaagatatata

SEQ ID NO: 24200 - DNA, 2084 bp, Arabidopsis thaliana landsberg
gcgagatcaaacgcggacgggctttaccagtttgcagcattgctgaatctaaaccttgctgtgatcaatctgttgcctttaccggctctcgatggtggaactttggctctgatcttattggaagcggttcgaggcgggaggaaattaccgttagaggtggagcaagggattatgtcttctggaatcatgcttgtattatttctcggtttatttctcatcgtaaaggacacacttaatcttgatttcatcaaagaaatgttgtagttatctctttgaggaggaagagagaaactttagtgtgaagaggttgagagtttagaacaaatttggctatccaacacaaagatggtgatgaatttatggtacatacatattcatgtaatagttctactcttgttatcccttataaaagatgtgtttgtcaagaaaatcgtcgaaattgttgtttatcagcaaaacaaggcatgaacagaagggaaaaagctaatgaaaccatgaaaactcctcgcaagaacctaatattctcaatgtaacctccaaaactcaatatctcatgagttcgcataccaatcccacaacgaaatctaatatcatcgtcgttacttccttggatctctgttttttttaaccccactttgttaaaatggtaaacgcaaacactaaacggtttatattttgacgattgtaaccgtggataaatccccataagcttgccggtatgaatctcttccttggcccttacgtacttcccaagtgaatcatcccacacatcacacgccatatgcgaaactctgagtttctcagcatcctctagaatccaaaatcttacctcttcattggaatgattctccatacggatcatatcgctagacaaatataaaagagtggaatagtatggtggcacgatatgtgatacttcgtgtgcttgaatgaattccatcttctcagacctaacatcgaatttaactattattgactgtgaaaccccatagtatatagcaccatctatgcatatccctccatagaccatgtgataagtttctccagtggtgttttcaatctttctccactctttttgttgagaacttagcgtgaaaacgaaatattcctgttggatatcttgttgattggcgtcgtgttcatcgaacatcattacacacaacactttgtattggtcttgaaccggatcatacccaagacgtgtgtatacgtctcttccgttggattccacatctggcaatttacctatttgtctagtggtgggattacaaaccgcgatcgaatcaccacgcgtgtagcaaaacaaaccgttgacggggagagatctgatgtaggcgacatccgagatcgtcatgtcgtgtctggcgacaactgtggaggatttgtcattgttgtcgcgttcaggagctgagaagatgaaacgtttccgggaatcgaagtgtttaaaggtgaaaaagagacgaggacgagtctttgacctagtcaggaacgagtcggtgaaatttttactgcggatggtagagaaccagagctttgacacggcttggaaccggattataggttttgccggaagtctcgagactatctctaatgtgagatcaaaaggaatgtttgttgaggagtttccggcttgatctaggttacgtgagggagaaagttgtgaatcttccatagctgctttgtaagtgataaccctagaaacataaaatccctatactgtatcacacaattatgaatcaacagaggctttaatacagaaattaactaaaattgaattaaaaaacactaaaattttaaaataatattttgaaagccgctttacttttaaaaattgcaaacttctatatgtttttaaatactaaaaactttaaaagttttaatttaactatttttttgaacatagtatcccctatatattaattgatgaccacttttaaaaaatcaccttatctccatgtatgatcaacgaaaatgtcatgctgacatgtagttatcacaaagttcctcattctatttatttaaacacctaacatttataaaatatttacagattttgccattaatattacttatgagtatttttt

SEQ ID NO: 24201 - DNA, 565 bp, Arabidopsis thaliana landsberg
ataaatttttgagggtgaagactacgtaaggagcttcatcatcaaattttttggttttagaattcatattaccctctgataaattggtttaagacagacgttgtttataaattatgtgtataatgttgtcagaaaaaatatttttattactaaaagtaattgcttattgtacgagtgaatgattagataaataaaaattatatttaaattaaacaatacaaaaaaatccgaaaaaaactgcggcgtagcgcgctaataaatatgaatccaaaacagacttccatggctcagcacggatccgcatgcgtagataaccaaacattctacttcctggcgccaacagtttctcataaatcatggagaagtaactgtaatttacatatgtacccgtaagcatatatatatatatatatgaatatatgatcagcaatctgactcgtataaattttcagagttcatatttatgaggttagagaattgcatttgtaccaaaacaaaaacgaaaatgttatttcagaaatacgtaattgcatttttaacaagctttcatttcacataatcttga

SEQ ID NO: 24202 - DNA, 990 bp, Arabidopsis thaliana landsberg
  unsure (1)..(990): unsure at all n locations
tgagtgagggaggggaggggagtaagtggggcgtgaattcaaaagagggggtcaagcgtgtggggatgtggccgggagacacgcgacatgggcgcgtccacgacggggcatgcgggttggaggttagaggcaagaggggagctgacaagcagggcccgcgtggcagcaacataggcgcgcgggggcgagcggctaaaggcgctgacggggcaggcccacaacgcagagagagcgagggcgcacgcgtgaagggaacgacggcgacaggtgggcctctgtcacagccggttctgggggcaaaaccgaatgcatagcatatgtgtgccaggatccatttccacaaatatgttgacatcacacgtgtaatatatcaaaagacaatgcaatacaggcgtacagggagtagagtaactttattacatcatcgagacaatagtgtcttaaaaagtatctgaaagtcgcctagaggaaagtgaataggcgaaacctaaaatttataaacttaaacacacactaaggtcggggggttagcgttagaattaaattcaagtccaaaagaatatctctcttgctaggacttgacgtatgggagccaactcaaatccacactagcaaggaaacgttagagaggggaaaacaaatcaaccaagaaataaagcgagtgaacacggtgatttgttttaccgaggttcgattctaaagaacctagtccccattgaggtggtcacaaagaccgggtctctttcaaccctttccctctctcaatcggtcacttagaccgagtgagctttctccttaattctctcgggtcacttagaccccacaaggaccaccacacaattggtgtctcttgccctgcttacaaaacacttgggaacaagaatgaggaagaagaaagcgatccaagaacaagagctcaaagaaaacgagcaaaactctctctctagtcactaggtgttcgganngtgtttgggacttggagaggctttg

SEQ ID NO: 24203 - DNA, 647 bp, Arabidopsis thaliana landsberg
ttctcaaacatcagagcaggctcatcaacttatcaaaagctctagatctggactagcaccaacaccacctttggtttcttctcaccggttttcgttgatggcaggagtatctcttggaccatcagttgtgcttcttcggctgggaacgtcgacgacacacgacgagttcaaacgctggcaaatggtcaccctatatgattcacagtcgcccatcatttcaattcttcaaaatgacggaggcgctttccttatcccgacaacatcaaccctagggtttgattggatgagcctcatctttcattaaagcccaatatctcccatgtggcccatatccaggtctgatttccctatcaatttgcatagtctctctttgctttgtttctcgacaaaggatggtcgtggactccattcagctttaggaacaatgcatctagaggggatttgcttattcaattatcgaaaccttatgattgtttatcacttagatgcatatctaatttggaaacttagaccatccccaatgcttaaccttgcatcttcacaattgtttaaattaaaattttgaaacatgacatgtaagaagcaaatcttagtttttaattcataaaaacttcttagataagaagcaaatcttagtttttaatctg

SEQ ID NO: 24204 - DNA, 815 bp, Arabidopsis thaliana landsberg
taaaagattttcaaagatacagaggcgaacaaaaacgccggcatcgaggggccatatatctctctcaggcacgttcattattcacgtggtatctaattacacgtgcttgacagtgagtcatagtacagaagaacactaaccacacacaagcagagaacatctctctcttcatgccaacaacctccatggttggcttgaataatgaagcatacgatattaaaatatctcagaacatgcaaaattagacaaggagaaagcaacttagtaggaaagagatgggccatgagccatataatattgtgatgggcttaaagtagatttagctttgtgagattaagattaatgtaccctaaatcctatatatgtatatatgtgtagccacaaagatgaataacacaataacacagaatttccagtatctaaacttaaattctgacatggtatcaaagctttagtttttttaggtttacaagttttaaggtttttgttttgcttccactaatatgaaaaaataataatttgtttttagtttttaagttttgttagtcgttagggtttgttgttgggttttgttcttgttaatctttgggagtttatttcgggtttcgcttttgatgtttaagatttgttttttatttttcgagtctttgtttcaagtttgtaagatttcccttggtgagagaaagagtgttgttaagattaggattttgattattagtagtactatttacttttctgggagagtggtgtttagatctgctttacggcggtagatctaggtgtgttagggttttggtttagtaagagtcagttcg

SEQ ID NO: 24205 - DNA, 710 bp, Arabidopsis thaliana landsberg
caagattggcatttttttaggtttacctttaattgttcagcttaagactatcaccttgtaactttggcactctcgtaaatggtaatcatgcaaattacatcatcgtgaaatgtgaatagcaacttgcattatctttcttgttgtcacaaaccaaactttgactcattttggaaggctagtgaccatttttatccacccacactcattccattctctctcctttcaaagaccaaattggaaaggtactgagcatttgctggtccggtgctatgaaccatcctaaagaaggcgcttgtatctcttgatagcaattcttgtggactatcatactccaaaacctaacaaaattggcatttccaatagtcttatgtaagccacacaagaatcccttttatccatttctgaagagaatatataataagtcagttccatgaataagtaatcctggcattacctgaccagaactaagcacaagaatcttgtcacagtcgatgatggtattcaacctgtgagcaataacaagcattgtgcaagacttgaattcctcgcgaatggtcctctgtatcagagaatctgttctgacatcaacagatgccgttgcttcatcgagaacaaggatcttagatcttcttagcaatgcacgcgctagactcagcagttgcctttgccccacgctgaaattctcacctccctcacagaccttcacagac

SEQ ID NO: 24206 - DNA, 964 bp, Arabidopsis thaliana landsberg
cattcttaccttttcttgcagagaagaaaattgtggaccaactgttgctgtcattgaatgccctgactttaccttcatgaaggaaggtattaaggccctagatgatttcccatgtgtgaggattcccttcaacgacgatgacaatagttatcaggttccttgactaataaaccaattggctactttttctccttttgtcatgatagacgattatttgataagaaatatgtatgtgggtttggttgcaatgcgtagcctgtctcctggcaacgtccagctgcaaaaatagcaatgttccgttgtgctgcagcatttcagtggttggatcggaggattacccaatcaagatacgcccatgtaggttatgtttctttagtggatatatagttcctcatatcaatacttttttgcagttattgacatttcctgtacaactgactaggtgcctctggggaattttggacttgattggctaacattcacaatagatatcttcctatccagggcactccgtgaccagcaacaggttctttcttcgaattttcgtctactttctaatacttttaatagttccaatgttacgccatatgctttctttttctttctttttttcctcgctctctttttttctgtttgcctttttgcttttgctctgtgtgtgcatcttcactgattgtgattttttctttttttccttttcttttagaagtgcatattatgtatttagaaagagaagagcagcttttccatatcactgaattttcttttgtataacaggtcctttgggtgtcagataatggtgttccagaccttggaggtataaacaatgaagaggcattctttgccgatgaggtatgtataacaggtttttttttgccttttggtttctctggactttgtcaagaacttctcccatctccatgtttttttttttttgtgctacagtcgaggtgataaacagaca

SEQ ID NO: 24207 - DNA, 954 bp, Arabidopsis thaliana landsberg
agatatatgtctggcgcacaatgcttctacgcacacaattaattgtttacatatgttttattagtttttccatggagaaatcaagagtaaatagacacttcaaggcatatttcaagtatttaagcatcaaggaagaatggtgagttttcaagcaaaaaagtagaagttgatcaaattccgctttagtacagtttatgtgctttagatgtttggcatccggcgaagatcttcctgatcacgaaatcagggtatctgggtgtcattggaaacctagaggagtcaagattaacgtcgaagtcgaatcaaagcaatccaagaagccgtttagacgttatggcccgaagagtgaagacatgtcctagaatcgctgtttggaaatgatcaatctaaaaccaccggccttggagacttgaacccgggcgtccccttgatttttccactgaccactaaggcgcacaaccactccttcccttcctcttgccgccgacttccatcaaccctaaaagcccaggaacttggcccatcacgtactaatctacagaatgacgcttctacccttttgacctaatgaagccctataaatacaaagtctaggggaaaccctagaggcacccacaaaataggctgcctcctgtgcctctcaccgcctccaagttgcccttctcttgttcttcattagatctctcttttctcttcaattctctattctctacttgtaaaaggaagaagagttttcaaggtttgaatttccagagaagatctctaaacccttttctatacccatactcttttttatgcaatttcttatttatatgatgttttgttctttgagtatgtgtgagtatatctctagttaggttttaggggggtttcgaagggtattcatggggactttagatctgatttaggttggcgatttctatagttttgtttgatcgtttacactattctttc

SEQ ID NO: 24208 - DNA, 916 bp, Arabidopsis thaliana landsberg
agttttgggtttagtaatcattttagtagctatatattgacatacggtaatgcaaaagtacaataattttcatttttgattctttttaacgtaacttttgtttaatttatattctttaaatcatatatgttgtttaagaatttgttttaataagaaaggaaattctttaggaaccatttgctataatattagaatatgatgtattataaagttttaattactaaatattttaaattacttttgagcaaaatttgtatttcaaatacaccattgagataactataactttaatttaaaatataaattgattaacaattgtcattaatttttatattatagtttctacttatttttattaattagcttctattgatactaatttagtctttgaaggcacatcgtattagttttacttcttcattgttgtttttgtataatgataaagataacttgttgaccaaaacaatgatattttaaaagtgtagaaacttttatgctatcattaaaacacaaagttccaaacatgataaagataaattttacccaacaaaaaaaataaatctaagatcttttgtaattcattaagtgatataatgatatttcttgtgtttgaacgactttaagaacatagattttctttttttgaatatttggaaattcaggcgcaaaggccctacattttctagaggcgggatttacaccaggttaaattcatctcttttaaagaagagatcccttccaacgtgagtcgaacccaacacctccacctgaaagatttaccagtgggccaacagcatgttggtgagaacatagattttctcagcttaccaaagttgaaccaatttacttttagattttaacaacaatcgtcgacatatttgtttatattataagaaatcatcaaacacagagtaca

SEQ ID NO: 24209 - DNA, 592 bp, Arabidopsis thaliana landsberg
gtgaactatactgagtatttcaacatagaaaaattataaaattgacatcctttgcaaagtaaaagccatatcataacaaaaaaatcggaacatttaaccggaaacagagacaacccacaaaagaagaagaagaatgctaaaattgagaagcactggagttggtcgaaggggaccaaatggaatgggaatatgtcttggagaaattgcacacagtagtcgttgacccacttttaatttcagattttgacactatgggctgggcctttcagttattaaccattaagccaaaaactgaccaaaatgcccctgacgaaactgaacccggtttgtacgtacggaccgcgtcgttggaatccaaaagaaccgggttcgtacgtacactgttcatcgacgagaaatgcattaaatgatttctgggtttcggcgaaattgacacttgagattggaattaaaaaaaattaaaattcgttggactcagaagtttttaaatgctaaaaagttttgacaagactaaaactcatgattacctattataatagagattatattgcaagatatttagataatttagattagaattctggagaaaaaa

SEQ ID NO: 24210 - DNA, 782 bp, Arabidopsis thaliana landsberg
  unsure (1)..(782): unsure at all n locations
ttgatttcaccctggaggggcataccattcttagtttggtgaagagttcctttgatgggccgttgcgatcatctccatatcagagttagtaacagtccctgtgatctctcgggagtagagtacattggctatagaatgctggaagtacctgatgacagggctgcttttctgattgctctttgacctggaagcattcaacggtacagagctgnnnnnnnnnnnnnnnnnnnnnnnnnnctcttctctttcatactttggcttagatcccgttccactggggaagccaaacaatccttccaatcgcttgattgataacctatactcatgaccatacacagaaaatcacaagaatcccaatccttcacaatccaactcatcagaggtcataccttggtaaatctccacttgcagcgtggagaggaactgaattgtctcatcttcatatgctacatacggataagccatcagagtgtccagatgacaactctggtacaggtgctgaacatcctccaacaatccgagttgtgcaagtgtggtcgagcaaggatacctagtgctacataactcattcagcttgaagagcctaatatattcctcagcaggcaatacgtcaggcttgtgcagaagtttggtagctctgcgagtatgctcaggcatgtactcatctttcagatcttcgtctataagctcatacctctctgtcatcgctctcttccctcgggctatcttagcttttcttctgaagctttcatattctctttggtttctctcaggccttgacg

SEQ ID NO: 24211 - DNA, 617 bp, Arabidopsis thaliana landsberg
ctgtttggctctgtggaagagaggagcagaaaagaagaagaagtggatcgttggtttcgttcttcgagaaccaccaccgcgggaacgttacggagagcgccgcctttagtccagtaacgacgacagcttttgcaaaagtgacaaggctgtgagagattgtagttgttgtagtaacagaatttagtgtttggtgagtcacaacgaggacactttaactgttcttgctctgcaaactgtggttgttgttgttgttgttgcttcgccatcatcgtctggtaatatgctgctggatcctgcatttttcttcaacctttattcaaaaatcttctcttttttatgtttccttgaacatttatcaacttcccaagaagaaagatcgaatcttagggataaaagattgaatttttccaactgggtatgtcagagagagagattttgatagaggaattgtggttcttatcgcataaatgagacaaatttaagactttttctctttctagatttgagagagaagagaggaagaggaaaaagaagaagagagtgttgggttaaattctaaatgacaagacaagcttgtgtgtgagctgtggtgtgaccagtcttatagggcaacccaa

SEQ ID NO: 24212 - DNA, 1978 bp, Arabidopsis thaliana landsberg
tgtacccgttactgctgtttgatttagaccaaaaaatccccatagtactaaaaacaaattgatattagaatgttgacaacatatagaacttgaaaacatgttttaacaaaaaaaaaaaaaaaacttgattagatatgaaacaaaaaaaaagtgtcaggttatcgagttctcatcgtaattccactttggtataaagttatagctgtttctgttgagatttaaccttaaagttcgacttaccttttaatctcactcaggaccatcattaaaattaacaactttgcaaatgaatacaaaacggaagacagccagagacttaattagtccggatcctcagaataaaaatcttattcgctaaaaacaatgttaaaattatacaaaactggccgagtacaattcttacactcacattcgttgtcaaaatggttttacgttgtcaagattgctttctcacaaataaaaaattctttgataaaagctatctagttaccggtgcaaaagggtttcttgcttaaggtaagaaagaaaaaaaaacctaaaaaagagttttcttcttgtaaaagtaaactgatattcggtttgctaaattgattgttacagtgctgattgaaaaattgttgtggggaagtccgtacaaataacccttatagccacaaaagtttgtttccataaactccaacaaccaacaacagcattcatctcatctaaaccagcaaacattgattttgcttttctttgcgagacattagagattctttttagtgtagagaatcttggttactttggcttctaaagtctccaaattgaacaatgtatttatttgggggttatcatgtattgagtattaaccaatattgtttcatctccttaggatgattcacaaaactttattcatcagttttataaagcttatcacacaaaagccgtccaaaaatacacaaattacatttttttcttccctctaccagagttttcttctggtccaagtaaactgagtttaggattgtaaaattgtttgttgcagtgttgatagagaaattgttgagggcaagtcctgagattggagaagatatttctttgataaaatccaatgaccaagaatcagccaacaagagactctctgatgaggttttctttaaacatttccatctgaacttactttttcctttcattcttctttctttttgtctttcacaccgatcataagctcggatctgttcaatcttcttaagcaagcgcatgtaagctcttacgaagccttcatgacgagcaagctgattccagtagttggagacattgtagaagacaagcatgggatcaaatctgaaatagctaaaagcctgaaatgataagtgaggagattaaattcattgtcagtttgtgtggtcgtacaatatttgatgatagttgattactctgtatttccctgctctgatttttccataggttcaaatataaaataataatttgactttgcttttaatccaaacaaacggaaacagatacgacttctctataggttttgtcactgagaatgttgacgtctacagggttggattcatcatgctaagtcttttgacatgaaagcatcaatactatcaagaaccgggtaatggtgacagttataacctgattatgctgcgtgattatgttgaaaagtgtttaaggcgaggactgttaactaaactgatagacccatcgatgttaaacagtgcggatgacgacatttctgatcattcaaaactgcaaatgaaaacattggttgatcttgttttgagatgtgttagattcagaataggagaaaccaagcttcatatgataggtgttgcaaaagaactcaagcagatagaaaaacagacctccatgctattgtagcttcagtctgaaacattaacttctagtacctgcagatttttcactaagagatttacttatcaaatctcgaaattctttaataactgtttgagagtgcgtttcc

SEQ ID NO: 24213 - DNA, 921 bp, Arabidopsis thaliana landsberg
tttcagcttctgctctttctgtctcctttgcaggtttcactttttacacccactctcttctgctttcgttgcaggtggtctctatacttcatgtgcgcaagaaattctttagtccttgttagaaagaaatgatcacaattgggtaaatctttaagtccttgttagaaagaaatgatcaatattgtagtttgccgctgtgtaaagaaactactaaacaatgatgatcatgatttagttatactgcatgtacaattaagctacctatttttcttatagatgtaacaaataaacttcttttgttatgcaggccgaccatcgatttttgttcataaaaaaataaatcttcgcgaagaggttattttaactaacatatgaaggggaatgtgtttcatgtaactttgtgcataaataagcatacattttctaaatttgaatacataataaatcttttttgctttcaataaataattttggagctgaatttggttaaatgataatgtgactcagatggtggaaagaagcatgcatgagcatgagaggcttctaagaatgaacacaaaggattatgggaacaacagtccgtcacctagacttgagaggcctcctttcaagcttatacccaattgatgacattagaattggttctaatccatccttaaataatatatacatatataggtagaattagtttcagtgactatatagttccatcgaaatttggagatgtaatataaataaaggtaagaagctagcttgagctatgctatactcttatatttggtgtgctgcatagattttggcattttgccatacatccatggcatcacaaatcatgtgtcttgtttttggttttcaaatatataattatgttgcatgcaataatattaatatggatatatatatatatatatatatatatat

SEQ ID NO: 24214 - DNA, 997 bp, Arabidopsis thaliana landsberg
tgcaaaatcacaaagtctctttttatagaaaatttatctctgatcatatactcacttaacaaatttctaatgaagcctcattacatattaaataaataaatattatgatcatggattacaaataatgaagacaagaaaaacgtaagcttccacaaattaaattaaatatctaaaaaatgaatttattatttaatttaccctacttttaatcttagttttaaattctaattcataataaatgagtttctagcaaaacaaattctaattctaattcataattgaagaactgcaaggttaggaaggccaagagagcgatgccatggcttgttacacacaaagcaccttacaataatgagtttctagcaaaacaataaaataaataattgtggttctattaaacaagttaaacaaaaaatcttaaagtactacgtttctatttctagctttaatacacaaacattaagagcttttaattttaaactaaacactggccgttagcggaagtttctatttctctaacataaacatagcttggtcagcaagcagcagccgtaacaaataagacagaaacatgcaataaattgtagtaagcaagccaggccatatctgttcgtaatagaacaaatatcatgtcttccccataatcaatcttccattcctttatctgagtaaggaatatgtttattccatcatgatcatgtgattgcgtagagttctccgaatcatcgagaaaaaaaccccttccatcatcttgagccacctcacctgacccaaatacggtgacatcgatatcagcacatggcttcatcgggagaaactcaagagatatcaacattaaatcagaattgtaaagtgcccagttgtgaagtgttctgcaaggtaggttcctcgcatcaaccgcatagcccgcattaaagagaacaagtacatctgtttcatctttggtgtttttatagtaagaagggagaggataatcatgggcaatccatctcattcg

SEQ ID NO: 24215 - DNA, 752 bp, Arabidopsis thaliana landsberg
attagacgaacggcttttcgcaacagctcctcgactgatttcaataaggtcacaagcccttcttctcatctctttgcgttgttcactctctctatccataaacctcttcaatacttccttgatctcctctctccctatcagcaagtcattctttttcgtcctctcgatcctcattccgactctccagtcctcaacaatcatcttagcgttcagaatctgatcccaaaacaacggaaacgctagcattggtactcctgaatatatcccttccaatgtcgagttaaacccgcaatgagtccaaaacccgcctacagctttgtgacacagcacccgaagctgatcacaccagctcaccactacacctaagctaccttcaagagcctccttaagctttaactcgcccccacgagccacccaaagaaaccggactccactttctctcagtcctttcactatttcctccatctgagcttccgagaccgaaagaaaacttccctgagatatgtaaagaacagagccttccggttgttcctcaagccactggatgtaattaggttccttgttatcattttgaacagaaagttcttcaaaaggtattaaaggaccaatagcgtagaccgggatatcgagcttggaggtgaaagcgtcaatagctttgtgttcaagctcataggcggcggtgaaaagtaaagacctagctcctgggtagttcatcgaaacacaaacttagctgtcttgaagactcggtcgct

SEQ ID NO: 24216 - DNA, 406 bp, Arabidopsis thaliana landsberg
atatatctggtcatgtttttactttgtagcctgatatagcagcaccgggtgttagcatactcgcggcagtgagtccgcttgatcctggtgcgttcaacggatttaaacttcattcagggacatcgatgtcgactcctgttgtttctggaatcatagctctcctaaaatctctacaccctaagtggtctcctgctgcaatgagatcagctttggtcacaacaggttcttgcttcttcttattcttctttttcataaacaaaccatcacgaaccaatcgatctgtttcttttgtagcttggagaacaagtccatctggagaacccatttttgctcaaggatcaaacaagaagcttgcagatccatttgactatggaggaggacttgtaaaccctgaaaaagctgctaa

SEQ ID NO: 24217 - DNA, 641 bp, Arabidopsis thaliana landsberg
tatcaagaagagacagctgtaatttcataaagtcatcaagtggtagagagcagtgtaatgcttaaggtttggtaacaattaaaaaaaaaagttactacttttctaaaagcagagcatctctacttctatttttgtagtagttgtcgttgtacacacttcgactcaatcagaatcacattacatcatcagatgtatacaaaagcggggagaagccagatttgtctaaggaaatgtaacattgttagaaaggatcttcctcatgcaaacgtatatatacacctatttgtatagatacacttgaaattctacatctacaaagtctaaatctccttatttttgggttggttacttgcttttgtgttcttcaagtgcaactccacttctggccgttccatccatgacagaggcagtatcttttcgttccttcaccgcctcagatctagtttactcaccattgaagatctagatctccttcccttcttcttgagacgctttccttcatgtcttgggatgctgatttggtttcaccgccgttcgtgggaaggagaatctaggttctgattccttttgtgagggttcctagtatcagatctgtcgattctatctttgctttagattgtggatttttaaattttattatc

SEQ ID NO: 24218 - DNA, 1624 bp, Arabidopsis thaliana landsberg
  unsure (1)..(1624): unsure at all n locations
tcgacgatacccacaacgccctcgcaggcacaggcacgcgaggaccccactccatttacaaacccttgacatacacaagcgagggcgccacactctacatcggctcaaccttaggaataattcccatctccctataattaaataacattatcctaagctcctcaccagcaaaaaagacttcgcagctccccttcccccacacccgagacggccggcaaagacagcagctcctgccgaccaaccctactaacgcgaagccgagccccttcctccgcactaatcctacgctttgcaaccgcccttcgtcgtcggtgcccggtgctaggaccgggcacgcctggcgcgtccgcagcatgtagcgcagcctccgccgcagcctcgtccagggccgcaaaatagtccaagtcctcctccgacgactcctcggtccattcagccgagctcccagagtcagtaaaatcaaaaaactcagaaacagacccaccacattcatttccaccttccgcggtcgaagccgccaaaaaaccagtagtagcggttgcgtgcgcaggcccaaaatcttgaacctgcgcagcaaccaaaattcagcaacatatccaaaattccctaactatctacacccactacgccacctgcgaagaccctgccattgcgggagccttcgccgttgcctccgtgtcgctccgccgccaccgtcgcagatcttcagcactcggcacagcggctgtgggggcatcaggccgcttcggcggtctctaggggcaggtcttcgccggccgcagcggatgcggaggtatccggtgcgccttctgcggtctccgggggcggctccagggcggccccagtcacagcctccgcgaggtcaggctccgggtctggcagcgcgctgttcagggccccgaagtcgtccacccgctcgccgcgtccgcctaagacaagactcacagattcagcaaacacacgcacagcctgcattcagcaaccgccaaacaaacaacaacgttacctgagccctcgcagtctcggcccgctccctgaccacctcacgaccgtacagaccccacatccggtcataaagggccccggcggattccttcacaaccgggcttcgaccttatagatatctcgatcaaaatcttcatccgcctggtcgaaggcctcgaagtgccggcacccttcgcgggagagcgcgttcatcgccccctcgcaggtgaccagggaggcgtacgacatgaacccccccacgacagtgcgcngttcctgcagttcttcctgcacccattccagacagcgaacgccgagctctcggtccggcacttcgaagtcaccggtccgcgcacccagctcacgatatgtgttcacaagctgtgtgcgcgtccgttcggcctccgcgcgcatcgcggcctcggcccgctccacgcggctctccagggtgatgagccgctcctgcagctgctcggcgcgctccctggcaatatttccctccgctcgggccagcttggctccacctgcgacgttgcgccttgacgagggcctcgttggtctccttctctcccccgcaactgggccggagtcagcctctctccctcagcgcggccacttgtccgcagcttgcgcacttgct

SEQ ID NO: 24219 - DNA, 593 bp, Arabidopsis thaliana landsberg
cgagctctgagcagcacctttccctctctctaaaggcttataacttcgcctctacacaaactagagagatacacaagagagggagagagaattgatccaaatgatgtatgcacttgttggctgcacttgtgtgcttgtttgaggcatttaggggccttttttatagccccaaagggcctaggagtcgttggagcttcatttggaagctcccatccttccctggttgcgggtgcaccggactgtccggtggcgcaccggactgtgaacagtaacaaatttgattgacagtttccttctctggaacagctagccgttggtgcaccggataggttactattcactatcctgtgcacgggacatgtcactattcactatcctgtgcaccggacacagctactattcactgccctgtgcaccggacacaggtactattcactgtcctgtgcaccagacacagctactattcactagcctgtgcacaggacagatcactattcactggcctgtgcaccggacagagttactattcactgtcctgtgcaccggacagctactatcggctgtcctgtgcaccagccaacaacacactaagt

SEQ ID NO: 24220 - DNA, 556 bp, Arabidopsis thaliana landsberg
cactgattttttcagttttcgttctctcagacaacctacacaagagtgcgtctcttcgtgtcaatagagaaccacaaactctagaaaatctacaacacttcaaggataaactgaaaatatccttacgggtttgaaatgttggggggccaaaagccctcactcctgtcggtactactggagctacatgcatctcctagtgcacctcttgcggcagtatatgcaacaaactcataatttgagctagcaaccaaagatatcaccctagccggaggcgggctacatagttgttgcatgagttgtgttgtatatacaagccttctctttgatttaattggtgggctatcctcaagtaaagtctcaaattccacctgggagaacaaaagccatcaacgtattaacaagattgtacaaagagactcgtgagaaaacatgtaatgaggaaacttactttttcagcaaatcgattggttgctctggcccaatcaacattggcctcactgaaaataatgtagaaagttaattacggtaaaggatattggaagaaaaaaaagggact

SEQ ID NO: 24221 - DNA, 1668 bp, Arabidopsis thaliana landsberg
tcatttcacatttttaaaatttcactaaaactaatgagtttgttctaaaataattaattcacaagtgacaatgctgctttacaagtgacaatgcttctatattcaacatacacgatgcattttccccaaaatccatcatttttttgtattttaaatttgagggactgttaaatgccttgtgttcttcacttctcctgtcgatagccaacagtgtacaccaaatagaaaaagagtaagcgtagaatatggaaagcgttaagtcaactttagatcaaaatgttctaaagttgcaatagtaacatttaatttcgcttgcccttaaatgtattggaacaaatgccacacatgatttctatgtttggtttaagaatgcttgtgttttcaatatcttatttatattttagtactaactgtttatccatgtttaaggaagataagaaaagagtgaaaacttcctcaagagaattaattttaagaacataagagcatgtatatgggtgatactcatatagtatcataggggctattacatatatgggtactttatggcccaaaaattagggattgggcattttcataaagggctaacaggataaggcattttctgtgaatgagattgactaatttacccctgtaatttagctccatcaacacatcttttcttcttcttccgacttcacgatccttccgccaccaacaatccctccgccaccaacgactgtctgatgaaccgaataaacaattaattggtttttgatgtaagaaaactaaaccctaaaaagatactgcataaggaacccaaatgtttcaactttagagaataaccaaattgtgatgatgagtttttgatgatgatgatgagtttctgaacatcggatcatgcaaatccactcaaacccaatcttcaccttctatatgtgtagatatgtgcgtatatacacaagtatttgtacggcggtgctaccggctcaccatcgccaccgtagtccatcatgtcgtcaacccataatttcatctccccttcatccaccaccaccattaattcttctcaaatcaaacacaaacttcgattcaaacaacaaaatcatttcaaatcctaataatgataagcctttcgatcatcttcttcatttctggtttctcatttcaccatcaatccaagcttctcgggatcttcatatctctttggtttgaaagtaaacaaagtaataaaaggttaaatccgtattttgattatttagaagtgcctaatcccataagcatttgagaaaggctccaattttacaataccacactttattgtgtcaatcccataattgatcctagtatcataaagaattttttagtattatttataatgtttgtttattgtttgaaatttttatgatactcctacaaaatgtgtttgcattggtgagatcggtttaaatatataaaaaagaaaatttgcaaaatcaaaaagtaatatattaaaacataggattacaaaagattttttttttctttctctgatttgaccaaaaacgctgaccaatcgtgtgctgccacatcacctgatactaagtatcaaaggtattagtacaattatacggatcaggcccaaatacatggtttgatctattaaaatataatttttgggctactgatacccaaaataaatcacctatg

SEQ ID NO: 24222 - DNA, 948 bp, Arabidopsis thaliana landsberg
taagtgttgtcttttgatctcatggtctgttagtatcaccaagccaaaataaggatctcaagcactgattactacatttatcatgtaaacaacagtaaaacctgtgtcttcttttttcaacctaatccatcctgcagaaagataactatatgtataatgaacatatccaattcatacatatccaattccaaaccaatcctcctaaaatctaatcctacacgatacaagaacaccctacaccactaaaaaccaagacatagctcgattatttcatgctaagttcatgtaacaccactaaatcttatatgcatattattcactaaatcttatatgctaagttcatggaacaccactaaatcaataagttcactctctcacaatgctaacttcttcctcgaatctgccgcaacaacattcaatttctctttcaatttgattcctcttttcttgccactattggtgtttagccaatctaatatcaagcttacctctaaccttgattcatacatgcagcaagaaattggagcttccttgatcgatttctctccgtattggattagctaatttccgattaggtttatatggaagtctcttaaaccaagataacacacgaaaacggcgttaattaccggaaaaccacaaatcgccggttgcgtcgtgagagaaagagagagagagagagagtcgtgcgtttagggaaaaaaaaagtcaatttgtttttgttaaaattaaacgtccaatactacggtgacacatatccggctctctcatcatctcaaaactctcttgaaagagccgactctctggattttattcactttatattcatttttaatcaactaattcaagagaaccttgcaattttttgaagacaaccccccattggagatgctcttaaggtatcttcatctgacatattagacactgaaagaggttgaaaaacatatt

SEQ ID NO: 24223 - DNA, 929 bp, Arabidopsis thaliana landsberg
  unsure (1)..(929): unsure at all n locations
acgcaactaatagtgattctcattgttaatatagtttagttgattttcggtaaaattcaaagatatgaagaaacaatataaattgtggaagcccccttgacccaatggttgatcaagggttcattaatgcttctacaccaagaagtctggggttcgagtcccagctaatgtgatttattaacagatttgcagattaatggaagcaagtttgctggagatctataacgaggtacaattatagtcgttcgccaggattctacgcagagaaaatattgaagatgtccatctaacgcatggagaaggagaaagaggtgtcgtctgtcgtggatctaataagagtgacgagaaattgtacgtggcaaaatcgtctatatataacagttctcataatttgtaataaattataaaaatttagacggaaaaaaaaaaactaggaccgtaaaatttaatattattgtatatatgaataaaatatttacccgtgatgtaccacgggttaaatcgtagtttacacatgtaatgactatgactaattagagatattctttgcaaatattaataaatacaaattgctttaaaggaaactacaaaatctctcagatttttttttttcttttgtcatcaaaatctctcatttattctttgcaaatattggaaatctcatgtaatgactaattagagatatttaaataagattgcaatctttaatatggtaacaatgaaacaatgtattggaattcggcaattcgcacttaattgttaatcgaataactaattagttaaggatactgaacataaccaacttgaattattttttgattaatctnnnnnnnnnnnnnnnnnnnnnnatgttagctgtcatgactttgacgttttttgtgttatttaattaagaaacggcgaaaaacttgtctgcttttggagttgga

SEQ ID NO: 24224 - DNA, 1152 bp, Arabidopsis thaliana landsberg
ttaaatgaaagtaatgattatacattttacttatgtacactaacatttgtacacttttatgtacactaatctcatattatattatttaaactttgttttgtatattatcacttgacaaaaatggttttatcttttgaatatgaggtgtacacaataggtgaaggtgtacgatattatatacggtgtacaaggtgatttatggtttgatttattatctcattattgcatgtatactattaatatcatgtacaccatattttacattttcgtacaccatcttattatgtagttatacatcattgtatattatcgtttgtacatcactttgtacactgtctataccgtataccacttcttagatcattaagaaacaaaagttatttttgactttatttgactatatgacaaaacaacagaaggctataaaggtcattcactaaaatctctattagatagaaaattgtattagagaggaaagagaaaagtgtctattctccctatttctaaaaaaactacttactttgcaaattatttgtgaaaaaagtgtctagtttccaacttatctctattgttttctgctacaatatttaataaatcgtactttctcctatacctaaatcaacacggcctttattttgtagagtatctccatgggatagatacccttgctagtttctcaacaaaagaaaaaattattattttaattatataatatattttgtttaaattgtaatagttaaactaatatttgattgacatgtggcgattctgtcagagaaacgattctcttagtttctcaagtgaggtactcttctccctctctatcctactttttcacttttttgttcttattttattattaagtttttcattcagaaatgctgatggagatggcctaagacaactaatatatatgtagttttttatatcgaatgagaattatcctgttccattatactaaacaaatatttacagattctatacacaaaacattattagatactctagattttgccgattgtaaaaatttaatagtctaatcaatggtatatatataacgatgtaattaatttgcaagtagcagagaaaaagcaatactacttttggcatatagcaacaagttatggttttttcttttttcgtttcaaatta

SEQ ID NO: 24225 - DNA, 981 bp, Arabidopsis thaliana landsberg
acaagatgcttcatctcataagcatttttcttggagtcagaatattttgaggaggaagagtaagattgtggttcctgcagacactaaaattaagaataatatcctcaagtggttacatgattctggcattggtggtcattctggaagggatgttactcatcaaagggttaaagggttgttttattggaagagcatgattaaacattcaagcttatatcaggagttgtggtacttgtcagcaatgcaagagtgatactgcagcttatccggggttattacaaccattgcttattccggattcaatttggagtgatgtctcgatggactttatcgatggtctgcctatgtctaatggaaaaactgtgatcagggtggtggtggatcactttagtaaagcagttcattttatggctctatcgcatccctatagccccttgacattggcacatgcctatttggataatgttttcaagctgcatgagtgtcctacttttgtccaaacctcagcaacaaacgattcttcaaatgttcccatgatcaaaaaagaaacatcttttatcttctgtagaaccaagactctgcttcgccttcaagaagactttgtgcaagattcttcttcttgctttcgattcgaccagagcacactaacgcaccatttgttaagaataagaaatgtaatctctatttcttaacttccgatacaccgtttataaagagattgagccaccggcacatcaccaattcataactctctctctctcactctagtgacacgtcaccgaccattagtttccacacgcctaatcaaatgagaaactattattatacacgagtcattattcacacgtgcaacattagcttcttcaagcttcttctttcacacctgtggcttcctctgctctattctttcttgtatacacatatagtggcttatcagattgactggtggttccattaccttgttcttggtacattatgaat

SEQ ID NO: 24226 - DNA, 616 bp, Arabidopsis thaliana landsberg
gcgtgtgtgtgcggattcgagtcttgtgtgcgttgcttttcctcccttactcttgtgcttcttgtgatcaaaactttgtaagggcgagaggctccaacttgtggagattcctcgcaaacgggaaaagacctcaaaaggaacagaccgtggtattcaagtcgatcatcagatcacttgaaaggggttgagtgcaaccctcgtccattgggacgccacaacgtggaagtaggcaagtgttacttggccgaaccacgagataaaaatcgcgtgtctcttgtgttgctcttctgtgattgttttagtcgcaagagatcgcttaataacaacttgattaacttgcactaacttttatataatcaagtttgtggctatttagtgtttgattttacaggatcacctattcaccccctctaggtactctcagctacggcccaagcaccgcacgacgctcatatcgggttggcccaggcactattaaatgggtcgtgcctcgggtggctcggcagacacggtccatttggccctctatacctccgcacgataatgatggtcctcatatcagttgccaccacctcgttcgccattctacttcttttctctctgaaagtcacctaga

SEQ ID NO: 24227 - DNA, 1288 bp, Arabidopsis thaliana landsberg
taggggaaaaaaaaaaaaaaaaccagaaactccccatatctaaatgcattcaagattaaccgattggtaaagtgagagaatcgatacatttatatttattattcactaattaatttattgataaacactcacttaataacatttgaactacgaacaaatgttatttgtacgtaaaagagaaaaaaacatgaaaaaatcgcaaaatcgggaaacaagggcatgaaattgtggcatgcttaaaatgtagactcctacgcctcgtgaagcttgggaagcttcctttttggatctcctcgcttccacgtttgtcgctgatccatccaacattaccccaaacctttaatttccattcacttcttctatacaactatctaatctcatactttatcttttctctttattaattattagactataggcttccaacctaaaaccaattggcaataggtggaaagacccatatcttatatatatcacttaagatcctattcaacttccgatgtgggacattgtccctaatacgccccctcgagatgatggctcttctagccaatgatctcgatatgtttgggcatggatcggcgggccaagtattgggccggaccgatgtggatcgggttgagtatgtgcggatcgggctctgataccatattagagtgtgggcttccaacctaaaaccaattggcaataggtgaagaggctcatatcttatatataccacttaagatcctattcatcttccgatgtgggatattgtccctaatacgccccctcgagatgatggcgcttctagccattgatctcgatatgtttgggcatggatcggcgagccaagtattgggccggatcgatgtggatcgggttgagtatgtacggatcgagctctgatatcatatcagactgtggggcttcaacctaaaaccaattggcaattggtggagaggcccatatcttatatataccacttaagatcctactcaacttccgatgtgggacattgtccctaatacgccccctcgagatgatggctcttctagccattgatctcgatatgtttgggcatggatcggcgggccaagtattgggtcggaccgatgtggatcgtgttgagtatgtgcggatcgggctctgataccatattagagtgtgggattccaacctaaaaccaattggcaataggtggagaggcccatatcttatatataccacttaacatcctactcaacttccgatgtggacattgtccctaatattgaccaaatttatttagggatcctctagagtcgac

SEQ ID NO: 24228 - DNA, 600 bp, Arabidopsis thaliana landsberg
aaaccacctcatccaataccacagcaaatgatattgctgggcaaatccttctccctgctccaaacgggaccagctccgtatcctgacctcggtaatcgacatacgaattcaaatgtctctctggtctaaactcctccacgtctggtccccatgtcgcagcctctctcccgattgcccaagcattgatcattacatgtgtaccggcaggtatatggtagtctcttaatttgacatcatgtgttgattcgtgaggaaccatcaatggaagtggaggatgtagccttagtgtctctttaatcacagcttttaagtatttcatgtcttgaaggtcttcttctgatacacccgatttgtctttacaaaccatacgaacttcttcttggagtctgtctagacactcatggtgacatagtagctctgtcattgcccattccaaaagagtgtatgttgtgtccataccacccacagaaacatcctgaaaaccaaaacaagaactatggttatatactaactcatcaatgaatttaaatttggtggcgtatcttccctttaccagataattgcttttatgcttaaaccgtcgatttcaaacccaacgct

SEQ ID NO: 24229 - DNA, 1619 bp, Arabidopsis thaliana landsberg
tggtggtttgcctaatgggacggaaagtaaaggtgtatgtttagaaatgcgagggtagcgtaggggaatcttactatacttcttacgctcttggcgcttagaagtgacggacgccgcgtcggagccggaggtggatgccgatgaagaatcggtctcgtagtagaccaccttcctcatcctctttttcttatccccactccgattcggcttgtgggaagaggatttctccttcttctctttgtggtgtgaagaagatctcttctccttccctttggaggagtccttcttcttctccttccttttggtgcgggactcttccgatgaagtgctcccgtggcttgtagtgggcttttcgccggtctccatctctttcttggcgtgatctcccgacatcacttcgagcggttaggctctaatgaagcaccgggctctgataccaattgatagtcgcctagaggggggtgaatagggcgaaactgaaatttacaaatataaacacaactacaagccgggttagcgttagtaatatgaaaccgagtccgcgagagagggtggaaaacaaatcgcaagcaaatgaagagtgtgacacgcggatttgttttaccgaggttcggtactctcaaacctactccccgttgaggaggccacaaaggtcgggtctctttcaacccttccctctctcaaacgatcccacggatcgagtgagctttctcttctcaatcacttggagcacaaagttcccacaaggaccaccacaagtttggtgtctcttgcctcaattacgagtgagtttgatcacaatgaaggaatcaagaaagaagaaagcaatccaagcgcaagagctcgaaagaacacaagcaaatctctctctctagtcactagggcgttgtgtggaatttggagaggatttgatctctttggtgtgtctagaattgaatgctagagctcttgtagtagttgggaagtagagaacttggatgcaatgaatggtggggtggttggggtatttatagccccaaccaccaaaagtggccgttgggaggctgtctgctcgatggcgtaccggacagtccggtgccccctgccacgtcatcactgccgttggattctgaccgttgaagcttctgacttgtgggcccgcctgggtgtccggtgcacaccggacatgtactgtttgctgtccggtgtgccagtatgggcgcgcctgacttcgtgcggagagcgcaataaatgcgcggcagagacacgttggcgcagagatagccgttgttccggagtcgcaccggacagtcggtgtacaccggacagtccggtgaattttagcggactagccgttggagtttcccgaagctggcgagttcctgaggccgcttctccatggtgcacggacactgtcggtgtacaccggacagtccggtgaattatagcgcgagtgcctctggaaattcccgaaggtggcgagtttacgttggagtcctctggtgcacggacatgtccggtggtgcacggacactgtccggtggcacaccggacagtccggtgcgccagaccagaggtgccttcggttagccctttgctcctttgttgaatccacttttggtctttttattggctgagtg

SEQ ID NO: 24230 - DNA, 1001 bp, Arabidopsis thaliana landsberg
ggacgtttcaagttggtatcagagcatgcttggtccttggatcgtttgggttagggaaaacaccactcgttggacagcgccttgtagataggttttgaagcttggtaagtttcattagggtcgtggactaacttggaactttcaggtgagaaaaagcaaaacctgaaaacgaaagaaggacaaggaagcagcgggaacaagtcagaccgagaaggtcgagataacccgtgagacttcctcaaagggaaaagaagttgtccaagagaaggaaaaggaaccaagggctctcccgactctgaaatctgtaatcgtttatccgtggataggggaaacggagatcgaggaggaaatcttggaagagaccgatgaagagaatgatgaggcgggaaagggcggagaaaacccaaccgcaattccttcattcggagagatgtgggattccatgaaaacgataatggcacaactggccgttcttacccttgccgtcctgccggcaggaatgccttcgaagggaacggacgggaggattcggcaggccgtgacacaatcggggaacaccgtgaggaattcgaccgaggtgatcgaaattgatccaccggttcgggcagttcgcaaggtcgactaccttagcctgttggaacatatctcatggctcagaacaaaacacttttcgggcagttccaatccgattgaggcggacgagtggaggagccgtttggtgcggaacttccgttctactcgttgcccggaggactacaagaaggacatagcgatccacttcttggaggccgatgcgcataactggtggcttgcggttgataaacgcacgagtgagcacgttgagaccttcaaggacttagaggacgagttctacaggaagtactttccgtccgaggcatgggaccggctagagagtaatttcctgtatcttgtccagggtcatcgtaccgtccgtgagtacgaggaggagttcgacaaactcacgcacgaacgtgggagag

SEQ ID NO: 24231 - DNA, 557 bp, Arabidopsis thaliana landsberg
tgggcactgtgagcttggcgaattagctgttcagtcatgccactcatgtcaaaggcctcgacttcctcattatcaatagaggatctttttgcccgagatgaactcttccttcttgaatccatggagattggtggtgagcttcaacaaggcaaacaagaacaactttccaagaggtatcaaagtaaaaaggattcggtttttggtgatggagattgagcttgaaaaccgattgaaaatttgaggatgaacttggaattgatcgagtaactttggtgaagtatgatgaagtgagaatgcgtgaagagtgatagggagagtttggaatgaaacttttggagctttgtgagagagtttgcaaaaatgatatgatgaaagagagagtttcaaaagttggtttggagatttcaatgggtggaggaggatggccttgggattctctttggagggattgcaaaagcgagtttgaattggtgaggggcatgggtaaatggtttgtccgttgaataatgaagtgaaggggaacaagtgggacagtcgacatcacttcttggtctcca

SEQ ID NO: 24232 - DNA, 883 bp, Arabidopsis thaliana landsberg
tagggacgatgcccagaagagatcatattcatatcacatgttcatggatctactttgtttctgtagtttgtaaatgttaaaagtcagccgagcactaatatattttgaattatttatgactaaaataacaaagtctcttgcccaaggatttatcaattaacttattatcattaaaaatagaaattaagactaatgttctgttaatgtttttgttgcttcacaagttcaccacttaattcaaatccgcatattcatgttttagaagaaataaatagttatatatatctttagttatatatgataaaatgtattgataaaataattgtttgtgaattgcgaaaaaatgatggaagttttttcctccactttctgactaaaagtttaaataatgtttcgattccagagataagttaaattctcagaatttcgacatggtgtagattgatcatagtagtctcatgttctaaaaataaaaagatactagatattgatccgcggtacatcatggatgaatatgtttattgaaaagttatataacttttttataagaattattatttgtatataaataatatatttttgacaaataatttttatctatgtaaaagttgagtattttatgttttatgttatgatatttgttgtatattagtttcatattaaaaatcagtattattttttgtggttagggtttttttagagataataaatatttaaaatttgtattatgtagagattgacacgcgggacaccgcaggttgatatttttgttagaaaataagagaattttattttaattaatattatttatataaaaacaaaatagtgaatttttgtttttaagatgatttatagatacatgctattttttttttatgtatga

SEQ ID NO: 24233 - DNA, 487 bp, Arabidopsis thaliana landsberg
ggtacctcagccgaaggcactggagacgtagtcgtccacctcctctctggtgtaatcccatggaatactgggaccttgtagttgttcaccctcctctggtgcgggatactcgatctccatgtcaatcgggtgctcaatcgcacactcataacgctttattccccttgtgatcgagtattggtgaaattttttgaatttttatgaacgaaaccaaaaggtactcgaccctcctactcgatctccacctatgagatggagtaaattttttgaatttttactctatctccaggttacttctctattcctgagcaccacaaacacaaccaaaacgaatcaaaaataaaaagaaagaaaacttatttacaaggataatcattggacttcctcccaagtgaggttgttttaagtccctagcttgactcctcacactcatcatgcttaaggagggtgatagagaaggattgaactcttctcttcttccttagca

SEQ ID NO: 24234 - DNA, 974 bp, Arabidopsis thaliana landsberg
acccactttttcggatcgatgagatcacgtctacgtctgttttctaatcaattcggcaatccactaaaatcgagagatgtacaagtctcatgctcgagctcacaacaatggagtctctcagctttctattacaacagaataacaaactcacacacacgaacacaatgaagaagaagaagactttataaagagtcaacataatgaaaccctctctcgcgaaaagagtctttcatttaaccagcttccaatgtgattcaatcgacttctgtaaaccggtcttcaatcctcataaccaagcattaaaccaaataccataacactccaccttgattctacttttcatcatctcctagtgaactgcacttcatgaatttaaccttcggcaacaagacttaagagtcttacctgagtagcattagaacgtctaaagctttctcaaacttctttactggtatgcagttcgtgagcatatctgcaggattcacagacgtgtgaattttcctgacctttacctcaccagcttctatgatgtctctgatgaagtagaacttgactaccacatgcttcgttctgtcatggaaggcattgttctttgacaaacaaatagctgactgcgagtcacaccacacagttgcaggctttggctgcaatcccatgtcttctagcaaccctctaatccaaattgcttcctttacagcttcagtaagggcaataaactcagcctgtgtagaagactaagctacaacatgctgtaaacttgatttccagctcacagaattaccaccaactgtgaaaacatatccactgatcgaccttcttctgtctaggtctgcagcatgatcagagtcacaatagccttgaacttcaagattagctccttttgtaaacaccaagttcagatctcttgagcccttaagtaccttaataaccactttactgggtcccaatgcattttaccaggaggacttatgaac

SEQ ID NO: 24235 - DNA, 641 bp, Arabidopsis thaliana landsberg
agccacctggtactgtgaaaccagcagcatacgctacggtggctacaagagttgccacaagtagaagagcattttcattgtctttatatttgtcaccaccacttagatgatgctctgatctgcttcttagagtcattccactagtgggtatcacttgaaaaccccttcgtgagcacgcacacagtaagaccatcaacgtcattctctgtttatccaaagaaagtgcaacaaaaaatagcgataagctctaaatgctttgatatttgataaaatgttgtggtacatagagagatttgatatacctcccggaagacatatctagattgcagactggcttctgcaatatccatagctgtcaagccatcattgttctgtatttctaggatttttctggaagtaaaactagtaaggttgctaacagttcgaggacgccaatatatggtggctagatgcagaggtgtattcccatctgcatcttgctcttcaatcaaatgattcttctttctatcaagtctcttgatatagtttagaagtaaagacccagccttcccattcttggctgcaatgtgaagaatgttctgaccttgtttgttaagcagctcttttgaatctggacaacgttttataatttcttttacaac

SEQ ID NO: 24236 - DNA, 405 bp, Arabidopsis thaliana landsberg
ggctttcttatcaagcagatattggacttgttgatcactgctggggaagtgtggggaagtattgagcgttattaagttatcagatgaagcttccttcttatgttttaactggtgaactttgagacgtaaagagggacatatgaaaagaggttgagtagggaggttgtctccaccggaatcaatggttgcttgagtggaggaggacggttgactgtttatttgagataacaaagcgcatatgagacattgcttttccatcgatttctccctctcgaaatccaccaatggaattcatggcttaagattgcttgcgcattgtgtgatattgctcatctctttcttcccatatatacaaaatacacaacttcaaagactcaaaagacagctaatctcttacacatatca

SEQ ID NO: 24237 - DNA, 705 bp, Arabidopsis thaliana landsberg
  unsure (1)..(705): unsure at all n locations
tactttacttctctgataactcctgcactgaggagtcttttgacttcattccgagcgccttcggccttgtcatcagacattttctgaagcctttgctttctgggtctgaaagatgggtcgacattgagcgagtgttcaataacatccttgttaactccgcaaagatcattggctgaccatgcaaaaacatctttgttgttgaacaaaaaccttatcaaggttttctcctgttcttcggataattgagagcccaacagcaccttctgctctgctatgtcctcacataagagcatgggcttcggctgatctgctgaagctgctttctcccttctgaatttgtactgttcacaaacttcagctccatctatattatggattgcttttgagtcagtccagtttccctcggcccttctggcagcttcctgacttccatgaatagcaatgggtccttgatccgaaggtatcttcatacaaaggtaagcaggatgaagaattgcttcgaaagcattgagggtgccacgaccaataattgcattgtaagggtattccatgtcaacaatgtcaaacacaacttgttcagttctggtgnnnnnnnnnnnnnnnnnnnnnnnnnncatggtgattttgcccagtgctacaatctgtcttccttcgaagccacagagagggtgcgtacgatcatgaatcttatcttctggctcttgc

SEQ ID NO: 24238 - DNA, 2709 bp, Arabidopsis thaliana landsberg
gagtggtacccgtcgaagttgatgcaaaactctcgcccgtatgagttcattcgaacgggacggattttatccgggtccggatttctctgtcgggtcaagtagataaaaccataaacttccccttgatttatgggaaaaatgtcattaaaatctccaacttattgaaaaagttgatttaatttatcaacttccaactaaacgaattaaatatcaaacttttgttgactttctaaataaatactaaactttcgtatatatggccatattaggcataatattaagtagattaacatattgcgttcacatagttaattttttgttaacagattcgttaatttaaaacgttattgtttcctataacaagaaagcgacctcgttttgttataacgaccgaattaaattcccaaatccaatcttaaatctccaaatcaagcaaaattctaaccctaaatcttcatatgatttgaaattgggatttaattgagcatttatgacataacgacgttattttattgttatagggaatattgtcggttttcaattaacgagtctgttaaaaaaaatggactctaataacagggtctgttaatgtcatacttaatatggctagtcgaacaaaagtttggtatttatttggaaagtcaaccaaagtttggtatttatttggaaaatcaacaaaagtttgatatttatttcgtttcgttggaagttaaggatttaaatcaactttttcaataaattggggattttaatgacatttttcccatttttattcgatttgtcgtaattttatcgaattttatttttggaattatgatttgattcaaatttgttgaaccacaaaacagagactgaggaaaactcttagtgaaacagacgctttctgtatactcaatgaattcacagtatctggtgtatgaaccagagaacgaaccgagccggttaaaagcggttatttcaaagatgtgtctttcagtagctgaacaatttatgcgcacggctctctcattgcttattttgtatgtacatgaacaatgtagtttccaagacaaatcatattatagtacagagagcacaacttcttttgaattggaacatgtagctgttttatacatcatcaatgctgcgttttctccatattgacacaattctgtcactttttagtttaggctatcgatcgagccggtagcttcgtaaaaaagaatctctggtcgaaccttcttttctccacagaacgtgaccacactcttccagttaccaatatcctatggcatcacaacacatagatcaacaatgtcaggcctatctaaagtcacaattcaactcaaggaaggcaaaaaatcaactgttttatcttacctctcctactaaagactcacgcttgagattgacccatcggttcttttcataagctatgcaaatgtgttcttcttctacttcactgcaaccaacctacatcacattcccatatatcccgacacattgtaaaagagaaatacagaagagcaataggacaatcatttgtgagactttttctaccattgacccaagccggtagttagtgtttgtttctaagccttcttcgtacagcctgctgatatctatctcccagtccaaagcctttgttgtttcagatatttctttctcagtttcactcttctcccattccaacactgacattgcaaaccaacaaaacgccaacattgctttatgattaagcataatatatgaaattgagtacaaaagatcacaatcaagggggtcaaagcttaccaatggtaaagataggcgggcatctacgtataatgtgatcaacatagcttttcttaccacaacctccttttttattgtcacataacattttatatcccaggcggatcaacttaaggatatccacaaactttatattcccaaaagcacactgcatatatataagcacacaacaactatataaggggaagtacctgcagtttctgtagaaaagacaaggagagaaataaatgaaacataccttcaggtctctgattgaatctgcagctataacaacgccataagacctttgctctggataatttggcatctttctgcatttgctacatttcattctttcatattcttccagtgtaaaaagacgagttaccaagctttctctttgtggacttttccagcattgccagaactcaaggatggctatgactacctctgcagcatcatttgactaaaaaaaacggacaaaaaaaatatgagaatggcatttatacagcaaccaagctttctggaaaataaaatatgcatagtttagaatttatcttccgcacaaaccatggaatgaacttcttctaaggaagcaagtaaaccgcttaggaggttactgtataaactttcgttttctatctgctccgagacaaaagcagggaagggatctcgtattacacaaggaacttgattgtcagaaaatggttgccgattgtggaccaaatcctctttaagaaccttaaggttacagagggcctgcagtagagcacatattatcaaagcaaaataaggaggtaaagagattttacatgaaaataaagaatgatctgaatcagtaaaagatagtttaagttttgaatttgttggtgattgctttaccttaagcacacatgtcaagaattgaattgtatctgcgtgtagcttattcatgtgctgagaccggatgtttcgaca

SEQ ID NO: 24239 - DNA, 543 bp, Arabidopsis thaliana landsberg
  unsure (1)..(543): unsure at all n locations
tcagaagaagctacttcgcttcggaggagaagagaccaccccgaagccagagaaggacgaggttgtcatcttcaaaagctttttaaaggctgggctaagattccctgttcacgagattgttgcggagatattgaagaggtttggcatctaccttcaccagttaactcctaacgctatcgttaggcttagcgtttatatttgggccctcnnnnnnnnnnnnnnnnnnnnnnnnnnnnnnnntttctgtcgagttcatgaattgcattatcaaacaaaggcccgaaaagatgggcttcatgaaaacttcggttgctacaattttgcctaccggaaaaccgcaaagtttcctgtaatcagctaccgaagcaaatggccggcaggctggaaatcagaatggttctatgtcaaggttgatgaggacaaggagaagcttgtgcaaagtccactcgagctaactttcggagaaacccgaccccactgcaacatgacaccagagggtcaaactcaacgggcgatggatgaattcagaatcgttgcagagca

SEQ ID NO: 24240 - DNA, 688 bp, Arabidopsis thaliana landsberg
catttttattatcttgtaggcctttgaaccgaaacatgaataaaaattctttgcaactttttttttggctaatacaatgagcgacggctcggagtatccattacgcctattcggctatagcgcgctatacaaatacgaggtgaaacttatcagattatttctgataagaaatttttatcttcagaaacccggttatacttttaacaccggtatcccagctcgttcctaaacgctggccgagaaatgaatacgatcggatcgcaaccgagatattataatcgtccataacttttggatttcaaaacgattcgggactaataaaccataacttttggatttcaaaaagtgacttaaattggataaagccgtccaggcacaggttctacataccatcggataaagccatccaagcataagtattataatcgagcagaaagagaagaggaaaacaaaaaccgcctcaggtccataatcgagatcttcagatgggcggttatccttggcagggaggagcgatccagcttgctctgtaattcccgcctcgtcggttaatgactcgaccgacctatgaccacccggactcagaggagcggactcgggagctggagctttgagatcatctttcagctcggccatgaagcgattaagattaacctcagcatcagcgaaatcttttaacactcatcga

SEQ ID NO: 24241 - DNA, 4940 bp, Arabidopsis thaliana landsberg
ctaataacgtgaatctgttgtgcacgatgctttatcatctccgtaagttttatttgtttatatatcaacttgttgatgacaatactgcgaagactaaccaggtgagacagtcaggagaagctaaagttaaaaaactagccgctaaatatgaagagatcgtgaagcaggtttatttcgtttccattatttttatctgctaatatattgaaccatggaaacaaaagctttgtggtgcatcaagttaaagaggtttccaaagttaaaaagctactagggttcttccagattctctgtaagacatattagtgagccttgcttttgatatttgcagtttcatgaatacacggtgtcaaaggaccaagcttcatagttcatactatgcataatgcagacaatgaacactatatcaaacaatagtaacagaaatcgaaagagacccatgtcaaaatcactctcaataagcaaaaaacagtaacaaaaaatcatttcgaattgagtaatcaaaaacccagatcgaattgagtaaaaatgacgagaatttgcttacttgaactggattaggaatctcaggaggatccatgatgtgatggagttgagatgttgaaggaactcgccggagaaatcgccggaaagaagaaatcgccaaataagcgtcggggaaatgttttttccccaaatttatttttgcccgaacacttaaacctaatattttttgaccattgggccgcccatgtccatcacgtccagtccgctaatgcccatgtccgttaacgctcatgtccattaatgcctgcttcataatgggcttgtccatgcccggtccattaggcgttggacacgggccgctcgtccattttgataactctactacagatcaatcgttcaaagaaataataaaatctcagtagacctatgtttggaagaaacaagaaaatttcatagatccgtataatggatccatgattcaagattagcataattaaattcgaaagtaaattgaccttataactaaagtaaagtgaattaggtggttacagttttttccaatgacattgtaacataatatcttacaaaagccaatattactatttgaaaggtacttccgtactagtaatgtagggatttgagacgtgattatttatccttaatattctaattagattgaaggtttatatattaagttttccatagttaaaagtcaatcttgaaacaaaaagatagtttgagggttctcttgtaaatttcctaaaagtaaaacattaataccctaaaaatcgaaaaatcagaaaaagcttcggagcaagaaaaatcagagaaaattcaaaaacccttcacttgcctcactgttcttcgtcatggcgaacaatccttcacagcttcttccttcaggtatgcaattttttcttcacatctctcactttccaccttcttatatgtaagaaaatcgaactagatctgcgattttttggttttcaatttttgagcgatttggtttgtttgtgcagagctaatcgataggtgtatagggtctaagatttgggtgataatgaaaggagataaggagctcgttggtattctcaaaggataaaatgtttatgtcaacatggttcttgaagatgtcaccgaatagtaagtctgattttagggttcgattattgcttcatatcttgtttaattggaatgttgcttgatctattacactttaggaggtgaatcatagacattgaaccatggatgtgattatgcagaacttagccttttggattttgtttttgggtaattgatctcaatactgatttgtgaatgtccatcacagttcattcatttgctgattaatgacatttattgtgtatgcatagagtctatttcagcggggtcatatgtggtttcggtgacttgagttgtttgtggttgtgtgaggattagttaattgatgcttaaacccgtgttgctttggagttaggatctcatagattcaagttttgattgtaacaaattcttgattgaattgtaactagagtgtgttactaatttatctaagcatcgttgtgtagtgagattacggcagaaggaagacgggtcacaaagcttgatcagattctactcaatggcaacaacatcgccattgtaagtaaaaaaacacttgtggttactcatagccatacgttgtataaacttccttgtgatgaattttcaagtatcttgatataaacagttggtcatttgaatagtcaaattgctaagaaactggtgttgaaaatgtttgtgatgcagctggtgccaggtgggtctcccgaagatggagaatgagatttgcgagatttgattggtgttttcagacttgtgtgaggaaggatgtaacttttggttttagatttaacactttgttcagagaaaagtagttgattttaaactcagaatgacaaaagttttcattgttcagcaatgtgaaagagctaaagcatcatatttattagactcaatgcatcattacttctacttattcaagctctcttcgatgttctaatgactatccccgttagccacacgagcgttggacaagttatcaacagagtctcccctctcaaaaacagctgcagctcccattccagtgcctgtgacgttcgcattttacatataccattaacataggtaatcattgatccaattcaatctgaaaaaaaatcttatatatatacctatgcacattgagattactccaaagcggcaatcttttcctctccgcttcatctcgtgcaacaatgtcgcaacacatcgagctcctgaacatatagaaaagaactctattagcctgtaacaaatgttgcattttatttagttacgacaagcttggtaagtagtaacctgtagcacccaggggatggccaatagcaatggctcctccattaacattgaccttttccatatccagctctaacttcttgcaagagtacacatactgagatgcaaatgcctgtttaacaatgcaacaataaagatttatatgtatgtattattccgaaacaggaaaaaaaccaatgtgaaatattttgttacctcattgatctcgaatagatcaatatcgctgacgttgagccctgcgagcttagttgcagcgggaatggcaacagctggaccaatacccattacagatggttccacaccagtaacagcaaaactcctgcattgttccggaatcagatttgctcggtttcttgaactggcaaaatgttgtatattcattttacctgaatactccaagaatgggaagtcccttcttcatagccaaacttctcttcattagcagtactgctccagcaccatcactgatctgactagcattgcctacacaaaacacatatacttaaatgcttcaatctatgatctcacttatgccagtgatagttaagagagttgtttctaaccagctgtggtggaaccgttctgtttaaagacagtcttcagctttgccaaatctgccatgtttgagtttggacgtacaccgtcatcaacagatacgacgattgccttctctgctttagtctcagggtccacaatctgtcaagaacaatatcatttactgagaaagctctaccaaaagggctttaaaggaagtttgggaggttcttgttttaccttagtagcaacaggaatgatttcatccttgagtttaccagacgcgattgcagctgcagcgcgtttgtgagactccacctgattattactgaatcagtacttatatgaactagagaggaaaaaagtgaagagaataactaactaaccgcagccatatcttgctcttctcttgtgacaccgaacctttctgcaacgttttcagaagtaattcccattggaagcaaacaatcacgggcttttgggaaatcctgtgcctattcccatgtagagtttacaagatcatcacaaaactcttcttgttgagtaaatttatacactcattgtgatagcttactcttggattagagccatgaaagccgcctccaggaatatgatcagttgacattgattccactccagcaccaatacctatgcaattcacaaagttgagagaatcaatcccatggcctatacaagcagctagagactacaaaaaactgatgcagcagcatcttaccaatgtcgtaataaccagctctaatggaagcagcaacatcagcaactgcttgtagtcctgatgagcattgtctattgacagttctaactggcacggagtctagctcgtaaaagagaaggatgaagaaacatatcaacaacttgtgagatattaagtttatcttgattcttgaatgagatttagtaccaggaaaaccagcaaaataagctgcaactctacactccattgctctctgagaaccaggcgctatcacggtaccaacagcgatatcaccaacttcacttggatccaaagatgttctttccactacagcctaatcagaacaaaccatgaaacataagaaatcattgatactactactccatgcatgcacaaggtttaattgatgacttaccttaagaacagaagcaagaagatcatcaggaagagtgtctttgaaacctccacgtctcgctttgcaaatggcggtacgatatgccctgaagaagaagaagaatcaggaaacaaagaaaactaaagaaagtgaaagtgaagcaaactcaatgagtatacttacgctacaatcacaatgtcatctccaaaagcagccattggggaaacttcagaaacacaattcacaggctaaaattaacaaaaacacaagtgagtcacataataaaacagagttaaagatcatcagcttccacaaacaatttcaatgtctaattaagactcacggattaagacaactaaacttacagacagaagagaaggttcatgtttaagagaagaattagaagaagaaactggattgagatgacgaagcaat

SEQ ID NO: 24242 - DNA, 731 bp, Arabidopsis thaliana landsberg
gcttttgccgacgctctcagctctctcttgctttagctgttcttgccaagatgattaatctcggctatgagcccgatattgtcacgctttcttcgctgctcaatggctactgtcacagtaagaggatttctgatgccgtagctttggttgatcaaatggtcgaaatgggatataaacctaatacctttacattcacaactctaattcatggactttttcttcacaacaaagcttcagaagcagtggctttagttgatcgaatggttgcaaaaggttgtcaaccagatctggttacttatggagtggtagtaaatggattatgtaagagaggtgatactgatttggcttttaatctgctcaacaagatggaacaagggaaattagaacctggtgttttgatctacaacacaatcattgatggtctttgcaaatacaaacatatggatgatgcgctcaacctatttaaagaaatggaaacaaaaggcattagaccaaatgttgttacctacagctccctcataagttgcctttgtaattacggaagatggagtgatgcctctcgcctccttagtgatatgattgagaggaaaatcaaccctgatgtattcactttcagcgcattgatcgatgcgtttgtgaaggagggcaagcttgtagaggctgagaaattgtacgacgagatggacaaaaggtccatagatcctagtattgtcacatacagttcattgatc

SEQ ID NO: 24243 - DNA, 5374 bp, Arabidopsis thaliana landsberg
tcactcaacacgtttagagaaccttatcctgtaatctgaacagagtagaagaattttctaaaacattaaaacaaaggctgtcatgggtaaaagctacagaaacatttttcctgttaagaatttacaaacctttatagaagggagcaaagaagcccagttcatccgactcatcaacttcgaattcatcgttgcttaaggttaatggtttcagaagcatacatgtgtgctcaccagtcacagcactctgatccaaccatattttagaaattgtgttatgaactgctagacaacactagaattagtaattcaggagaagagggaaagagggattctcaactggtatttgactgatgtagaatggagcaaatttatgttttctccagaaacggaagaggtccaaagtaagcccaaaagagacaccaatgtagtggagtctctcaggtcgtcgatcacgaagaggaaccagcaaaggtggaagattggcacgaggctttatctgttcctcgagcaaagaaacctaagggaaaaaattcaagtaagaactagaatgcatgatgcaaaaccctacaagggtagattaaaataatcaagaacctttgcagcagcctcggtaactctgactggtgaaggctccacttccagttcatcatcaccttctgatattgaagctagctgaccctcaaagtatctgcacgtatcaatcaattaaaatatttgcatgtattaatcatctaagtcgtaatcattgcatttacctggtcaagagttcaaccgcagcagacccatatcccatctacatagaatgtaatcaagaatttgttaaatctcacaagaaacctacaagactaaaaaaatgaggcgactaagaaactttaccttcatagcgttggggtggactgctatgcgtactatacgagcaccagaaagctttggaaagaccacgttccggaactgttcacagaacttccatggtatttgatctccatgtggtgaatgaccttctcttaaacttttttcagctgatttccgagatatctgtccttcgagacagacctgcataaatatcaatttcaaggatacttaagaccagttacatccagaatcaatcacatacgaacgacaagatatgagattcatgattttacaaaacaaaattgctgcaaacaaacaattcaagcagactgatagctgcttttattctttgtttagtccaactaactgtttttctccaaacaaacaatttcaaagagcagaacagaaagtaagaaatcgatacctgaataacacacagtatgtcaggaagctggtttttggactcatcaacaggacctgtgccaaaaagaaaataaggcaatactctaaatctgatgattatctctagctatgaaaaggaggaacaattgcataccgagcaacacaaacaaatgatgagcaggagcatccgacaaaagttgaagatcattaggagaattcttgtagtgagaagagacacaaagtgccatcattcgctgtagaataccacttaatgccttattaacaaaatataggtagcaaaaagtacgtaggttgtaaaatcaactattattacctgtaaaaacaactcactgtccttgtgataagaaaataaggtgtctcggttgacataataaagatcacactgacttggcaaaggatggctacaaatgcaagaaaaatagaaatcattttctagatcactagttggcaagaaaggatggcaacattctatttatatgaagtgaaataccataccaagcaggatttggaagacaattagcaacatcaaggcatagtaatccattaagccaggattcaattggatctccagaagcgtatcttatagactcactaagttctattttcttgaaaaggcaacctgaatccaaagaaaattcagacagtcagggagttccccaagataacgaatcacatcaactagatagtgtaggaaaaaaagaggatatctaatactacatactaagatatgaaagtagtaggccctgcgtgagagaacattagttctaatgaatatgaacacccatcagacagaggactactctgcatgaagtttcaatcaaccttcggaggcccttaaggccaaacttaacaacaaaacctacgttcttggaaaaaatcattcacatatattcctcaaacttaggaattggagcaatggtttacttcaaaaacataaatttctttcttatgaaaatgctagctgataagccccgacgcaaaggcattggagcgatattttaaaaaagatgaacttctatattcttaataataatattgggatctctacaaaaaaaaaaatatccaggttgccacatgccaaaagtgaaagcaagatgtagtagtaaataccagaaagagagccttcaacaccagtgacaggggctcggctttgctcttctaactgttggaggagtttcagggacaaagatctaccagtaccttcatagctttggcaaagaaggtaaaacaaacaaaaatcagcagcctgactgaccctatatataatcaagccatgcatatatctttcaatatcatgggaatataagcattttactcctgtttcacatacccactgacagtagatgataagaaaactaggtaagggccaagtagagacttcacaactggcaaaggaatagctgccgcttcatcaataaccaacagctccacttgtgagagcttttcatgttcatgcggttgtatatactgcatgaaaaaagaagaagaataaagcaatttagcgatcgacacaaactacggcttcttacaaaaattcagggttggacagacctggatagtttgcctgtgctgcttgaagatattgatccgtacgatggctttattaaattcaggattcacacttctcacgacatcatattcaagatgttccttcaaatatatagttgaagatagagttcagaaaattatatggtaatcctgaattaacatgcaaaacaaagtaacatttttcttcttccaggagatagtgcagatttcaaatctatgacaaccccaacaaaatggaagaagtccagcagtttctagaaaattgcttcatatgtgtgatgcagaagaagctcatattaccttatattcaagtgcatcgaaacctttgcaaacaaactcgaagactgttttcaagttatctgggctcggtgctgttacgtaaatattagagtacctaacagaaaatacgatatagaattaataagacaataaatactattaacaaacatgaataaaagctcaaaataactcaagcctacccagcagcaacagccccagcaacagctagaccaagtgcagcagattttccacgcccacgactagcaatcagagcaactatgctacggagggtcttatccaatattgcatcgaaaaatgtgacaacagctttaccctacaaaagagaaaattcaatactgatccaatgtgcaacacttcttaatccaatgtgcacagctgactaaaccacatacctgatccaatgtacaacacttattaattaaaggaccaacaggaaaatcatcgtttagtgcatctttcaaactcttcaggtctcgttctgcctcagaaagcgcttccgaatccttttattacaaacacataaaattgaaaagttaaagatgctaactgatatgatggaagacaatctctctaaacaacccatgaaaagaagtgtgaatttgctatagaaattacctcctttgttggaacttttgtgatagatttgatatgagatgaaagtggcaataaattcaactcatcatccatgacaacgcatgctttgcaagatgctagtgacaacagaaatcgttcattgaaacgtccggaagcttcagagtgtgactcggttcgaaatctatcatgcacatcctgatatgaacagaaccaatcatgtaactccaaataagtagttagcaaacaacataactagcaaaatcagtcttcataccataaccatggtgcagagactagtaagtgaagcaagcgattgtaataataatacaactagcccacccccttcgactgtctctattgttcttgctagtagatttggagttagagcttcaaaatcctgaacatagtaagaataggatgcaaatatgagtaagctgcagcaaaagtaaatgtttcttcagccattaatcaagagtacctgtaagatgcacatgccaaaagtattcccaagaattctttcagaatctttgtacaagcaatgagtaacatccaccacatcaagaaaaagagagaaagcgtcgagtttttcaggatctaattgtcctctctccttcatcttcttcaactgcttagcacgttttttattgtgactgcacacaaaaccaattacacccactctttttcaggaccaagttatcaacaaatagaactccacaaatatgcgtaacatagctcacaaaatcaggttccatcattctcttggcatggaaaattcaaaagaaactcacacctaattattaactaggcttcaattaagtttttaataacaaaatttcaacgcttcaacttttgcaaatatctaatatttgaatcggttgataaatcaaacctgctaatgtcgagtctattcttgtagcaccatagcacacttgggttagacttgaccaccgattttgacaaaatgtgatgaagattaactatctgttacataacagaatcagaaaagtattagacttgaaatccgaggaaaatgcaaagtagaaattatctataacaagaagaattttacctggtcacgagccttatcaccaataatgacaaacatggaacggtgtctaagtttaacaccgttttcaatcagagtccttatacgttcgtctaccttcttcctcattctcacaccagttattggttttgcctaaccttaattaagcccaaatcaaaaattcaatcaaacacaggttttagcttaatgtagagtaaaaaggcaggaacttgtttgaaaatatctaatggaacatctcaattcgaataaagtttcaagctttatagggtaaccaatgaagcaaaagtctcaaagttgagaataaacggagaaaaatcaagcaaaagaaacacaaaaccggcttcgattcctgtacttactcgcactgattacaattcctaactgtaaaattaattctttcgtcggaagtaatgtttgtgacagagaacgaacctgaggatggtgagtgaagcgagaagagaggtaaaagaagcagcttgatgtgtgtgtgtgagtaccaaagcagagaagcgcgccctaagtcaaccatcggtaaccttaaaaccctaaaattcaataaccgaccggtttgtttcttcttcacatttcccg

SEQ ID NO: 24244 - DNA, 529 bp, Arabidopsis thaliana landsberg
gaacatggtgcaccttttgatcttggtcgattgaatgcactcgtcctgcaccaaccacccgcttctttccacttatatccattaacttgcacttctgattagccttcaatccttcagatgctttttggcgctgacatgttacattataaaccaggattaaacggatgtaaaatttttattagagtcaatatgtcaaactaacaaacaaacttacaggagatctctgcagaggggattgtgatgctagatgagatttcttcacaggagactttggaactactgctggttgcttctcaccaagagattatgcaattgttcctgcagattctgaacctttggctgcagataccttaatagaagaattataacctgatgctgccttttgtatccctgttgctccattttgttgacttgttgctactgactttccccttgaggttgatgctgttggatgagttgattgagaaatttgaagaggatctttctgaactgttgaatctatagtgttttcatagaaaactttgtgggc

SEQ ID NO: 24245 - DNA, 1145 bp, Arabidopsis thaliana landsberg
cagccgacactccaaaagcagatttacgggggttcattttcaaaccatactgacgcattttatcaaaggctttgcgcaaatcagctatatgagaactaaactcagccgattcgactacaatatcatcaatgtaaacttccacaatgtttcctaacaattcatggaagatcaaattcatagccctctgataagtagcaccagcatttttcagaccaaatgtcatgacaacccactcaaataaaccaatgaagcctggacatataaaggccgctttagacgcatcttcttcggccatgaaaatctgattatatccggcattaccatcaaggaagctaataattctatttcctgatgcattattgattaatgtgtcggctatgggcatggggtattcgtctttaggagttgctctatttaaattgcgaaaatcaatgcatactctaagtttacctgactccttcttctccaccagcacaatattggagacccactctgcgtatctgcaaggtctgataaaatcagcttctagcagccggtggatttcgtccttgatgcgtgggagaagatctggacgaaatgttctagctctttgcttgaaaggtctgaaaccagatttaataggcagccgatgctctacgatctcatggcttaatcccagcatctcagtatagttccaagcaaagcaatctgaatattctttcaatagaccaatcatttcattttttggatcgatctccagggtcttgttcacaaaagtcgcccttggagttttaccatctcctatgtcgatctcctccaaaggatcggctgatgtaaacccctgtcctaatttgtcgagatctctgaattactctatcatgtcccccacagaagaattagatgatccttttgtgatgtcggactctccggtatcgggggccggatcatccatgatactgacttaatgctgtagtaggttgttgggtcttaaagaccgaactgttttgtgaaagaccggaccgtccggccttagaagccgaactatccgtgaccagggactcgtgcattttgtatgtattcatcatttaaactttatttaggatttaactgattctacattggctctagcataacaggaatgaaacccttcttatatatacttatga

SEQ ID NO: 24246 - DNA, 632 bp, Arabidopsis thaliana landsberg
  unsure (1)..(632): unsure at all n locations
cttttattccacattaactacctagttgtactacttgttcctgaatgaccattcacaaatttacgatctagttgtactacttgttttatctgaagcacaaatccaatcatttaccaatgcataatatcctaaaacgagcctaatccaaaaaataacggtcttctctcataccttatttgctgcatcatcatgttgaacaactgcattcgttgcctcttcttcttcttcacaagaatcagcatttgggtctgaaaaatcgtcaattgaatcccctccgacggcgtttgaatgacccaaatcggcggcgtcacaatcgccggttgtaggctgaatttctccggcttcctcttctgttgtaagaagctttgcgccttcttcatctctttggggaatctcggcggcggcctcttcgactgatggaggaattttgccggctttggtcgctnnnnnnnnnnnnnnnnnnnnnnnnnnnnnnnnnnnnnnnnnnnnnncattttggaaaataaatttgcggagatgaaagagacaaagacgaaccgaaaacggagaagaaagaagaagagaagagattgagttttccggcgaaattggtgtcgtcggagacgagagaagggagagagagagggtacgag

SEQ ID NO: 24247 - DNA, 601 bp, Arabidopsis thaliana landsberg
  unsure (1)..(601): unsure at all n locations
agagtgcctacaaacacaacataataattaaagatagaatttgaatagaaaagattctttggcttcaaagatgacctttgaacttctattttcgtcacttctcttgaccatcaaattaatcatttggtttgggctcttcttgggcttgtaatgggcataaaatgacttggacttgatatatattccttgaggccaagttctgaaagttatgtcatgatgttgatcaacaaatgggtgatttgaatgtgaatcatttgcctcactaaaaaccttgtcaagaaaacccattgggacaaaacttgacaagggaaaaagagtacaaatgagacacatgcccatttgatgatcatgtatcaaaaccaatgaggttaagatatcatcttttccatactccttttcacctacaagctcatgctcaggttcaagctgctcctcatcatcaagctcctcctcggttacaagctctttatcattttccaagtcctttgtgctttccatgatcatatcaagtacagtattgaaattacaatattcatcaaatggaaaacattctctctctttctaacttgngtttgtcattttgatgtgctccacagattca

SEQ ID NO: 24248 - DNA, 4201 bp, Arabidopsis thaliana landsberg
ttaaacaaattccatctaacagagtatgaattgcggataaatctctctctaatttccgtgacacagcaaatactatcaggaaaagtaagtgcagttctgggattgacagtagaagacgaacctgaagccaagatcccatgtccctacttatctatgccacctaatcagggaacataccaacaccgagcaaaccactaaatactaatcactctttcattagactatgcctaagtttccaacagctctaaaaccaactcaaaattctactctacctacatggagccatactttaagcaaatctaatgccaatcattcctaaaacttgggacctttaagtataatccaagcaagaagtcagcacatcttcatagcctcacaccgggaaagtaaatagcaaaataaacatgaaataggaagcatataaacctcttctgcattagtacagaagcatatcatccgcaacatcaattccaatactctcacaaatctaatgtccaggaacaaactatgtcaaaagacatatcgaccaaattgtataaataattcttaagtaagaaccttaaagatcaagtgacagatacaaacattgaatcaaatttcttaaacacctttctaaatttatccaaaaaagcctttacacaccgtgctattcccacccaattcaacctcatatcaaagaacttatattgcagcctttttttgctacttgctaacacagcatcggaagtgattcacgatctatcaatatggaatcaaaatataacaagaagagagaagagagtatagatcaagaaacaagcgtacgcgatcaagccacggtgctcttctccaccatcagcaagagataccaccaatgtagagcaggctctagtggaccacaacacaaacaaagccgcaagcacaaaccgaaccggccctgctccctggggaacgaacaatgacaccgccgataaaaccaccaccggaagcaaacagtatccaaccaagctcgtacacgtatggagattaaggttcccatttctaccagcaagcatgttaaagacgacgtatagaaagatagaagaaacaacaacccaaccaagtataacaccaaactgtatcttcccagcgagcaattgaaataagcaaagcgcaaggtataagaagatcggaccagagagatctgaatctttgtgaacagtctgattgattcgaaaaggattgagaatcgatctagttttcttccagatttgatctggatggataccgagttcgtcgagtaaaggctcctcatcctcaaacgaagcagagactcctctaccgaaagatgcagatgaagcgattgttccgtcgaatggtcccgccggcattgaaacggcggcggatccgatttcaaatggaatgaaagggattgaagatgaagcggaggattgacgtggtggttggtaaggagctgtgggaactcggcgttgctgaacatttgcggtggccggagatgatccactggtggggaaaacaaccggtggaattggaaaatccttcgtcatcctctagaatccctaattcagatctcgaatttgaagttagtgttttctctcaatcggatttgatttcagaaattgaaaataattccagtaacaggcgactactacgcattcttcgtgttcgtatcttcgtgatatgtgataagggcattttcggtaagtgaattaataatgttttgggccgtataaggctttatcagcccattagtttgtagttttgaacagcctttgctacacaaacaagtcaatagccccacttgtgagttgtgaatagttttcactactgactaattatcgtaattttataagttattaggctcactgaacaacaaagtcgttgtagtatagtggtaagtattcccgcctgtcacgcgggtgacccgggttcgatccccggcaacggcgatctttttgtgaggaattttcgaatattttttacatatatgaaaaaacataatggcttcgcccgggttcgaaccggagaccttcagtgtgttagactgacgtgataaccaactacaccacgaaacctttgcatgtaacatcaaaaatataacatgttattgagtagctataatattttcttgttttttggttgtatgtacagttacaacataagctggaactatggattgtttccacaaacatgggaagatcaaactctaaggttgatggtgcttttggagataatgatccaggtaggtaaaatgattttggcttctttatgggtttcattctcagagcttagcttaacatggattcgtgttttttatttgtagttgatgttgttgagattggtgacgttctaaaggttaagcctttagctgcttttggctatgattgatgaaggagagctagattggaagattgttgcgatttctttggatgctccttaagctctatcttgtgaatgatgatgttgaaaaacatttcccggtatgatctcaaagaaccgagattcatgtcgtaatggactattaagttattttttctgtagagaaatagggatggtcctttcataattttgcaaacagtgaaacaagaatatacaaatgaaggtaatttgacatttgtttatgtttcagccacaattctatttgtacaagaaagtagataaagaactgagaataaaccataaaattctcacagtgaccttttgagtttttttgtctcatgcttcctggagaagaggcgcaacggttgattctctggttactgcatcaggctcggaatcttcgttatatcgatccacactattcaggaaaatccctgtagagtcacaaacacaacaaatcattaccacattatactaaaaaaagaaccatttgaactttgagatcccggtgtggctaaaagcctaacctatggaccaaattgcagcagctggaaagagaacgaatgtaagaacaagagaagtcactctccaattgttcacgtagtcctgcgtgagtaaaagagaaaacattctgaagttggatacagtgatggctcaaactaatctagatgaataatcgcgtttaactgaagcttaatttgattaagacattagagctctgaatcaagaattttgtggatacagctgagaaaccaaacctgaagaactccaacgagtggtgaggaaggtacatctccaaagatatggatagagacagtagacatcgccattgcaagtggtctcagacttggtttgacacaatggagaactatgaaattcacaggaccctaaacatcatgaaataaatcagaagaggtggatttgcaaaacatgaagtatatgaatggtggaagtcgagattacctgtgtggcaaagacaagaagttcaccaacagcaaaaagagctaaaaatgcatacatgctcttgaaacagaaaacagcaaagcaaaatattgttcttataaacgttgaaactgaaagaacctccaaaatacagaaagagacgatcaagtactagttttccaagatcataagtggtagaaatatatgtttggaatgtggaatttccatccatgtgcgaataatttgtcttccaagttgatgatcttaccttaaaagcatttgaaattgtggcatccatgtaatctagaatcactcctcctgataatgtgccaacgattccgcatacaactgtgacccctccaaatatcatatcagcgttttcctgcaatgggataaaggcatcaagagatatacttctactgttctacacatggaaacgaaacgctctggtaatattttaccatcttgtatatgttataaccagcctttggtccccaatatgaataggcgcctaaaacaaagttgtaagcaatataccctgagaaaagaaggaaaacagttgcaggtaatcaataaatcatacaagaacacagatgctttttaatacatgacaagggaaaatggttaccaagaatgtttgtaacataaaccttatctaccaaaagcaatttcaaatctttcataacagctgagaacccataaccaactggcaaaacgtttaagttatctgtccggggctttcctgtatcatctggagcaaaacctgaagatacaagatttattagaaatagctgaactccatcagggacataggatgtgtgtgtttgcaacttcagacacgcacctttcagatgcaagggtttgatgacaaaacctagtacagcaaaaggaagcataagta

SEQ ID NO: 24249 - DNA, 798 bp, Arabidopsis thaliana landsberg
gaaggagctagcaatccccattccaagattccagctatgtacagacacaaaatatgcaagatcactgcatgaaatctatctttttggtaaaggaaggatcttggtgaataggaagactcggttttcggtgaattgatacagtgactactctactttgcaactgcaaactaataatgaaacagagagaactcaacatgaatccactaacaacaattataatactttaccaaatactacaaaatacttgcagttaccaatactacaaaacagaactcaatcatgaagaaactcaatcataaacaaaaccattgtgagaaaactcttcatccgaacagagaaacggatggtccacgagttcaccgatggtccacctcgaaccaggctccttaaccaaacacctcatcagaaagtcttgagcttctgcagataaccgaatcgagatttgaggagtgagatcactgtgaccgatcaaatcaacccaatcatcatgagccaaatcaccatgctctccccaaacctttttcccggttagcatctccaaaacagaacatccaaacgcccaaatgtcaacagcaaaatccacaagcccactgcctattaactccggagtcatgtacctagttgtccctctcatgtgcccacgtccgtttccatactcgttagaacctttctccattgataaaccgaaatctgcaatctttgtcaaaaacccattagacctaaaccggtgatcaacagggctgagcaagagattgtccggtttaatgtcacaatgaataatgtctctgcggtgaatgt

SEQ ID NO: 24250 - DNA, 1146 bp, Arabidopsis thaliana landsberg
gcgtcggctccgctgacggacaacacgactaggctgcggccaaccaggttcccattctcgagccaactccacctctgttcatactgatatcgctacccctggcctcggtccaccgaagggcggccgaggggtctctttaactaagctagaggagccccagacaacaaggccaaacgggccgagggattcctacgcctccaggatacggatacctcacccgtcaccttaacacggggcgactcatgcttggtaaagcggttcagataaccaacaggcgagacttagtgctcgaaaatgaggaaaaaacacggctccgtgccgaaattacatacatgttcaggccccgacagccgcaatgaacaaaaaacgctggcattcgaagtgccattacaaacggaactccggttccccctccgcgggtacgaacaaccccactcgatgggggttggcttgcggacaacagaagaccgacgaacgtcgcgccgtcacccgctccagcagcggcgacgacgacttctgctccggggggccgaacagcgacacgctgacctccaggcggatgctgctgccaggaggcccccgcccatgcccaaactcgtgaggcaaggacgggcagaaggccggagagttggaggtcggtccgtggccggctctggctatctcaccggcggaagaacctcttccagctgccgtggcggacgcggcgccgcgagcgcgtccgaagccactcgcgtctgaagaccgggcacgctgcagctgccagcgccacgggcaacacctgctcctccccccatcattgagtgaaggagcgggccgtcgccggcaggggccgaccccaactcggcactctcccctccccagccttggtgatgaaaatacttgaggctgagggaggggcagaggccgcagcccggctcgctttcccccaccatcaagccggaggtcgccatctcaggtgaccgccggtggaggggtgcggtcgggctgcatgatgaaaatccttgaagccgaacgatggctaaaaggtaccaactcccacggagttgcgttcctccaatggggaggcgggaagacggcggatacccccatccaggggcttggaagatggaaagacacgacgcgtgagggaggaagaagacatggttg

SEQ ID NO: 24251 - DNA, 5973 bp, Arabidopsis thaliana landsberg
  unsure (1)..(5973): unsure at all n locations
agacaatgtcattccgaataggctctctctagtctgccccccccccccagttatgatgtggttgaccagcatcagggactttggggctatggggaattagagaatctggactctcttggttctcctcaagctacgttatgtcgggaatcgccccatttttgtcaaactgctaaggtccagaatcatccatttgagcttcgagccgtctgcgcatggcctgagtggtgacgaaactcaccgttttcagacgtacgctcggttggctaattgtttcaacaagaatcatnnnnnnnnnnnnnnnnnnnnnnnnnnnnnnnnnnnnnnntagtgcattgacagcagaattctctacacgaggaactctagatagctcgaacttttcaaatttctttgtcagttccagggctcaatccgggtatgcttccatgcgaatatccttcgctttgtagtccccgaaatactgattggcaacaagcagtgaatcacaatgagcttgcagattacgaactcctaccctgatggcgaggcaaagtccgaccaaaagtgactcgtatttagcttcgttgttttagcctttgaaagcgagccaaaatgattgttcaagaatttctctaagacttcaagcaaactatgacattggacccttgtttagaagaagctccatccagatgaagaatcctaggttggtccggaatgtcaggttcgggagtagccaagggcagctcgttcaggaaatctacgagaagttgagattttaagcttgttcacgcgtgaaactctaggtcaaattcacttaacttgattgcccagtttgctgatcttccgaactgagttggactgtggaggatggtccgaagtggcaacgatgtcaagacgatgatcgggtgcgactgaaaatatggcctcagcttcaaagctgacgttacaacaactagagctagcttttccatcattggatatctggtttctgcgtcggagaatgacttgctaacgtaaacgattggacgcttgtcactccgttcaactcgcaccagaacgccagtcactacgctttccaagacagaaatatatagaaagagctgttcaccaaactcgggcttggcaagaattggtggtttggacagatagcttttcagctgcttaatgcctcctcacagtgttcaacccaaacaaaccccgctttcgatttccacagtaatgtgtagaaaggtaggcacttgtcaatagatagggatatgaacttgttcagtgcggaaactcgacgtgttagacgctgaacttctcttatactgcgaggcaaagtcatcgacatgaacacatttatctgcattgggtttgcttcgattccacgctcggtgacaatgtacctgagaaactctcccgaagggacagcgaagctgcacttcaaagtgtttagcttcattccgaactcattcaaaaaagtgaaacattcctgaagatgctcgagatgcgaagtagagacggctgacttcacaaacatgtccatgatgtaaacctccattgttttaccgaggagatccttgaacattgtgttcactagacgatgatatgtggcatcaacatttttcagcccgaatggcatcaccttataacagtaggttccgcgctccgtgatgaaagacgttttttcttgatcttccgatttcatcaagatttgattattacatgaaaaagcatccatgaaggataacatttcatgtcccgtagtggactctacaagacgatcgatgtggggaagtggaaaacaatcctttggacaagctttgttgaggttggtaaaatccacacatacacgctacttgccatttttcttcttaaccactacggggttagcaagccattttggatacttgacttcacggatcgagcctgctttgagaagtcagacgacttcggtgttcaccggttttgcgctatccaaaccaagctttcgacgcttttgcttgaccagtttgaatgttgggtctacgttcagctcgtgtgaaatgaccttcatactaattccagtcatctctttgatagtccatgcaaaggtgcccttattatttttgagaaattgaatcacttcgctggggaagctctcacttagactagccccaatgctgacaagttgatccaggtgctccacgtttatgaccaccttttttacgaggttatcccctacttttttgatcgcattcaaagatgccttgagttgtggttgctattggattttgagcttggccctagcaaatagcacattctcgaggtgcactgatttcccatgatttgcctgactccagtaggggatgggaacttaacgcactgatggtaagttgatgggactgccttcatcttacattataagccgccggtcggtcaaaaacagagaactcgatcatcttaacgacctcttgtgcggtaacatgaagcattattgtgaaaactgacatcaaggttttgctggtaaaagatacaagtgggcttggagctcccttaatatccttcttggaaattcccattctcacgagtgtgtcgagaaaaatcagatcaaccgaactcctggtgtcaatgagtatcctttagacttcacagttcgcaatgtcaagagtaactacgagggcatcatcatgaggcttatcaaggttgctggtttcttcctcgggccagttagcacggctcgttttaggctcttttccatcggagtaacgacttttctctcgtgttgcttgattgcattgatagtatcatcccataattaccttgaccattttctttagccctttagtagtcacgggagctgagtcgctcttttatttcttgttcgggcgtgacgtctctttggactctactgcctcaaattgaggctgagctagctcgatctttgagacgtccactttaggaatttctcttgaagcatactttgcagctagtaactgtaacactcctaccccgtcctaggcctaggatagaatgagagcgtcacgtggacgcccgtagtcagccaccctaggctcccgaaacgaatccgttcgcccaagtcgtctgaccgcgagtgtcgttcctcacgaacgcggcctaaggatttgcaacccatactgcgatacgtgagttgtgatagtccggacaggactaattataccatgggagacacgaggttttataaaatcagagctttattacttatcggtaaatcgagtcttacataacatatatataaattataatctcttacaaaggcaaggaaatctacaccggttggcctaacgtcctttgtacccctaaggtctccctactaatggttgcctgcaaaagagagtaagggatgagcgctaatcgttaagtgaattcgggttcccctaaacatgcaataactccccaaccaaacccaaaataacaagcaacaagcaaccaagcaatgcaacaatcaaattgtatatactctgcggagtatacacaacaatgcgcaacgaaattaaatatgcatgcaactaactactcaaccactaaacctagcgcccctcgtattgatcttcccttcccttagtcgtgaacacctatatacgtagccgcaaaggctaaacgagtatagaacatgattaagttctgagtatcatattgtggtggaaactcaggctacatcgtaatgcagcactcggccataggttacgagcccgtcatctccgagtctttgtaccattcgtgtgtaaggaactagccactatgcacacactactaggatacaaccttagggaagcatcacacacgcaaactatactaatatgaatgaaactaactcatgcaacaaacaatcatgcataagcaaatataaaccatggggacttaacctcacatggtttatcaacaatcaaccacaaaaaattatgcaatcatacaagcaagatttcatcacaacgataaccagattatacgacttaacgtataaccgaggatccaagcaatcaatgcataattaacacctaatccattctagttctcatcaaacaattaaacaaacaagttggtttacatgcgttcatcgaagaacatgcaactacatgcaacacgcataacctgaactcaccttggcttagctctcaggaaacgactactttcgactccctatacggactttgatccgaccaagctttctccgatggaatggatctaagcattggactgaatcaacctcttaagaaatattctaaaactaagggcaaaactacctactgattaattacattaagcataattaatcactactctaattatgattagtcccgctaatcatggtttagctaaccctaattaactattactagtccgacttaacgtcataattaattacttaaatagtaattaaccaaacctagttcctaatcataggaaacttaccttggctaagcgactaaggactatcgaacgcctagactctagactactcgctcaacgactcactcgggaactctcacggacaactctcaggttttagagcgttttggtgatttttgtgtgtgaggaagcaaatgaaacgaaatggggtatttatagggtgggtaggtcggtttggaagctagaggtggcgagataggcatgatcgttcttatccggaacgttatccaaacgcacggatagacacgatcagtcttatcctcatgcatataggatcagacgtacttatctgtcagcaacagataggcttgaatgattttatcctaatggataggcatgaacgtgcttatccataacggataggcttaaacgtccttatccactcgttnnnnnnnnnnnnnnnnnnnnnnnnacccgtgaactgccgataactgctccgtcggccgtctactgtactttcgtaccaaaactgattttctccgtccatctttaattttccttgatcaaaactttggtatttgtcctagaataccttggatcagctccaaaattatttctcatcgctcctgatcaagttttcctcgatagccattcctcggccaagccctcgtcttggtcaggggcattacattcttccctccttaaaagaattcgtcctcgaattctaaggattaagagacaactctaccactgaaagactaaaagggtatcacctaaatctctaaagtttgtcttggtattgctcctcccatttgactaatcatacaacttccatgcttaacatagtgtaaccgttccttttggttcacacccttcataactcttttcttcgtcttcattgtcttcgtattaagtttacaaaacatcaccgctccaaaattatttctcatcgctcccgatcaaggttttctcgatagccattcctcggtcaagtcctagtcttggtcaggggcattacattctcgtctccttaaaagatttcgtcctcgaattctagaagattatggctagatactccgaactcctctctactttgggttgatcataccttgcatctctttcctcgggttctctccatcggtctatagctcatccacatttaaacttgtctatgtttctcttcttgtaaaaatctccatgtagtataagatcatgtcctggtgacaagatctttcacccgcttcaacccttccatttttcttcaatatttttactcatctcctttaaatatcacttttggtttagtcttacttcccgtcttcatctctggggttgtagccctactcctttccaattcttcttgcggtccttttgggctcgagtacttgataatttcctttcttatcaaataaactcagttgtttgtttcttataaaacggttcatcttgtcttgagggtgctaactttataagtctctccataattttcttccaacctctttggacttcttaacttcttgtcttctcttcttgaatcttggtcaatgaactccatccgtcttggtactgctcctcacctttgactcatcatacaanttccacgcttaaacatagtgtaaccgttccttttggttcacaccc

SEQ ID NO: 24252 - DNA, 601 bp, Arabidopsis thaliana landsberg
  unsure (1)..(601): unsure at all n locations
acagaatatcaatcacataaatgtaacatttgtgtttatccttaattgacatacactatatcacaaactactagtctagtagctcgcttaaattaaacaaaccatttgatatacaataaacggtcaacgaaagtttagaccacaaattccaaaagaagcaaacattcatttaagaatctaaaattctatgggtaggaagttacccttgttcagaggctgcttcgtttgatttttttcttttggactttacgtagactctgaatagtcttaaatgcttataatttccatgaatagacttgaatagacatgacaaacatttttgcaactgcacacacgaaacaatcaaaccattttgatttggctgtttcgtggcgaaacggtaaaccacaacgctgattctggaaccttcttgaggaacatcagagtcaagtgtaacgtcaatatcgaagagctttcgagctttcttgaagaagacatattctttcttctaggccatcttcttagaggagccatcaggaatgttaacttcttccctctggctgcaccttgtcatcacaaacacatcgttttgaggagatgnttgttcgagagatggtcgtga

SEQ ID NO: 24253 - DNA, 694 bp, Arabidopsis thaliana landsberg
gtcaaaacctctttcccacaacaacaatatagaccctttggcatgagaagcacatggtagaaatgcaggctctgaatgagaaattagacaagttcattctactatagaagaagcaagctcactttgcttgtaaagatgagcagtttcaggttcagaatttggggaataatcagttagaagagataagatacatccagaaccagggagcctatatcaatggtttcaacagctatggacaacagcaaacccattaaaagccttttgttccatacaatcaatgtcaaggatttgttcctatgcagcagtttcaaggaagctaccaatagcagcagtatgcaccagcatgttttgctcaacaacaaccaactaacaatgcacacgatgcagacatgaaaacaatgcttcatcagatactacaaggtcaatcttttggatctatggtttcggaaacgaaacttgctgagatacacactatggtggattcctcttataatgatctgaatatcgagtttgagactttgaactctaggctgagatgcatggaaggacaaattgcttctcctttagcaccaacgcctccaagccaatttcctagaaaagccattcagaactctaatgaatatgcccaagcttgtacacttcgaagtggacggaagctgctaaaccatcaacacaccgagaagatcactaagga

SEQ ID NO: 24254 - DNA, 576 bp, Arabidopsis thaliana landsberg
tcgaaattgtatagtcaaacaaaaatgttgcaattagtattgtcaaacaaaaacgaaaatatactcctattttttgattcgaaacaattagaagtagtgggggcgttaccgaattggctggccttggttggatgattaagttgacttcttatatcagtccttgttagaaatcctacgtcgttgatgagatagattccaacatataatacaaggcacatggatcagtttattgcttattacacatggatgattaagttctttaataaaattgtgtcattggacattctaatccatgttctgtaatgatattatgaaataatctaatcgtgattgtttatggaggcatattagtggcaataaataacttatgggctaagtggctaactaaatgctatcttcacaaatcacaatgtacaataacgacggaaacaaactaattatcttaatgtggataaatgagaaattttattgtcaaatcaatttagaaaccgagtgatctatattatactgaatattgtaagttgaacatgcatgttcatctctaatgattcaaaagacagcatgtcactattatac

SEQ ID NO: 24255 - DNA, 5089 bp, Arabidopsis thaliana landsberg
  unsure (1)..(5089): unsure at all n locations
aaaactcaggttgcaccaatatcttcatttagcagtcttatactcactaccttgcattatagacctgacaaaggtttacttaatttaaaattttctgtatctccttttatgcttcatatgagatgctcatctcatcgtctaacaaacttccctctaattttttttttttttttnnnnnnnnnnnnnnnnnnnnnnnnnnnnngcgagttgtagaggttccagctgttatacacttaaatagaccctttcgggtaagacaactgtttttttctctctaatgtttggatacccaaagatttaattgaacttacacgggcttcaaactgagtgtaaactgttttccataggcatacttgaatctcacaaaccaaactgataggcaactgggacccttcgaggtctcactgtcacaagatgaaacacaattggagaagccggttggtattaatggtctccagactctggtaacatatctgaactttctgttttcctaaaccatgtagttagaactttgccgtacacggtgacagaattgtgaatcacgtcttggctatgcaatgtgtatggaccaaaactttgcaatggctagtcgaagctgattcatcactaaaccgtttttattatacaaggaactgacaccatcgaaactcttgcagatgttacccaggattgaagcatttggctccaatgatttccaattggtatgacaaactgaccacctcctaagagctctcatccttcttagaatgtaaaatctgatatatatctatttgcagaatcttattgcctccaagctgggagtccagaaaaatcgctgggatcacggccttggacacaagagagaaaaaaacctacgaacttgttccagagatggaggtcagtgtactaaccttttttgtatatcttctgggttctaggtccctctctttagtgaaaacaggaaattggctcaccataatcgatattgttgttggcattatactgcagatatttgtagagacagactaagttataagacagcctccccgagtggtgttcttcctcgacaggttttgttattgcacctcctctgtgttgataattgtttttgtttcttagtagaaaataatttggctcctttgtagaagaagaaaaaaactaaacggctttaacatatggactacgccgtttgtatcttgttgttacaaaccattaaacgttactgtttgatcaatatgttaattcagaactgtttggtttaaagcataagtattgaagtcgtcaaatgaacaacttgcaatcttttgctttgtatgagatacaaataaaatcgtggtccgtttataaaatagctttctccaaacaatttcaattcccttttaactaacacaacaaacgacccggcccgtcaaaagaagaccaacagacgatgaaataaaaggaaaaactcaattttctaaactatttttgggggtcgtaaataagtgaaaagcccgccgacgaaaaaagaagacgtgaaaagcccttgtcttatttgtcttttactatttttctgatttaaaataaagaaacaaacatttacagtatttgtttataacgggggctaagtagagaatcatgagaagattaatatccctaaaagttttgggggaaagaagaaagaaggaagacgatgatgatgctcagaatccgaagcagagatggactggagagagtcacagcggagggagctcatatcactgtttcccagctcaaaaccttgatcgcggatcagcttcagatccctctccataagcagaccttatccaccaatcgtgatctcctcctcgccaaaactcccgctgatctactcgccttcaccgacctcaccgacccaaacctccccctctcctctctcaacctcggccatggctctatgctctacctcgcctacgatggcgagcgctccattcctggagctcctcccgttactcctgccggatccttcgggaggaagatgaccgtcgatgacttgatcgcccgccagatgcgcgtcactcgtcaggagacgtctcactgcgactccgtctccttcgatcgcgatgccgccaacgctttccagcactacgtcaatgagtctctagcttttgccgtcaagcgcggcggctttatgtacggcaccgtcaccgaggaaggacaggtggaagttgatttcatttacgagccgccccagcaaggcacggaggctaatcttattctgatgagagatgctgatgaagagaagcgcgtggacgcaatcgccatgggcttggggatgaggagggtcggtttcatttttaaccagaccgtggtgcaggacaagactgaatacactctgtccaacgccgaggtgctacaggcggcggagcttcacgccgagagcgagctgaaggagtgggtcacggcggtggtgaagcttgaggtgaatgaggatggtggcgccgatgtccatttcgaggcgtttcaaatgagtgatatgtgcatcaggctgttcaaggaagagtggttcgagacggagattatgccggacgatgatccaaagctctctaagatgaagaaggaggtggttgttggtgtgaaggatcttaaggaggtagataacgatttcttcctcgttctcgtcaggatcttggatcaccaggttcgtgtttttctctctacccttcctttgcatcaatcatcattgttctttgtactaatgctctgcttgggcaaataaagtaattgaatctggagcttttaagtcttaggttaatgaagcttgtcagtgtttgctttccatgagataattgaaaattagcatttcgtcaatggtccctgtgttttaacattaggctgctgtgatcaggggcctctgtcatcaacattcccaatagagaaccggagcagtcgagcaacgatgcgggctctaaaaacacatctggaccgggcaaagagcttgccgttggtgaagaagatgtcagattttcatctgcttctctttgtggctcagtttctggacgtgtcatcggacgtccctgctttagccgagtgtgtgcgtctgcagtcgcctgtcccagagggctatgcgttgctcatcgaatcaatggccaacacttgttaatttttgtgtcattgttttttggttcttgatacagtatatcatgttcgttttatggtccagaaaatcttttttactagttgacaaatgaaaaatctctagtgtactcgtgatgtatttgattcaagtttgggggttaatttaagttatcaacaacttgtagaaacaaagttaattcacagagtaataaatcattctaataggtatgctcaggggcaaattggcaaaacataaaaataaaaagagagctactaaagttttcgagcgaaagcgaaaatgaaaattttataattcgagcgaaatgttaaaaagctgaaaattgggggaagaagagagaagagtttcatcgtcactggaatcaatagagtcaattggcgggagaggttagtctcgaaaagaagtggaagccctagggggaaactttctcgctcactcgctcgtctgcaaacaccatggaagacagtcctcaaggccttgtgagtctctctttgcttgtttgattttgtttgggaattttggattactcttaagtttttctgctgggcgtgtagaaaaggagtagagatccggatcaggatcaggatgacgacagcggcgaggctggcaaggccgacggaagcggcggagagaatcaggagcgcagcagcgaccagattgagctcgatgacgacgatttccaggaaacccgtcccaagcccaagcgtagtcgcacccatcctcctcaacagaatctcattggtacaattcatattcctaaatcgctccaagctttgtgccaattgattgtttcctaaattgattgattgtttttcttagagagcttcatcttgtttgtttgggtagatctttcagctttcatattttttttgctaacagaggttgtcaaaggcaacggggatcttatttctaaagccgtcaagatttgggttgaaagatatgaagactctcccagccttgctaccactgagctcttgtcaatgctctttcaggtactccttacttataagtctctctggataccaaggttgctagatccgggcatctcttgttgctgattcaaccacactattcccttctcaatagcttttgtgtcttgtaggcttgcggtgctaaatactccatcaaggatgatctgcttgatgagactgatgtcgatgatgttgtcgtttcccttgttaatcttgctagagccgtaattcgttgctctcttttcattctttttcaattacattttgtttcttaagaaaattttcacaactttcttttcattgtggttggcctatagggggaactcgaagattatcagagttccagaaagaaggaactcaagaacttcaaagaaaatcttgtttccttatggaataatctcattatcgagtgccaaaacggaccattgtttgatagagtcttgttcgacaagtgcatggactacattatcgcactgtcatggtttgtgttcaaacttatgtggttttatgcctcatagaattttcttttcatgtttgtcttttctttttctattgcagtactccacccagagtttaccgtcaaactgccacgctaatgggcctccaactagtcacatctttcatttctgttgcaaacacactcggttcacagcgagaaaccacccaaagacaattgaatgctgaaagcaagaagagagctgacggccctcgtgtggactccctcaacaaaaggttgtctgttactcatgaacagataactacactggaggacatgatgcgcaaaattttcactgggtaagattggataacgattatactgtcagctaagtattactcccactaaaaaagaaaacaaagagtagaaaggaaatgggtagtttacttatgcgagtgttactgactgaaatcattattacaatcttattttgaaggttgtttgtacaccgatatcgagatattgataacgatattcggatgtcatgcattcagtctctgggcatttggattttgtcttatccttctc

SEQ ID NO: 24256 - DNA, 862 bp, Arabidopsis thaliana landsberg
  unsure (1)..(862): unsure at all n locations
tagaacatttggtgaatctgttttgggatagtttttcagattaatcgatcatttatacagtgttcattaacagggttctctctcatcctctagagagagaaattttttctcttccccgtgggttttgttcggcgagctttctattctcttctcctttctctaatcattagattacagggagacagagtttagatctcatctgcacctttatggtgtaaataaattatggcatacttgtcggacttttgtctccgactaattccggttctctctcgtttgtaggcgagattagatctcctttccatctttgtcctatccatcgatttctctgttttcttctaagtttttccgatgtctccaattacttgtggagtaaaatcttcgtcactttcctttgctcaagacgcaagagcaaataaggatcttagactacatcaatttgggtgcagtcggtggtggagcttccatggagttggtgattccttgacaaattttgaaccagttttaattgatcannnnnnnnnnnnnnnnnnnnnnnnnnnnnnnnnnnnnnnnnnnnnnnnnnnnnnnnnnnnnnnnnnnnnnactttgctgatcggcggcggctaatcgaaatttttggcggtgtctgacgaatttcgacagtagtgcatgaagacctgacgcgtggtctttggaagaacacatcttctccacgtgtctatgctaaatcatatgtgcaaattgcaattatctttctttgtttagttatgatttaaattggaccgtttgttgtaatcctcttgggctttcacccttatgtactttgcccaatgggctctatgaatcaaaatgttggccgacaaaaaaaaaaaatcgagca

SEQ ID NO: 24257 - DNA, 640 bp, Arabidopsis thaliana landsberg
gtgtagttctgcacaaacccgaattctataaatgcatgtgagagctttgaaaaccaacatcttgagcttgtttgagcccataaagcgactttttgagcttacacacttgtaaggatccacattttcaacacccgaaggaagcttcatgtatatcttttcctctagatccccatgtaaaaacgcattatgaacatccatttgaaataattcccaatttcgagcagaagcaactttcaagagtgtacgaattgtcgtcatctttactatggagcaaaagttttgttataatatgttccttcctcttgtctattcccaagtgcaacaagacgagctttgaacctttctatggatccatcagagttgtacttaattcggaaaacccacttgcaacctatagcatgtttgccttccggtaacgacattatatcccacgtttggttcttttcaagagccccaacctctcctttaactgtattagtccatcgcggatcactcatcacttatttaaaggaagttggttatgaattagcgcttattgcagctaggaacatctgctgaggaggggagaaccgatcaattgatacataatcagtgagaggatagagacacttacttgaggagatttgaatggaggcagttg

SEQ ID NO: 24258 - DNA, 859 bp, Arabidopsis thaliana landsberg
gccaagtcctatgagcactaaccgatttgatgaggtaaaaggaagagcagtgagattagctccagcctttgtggattatgttgggaatggatgtccttaagtttgttgatttgctttctggattttccattagtcggattgatttgaatgtgcagtacttaagcaatccaggcaataaactcgagagatagatcataatttcagacaaaagttttgactcaataaaacgactatctaagttaaaatgacacaactgactcataagaaaaaaacagatgaagttagtcactaactcccccagacttagataacactgtccccatagttattaagttagaggaatcgaaagagaagtaagcaaaagttaaaagttagaaaacgtgagttgccacctgagagtggtgtcgatcgataccatgttggtgtcgattgacactctggtcgtttcgcttagctttgtgaattctgcgcattgttgtagagccttagttagtgttttcacatggattctccagttagactgttaaatcagtaaaacacacatcaatagttccaacaaagcataagaaaataagtacaacaagtttcaaaacaaataaccaatagtctgaaataaagcaaaaacaaagtcagaaaacaaagcaagataaggaggatggctagtcctcatgttctgagccggaggtggatgcggaagagcgacgacgacgacgagtgggagcacacaaccgcagcgagaaagtgtagctatggcgtcccgacgctcttgaaactgtcgacgacgtactgctgaaagacctgttgctccaatgggatgggtggaggagaaggcacatgatatggaagagcggatgaggaa

SEQ ID NO: 24259 - DNA, 874 bp, Arabidopsis thaliana landsberg
gttgatgagtacttatcttttcattttcttgtttgcgttgtttgtcaacatggctgccatgtatggggtttaccatggacctgcaggtctaaaatctattgcccagcgtgtccatggtctcgctggtatattttccttagggttgaacaagcttggggttgcagaagtccaagaacttcctttctttgacactgttaaaattaagtgttcggatgcacatgcaattgctgatgcagcttccaaaagtgaaattaatctgcgtgttgtggactcaaccactgtgagtctcctttgctttggcctttcaaggcttttactctcatagcatcatacagatttgaatatttggatatgattacttaattcagattactgttgctttcgatgaaacaaccaccttggatgatgtcgataaactttttgaagtttttgcttcgggcaagcccgtgagtttactttaagctaatatccattcatctcgcttgttcactcttttttttcgtgtttgcttaaaataatgttttctccaatgtacaaggttcaattcacggctgagtctcttgcaccggagtttaacaatgctattccctctagcctaacaagagagagcccttatctgacccatccaatcttcaacatgtatgttaccttctttaaatcttggttccttcattgccctgtggcttattgttaagtacctcacatttactttcccttttttcttacatttggttaggtaccacacggagcatgagttgcttaggtacatccacaagttacaaaataaagatctatcattgtgccacagcatgattccacttggatcttgtacgatgaaattgaatgccaccactgaaatgatgccagtcacatg

SEQ ID NO: 24260 - DNA, 4325 bp, Arabidopsis thaliana landsberg
atctcgctcagttatctaaaaccgtggaaaaaaccacataatgataaagagaatcgccattttataaaccaaaaagaagaatattctaataacgaacctcttccgcagtaatttcattgttcttcaatgcaataagccagaaatctggtactcctttctctgcagaaagacagtttcatatcatataaaaatcatgagttcaccatcatcatcataagatactaaaaataaacatgtttcagtaaaagaatcgataaacacaccttcagctgatttatcttctccttgttcggattttacttcttcagctgcaccttcaacttcgaccacaccattcacaatctcatatcgctgtgatgcagaaggcagaagaccatcaatatcagttacaatcacgaatgatgcagaaagaagtgaaaaccatgaagcactaatcattcacgtaagtagcaacagagagaagtcttattaaacctttatcaattgaggtgtcatcatgtgttcaaagatattctaataataggaaactaaagaccataagaatctcgcagaatcaaagaccgtattcaaaccttggtatacaaaggctgatataacttttgatacttggcttcaagagcagctctctcctcgcggaattttgtctctatttcatcatgtttgccctaaaaaacgaaaaggattctcagataatcatcaaaagaatgcacagcattctcatataatcaaaagcatacaaatatacatttcaacatcatactcacaagataccatatcaatctacaccaatctattgaacaaaagcttatataggaaacgttaatcacaacataagcatagagctcataaaaagtgaatggaagttttcccaaacctgaatctcccgcaaaacctcaacacgccttctaattttaggagtcagattctcgagcacatcagaatgttgtccagctagattctggagcttgttctgtgaatcaaacacataacagttacaaaaaaatctccacagaaactataaaatgacgaaacgcccaaattacatgttcctcttcaagtataatgcaaatcgatataagaagagatagagaaactcaccttaagagcgttgacaagaccagctcgatcctcatctttaagagctgcaaacaaacaaaaaagcttctaaaactttgactaagaagaagcaaagccgcagaaacaaaatcggagatatagatttaccagaagtgagatcgctgacattgaaactgtccttatcgttgctcattttctggaaatttagagatcaaaactgaaagatttgagaagaaaaaggattgattgagagagagtgtgaagaaggtttgaaaagaggtggagagattgaggaagaagaagaagacttgagggttttttctgggtggcgactaaacgcaaaacgtggcttcctcctttataaaatttaaacctaacaactgccattcttttttttttaattccctcgctggcatttttatttactttttttcattttttaaaatctaaaatatcccaatgcaaaatatgtgccgtttctgcaaaaagtgccaaacaccttgccgtttatcgccaaacaaaggaaacaagtcagttgtctaatgctgcattacacataataatcgacaacaaagtgaacttgaaaagctacgatgacagaaggctaatgaatcatgcactcttggcttctgtatcctcttccttaggctggttatcattggcattaactgttttattctctgcatccacatagcgaccagtcatcggatcaactgggcgtgtgtctcgtgctccacctttacgtcccatagccaccattggaggaggaggaagtaaaccggatctgaataggagacgttgaaccgggtctgatggctgagcaccaacagataaccagtacctgtacagaacaagagaatcaaacaaaatgtccattaatcaaactatatgcatcctctgttgaaactagtcattcagaacaaaagaaagacagaccaggttctaacttttaagtagtcttggcatgtgttcttctaatatccggacattataatcttaattttagatgatgataaagagcatgacaagattctaaagctacatgaccatacaattatgcaaaagaggttgtatatggtgaacaattaagaatgtaagtaagtgtgtatacgaatagataatcaacaggttcttcatcttacactaataagaaacaattccagaactcagagcagaagttccatagaaagactcaagactggcggagaagtttcatttgttatataacaaaacttgttgatgaatttccacaaatatttcagtttttcctttcataagttagtgattaaatgaggtagaaaattgcttcaactaatggttcaataccatgaagagaaagaaagtgatcaaaaccaaccatgggaaacatgtagattcattcgcctttcgataacaaaaaccattcaaagactgaactcagctcctttgtatcagatcgaaagatagttaactataacacaatgttgactatacaacaatgcattaagatttctagaggcggctcgaagctaactttagcaattagccaaaacactgtatgtgctggaataccttagtgagttagtgaagcattcagagacctatctctgagtaaattcaacctaaaacctacctgattttaccgaaaaaaacataagcaactagagaattagatgagaagaaacatacttaattcgatcgaacttgagacccatcctcttaccaccgtcctggcctgaacacatagaccaagagatcgtgtattttaatcgaaaactctacgaacaacaccaattggaatacattttgttttgtcaatcacctggcaaaggattgaagtaacctaagacctcaagatgcttcccgtctcttggagatctgctatcagcagccataaccctaaaaaatggccgatttttgcatccaaatctcgacaatctgatacgtacaaccatgtttctcctcccttttcaccggaaaaaaatcgaaatgatcagagctggccaagagagatagagagagtgagaaattccaatttcgaaaactctgaatccataaatcttttagggtttggatccttattacgacgccgtttgttgaaggattcattgggcctacaaaatcaggaagcccattaacatcaaagatgatacaagcccaataaagatttttaaatcgtccaccgccacaagacggcctttctccggcgaaagacaagccgaagttgagcatatcggtactggttgagattattctccggcggagacaatggaatcttccgtcgctccgtttcctcaccgacgcacgcatctgccgaatcgaaattatcgctctttgctttatcacttttgctcgagtttcgatcgggagcctcaaatttctcttgccacaccggcagttctccaggagctggtcttacgaacaggtcagtgttcgattcgaagtcaaaattcttaggaatgattaattcatcttctagtaatcaaaattcaaagttcatctgttgcttgaaattgcctgaaactatttctgatgctatttgtgttttcttacatagaaattgctcaagagtctccgggagaaacttgcgaaccgccggagaatttatcaattacggaatcaaaactcaatggagtgtctggtgattcaagtggtgagaaggtggaaacaatttcacaggaaaagagtttgatgcttggagatatttgtgatggcattgacttgcaagatgcatctgttgttagtagacacacagattttttcgatagctttgagcttatgattaatgaaactcaagattctgttccagaaagttgtgtgaatctctttgaggcattggatgtgaatgactatgacattgtccaaaatgtcctggagaagcctaatattgcaactcaagttcaagtagatccagttgaaagtgagaaaaaggcagaggaggttcctaaatctgttgaatctaatgaggttataagttctggagttttggaagcttgtaatggaacagttcaaagagagatggaattagagaaacctgttgataatagtccggttttggtagattctgtgtctcggatagttggaggtgatgatgtagaagaaggagagatatcaggggatgataatgatgatatgcttgtagaagatgatgaaacagtcgaaagacatgaggagtatcaggtctcacaagatggaactggtaatagccatctcactagtcataagagttttggtgttgaggtaatgaatgtagataatcaagccaagaa

SEQ ID NO: 24261 - DNA, 412 bp, Arabidopsis thaliana landsberg
atataagccaagtccaattccaactagtatgaggccttttgtttaggaacccaataacaaatccttgcgggcttgagcatataagcccaaagaagacaatatcatactaaataagagttggaatgagcttagagagcccattaaaaactacttctatattgctagttaaataaaagaaaacatcatctagtaattatgtatgcatcgtctatttttgtatgttttattgtattatgcaacatctatatgtgtatcctcgaactaggaataaaccgaatcctcaaaaatggtttatcgggcctaggtacaattatggggagaccccctatttctaagcgaaaggcctatcatcatgagaagaaagagatcaagctcggcctactagaaggattactttgaatatacgaaaaaa

SEQ ID NO: 24262 - DNA, 3725 bp, Arabidopsis thaliana landsberg
aggcctacacgtctcccgtgaagatatcgttgggaagatcaaagacgctgcatcttattggggattcttccaggtgatcaatcatggtgttcctttaaacgttcttcaagagattcaagatggagttcgtaggtttcatgaggaagctcctgaggttaagaaaacctacttcactcgtgacgccactaaaagatttgtctacaatagtaatttcgatctctatagttcttcttcatgtgttaactggagagactctttcgcttgttacatggctcctgatcctccaaaccctgaggatctccctgtggcttgcaggtaagtaacttacggtttttcattgagaaatcttatgaaccgttgagcgatcttatgaaatattggctcagggttgctatgttcgaatactcaaagcatatgatgagattaggtgatttgctctttgagcttctctcagaagctcttggtttgagatctgataagcttaaaagcatggattgcatgaagggtttgcttttgctctgccattattatcctccatgtccacaacctgatctaaccatcggcacaaataatcattcagacaactccttcctcaccattcttctccaggaccaaatcggtggtcttcaaatctttcatcaagactgttgggtcgatgtctctcctattccaggggctctagtcatcaacattggtgatttcttgcaggcaagtccagttgatgcattcttttaactaaaaaaacagattctttcccaattaatttgaaacattttgttttgcagctgataacgaacgataagttcttgagcgtggagcatagggtacgaccgaacaaagatagaccgcggatttcagttgcgtgcttctttagctcgagtctttctccaaattccacggtttatggaccgattaaagatcttttgtctgatgaaaaccctgctaagtacaaagatatcaccataccagagtacactgcaggatttgttgcgagcatctttgatgaaaagtcgtatttgactaattacatgatatgaagaaaatacttgtccgagtgcaagatatatatctgtgcgttttgcatatgttacgctactttttctttgttcccgctctagagttcctcaaccattgtaccaaaaagaaaaaatgttttctacttcatggttaaaacagcattctaggcttgtagctaacaagtcaaactataagttatctttttcaaactacaaaagcttagtttttgagccgtaagagtcagaagtagacaatgacattagtccaaaagctagccaaatcggctagcaagaatgttatcacataaaatacaaaatcacgcatggaaatattgtatttattttcatatttgtagcagtattttgttctttcggttatacaaacaaaaggccatagtcccaactcccaacaatacatgggcaaaaataaaaactgaaattttaagactggaaaatctaaaaacggctcaagcccaatacagaagaaccctagcccacgaaggagatggcattggttgcaaaaaatgattgctacctttgaagtttgaaacttattcttccttgcacaagtcgctttcgatgatacctcactcaagtcacagtcaacgaacaaaatatctacaaaatgggtcacacagatccaccactaacttcaaaaattcgtatcttcacgactacgcttctgtctttacttcctctctcaacgtacgtagacagaaaaaaaacaaaacatcatgacagaaaaatctgcagaactcgttcgtttgaacgaactcaaggcttttgtatcgacaaaagcaggtgtgaaaggacttgtcgataccaaaataaccgaagttcctcgaatcttccatatcccttcttcttcaactttatctaacaacaaaccttctgatatctctggcttaaacctcactgtcccaatcattgacctcggagatggtaacacatctgctgcaagaaacgtcctcgtttccaagattaaagaagcagctgagaattggggatttttccaagtaatcaatcatggtattcctttaactgttcttgaagatatcaaacaaggtgttcgaagatttcatgaggaagatccagaggtcaagaaacagtattttgctacagatttcaatacaagatttgcttacaacaccaacttcgatattcattattcttctcctatgaattggaaagactctttcacttgctacacttgtcctcaagatcctctaaagccagaggaaatcccactagcttgcaggtaaaaaagtttagcaattttgatttcgctttattagtgttttgatgattctgagtaaacgatgatattatcttagggatgttgtgattgaatactcgaagcatgtaatggaattaggaggtttactcttccaacttctctcagaagctttaggtttagactctgagattcttaagaacatggattgtctcaagggtttgcttatgctctgccattattatccaccttgtccacaacctgacctaactttgggcataagtaaacacaccgacaattccttcataacaattcttcttcaagatcaaatcggtggtcttcgagttcttcatcaagattcttgggttgatgtaactcctgttcctggagctcttgtcatcagtatcggtgatttcatgcaggcaagctcgattgatgcttccttttaactcaaaacagagtctttctttatcaatacacttgagtcattttgttttgcagctgatcacaaacgataagttcttaagtatggagcatagggtacgggcaaacagagatggaccgcggatttcagttgcttgcttcgttagctcgggagtgtttccaaattccactgtttatggaccgataaaagagcttctttctgatgaaaaccctgcaaagtacagagacatcactataccagaatacactgtaggatacttagcaagcatcttcgatggaaaatcgcatttgtctaagttccggatatgaagaaatgacttgtatggcttagttaaaaacagatatgtgtgttttgctgctctcttctcgctcgagaggacatcaactattttgttaataagaaagaattttttacagtgaagacattgaattactgaataacaagatccacacttgatttatttatttacttccacttgatgcctgaaacagcaacgtagataagaagaaagaagtgtgtagcagaatgggaaaaagacaaatgtttcttccttcaaacaacatgagcttcatttttaagtttatctatcaactcatccaccgaagaaaccataaccccagatttcctctttggaggctccgtgacttccaagatctctatgtcggatttaatgtctactttcagatcttgcaccgtcattttctttataggctttgattttgccttcattatgttagggagtgatgcatatcttggttggttcagcctcaaatcagttctgcattgtaacatcaagagctgttacaaacaaaacaagagttgttgcacctttctattaaagcttaaatgctagtttgcttaataatttgagtgatcacaaaaaaagttccacaaagaatgcagtgaacaaattgacatatgcaggttagttgatgcatatatataaacctcaactcgagagagatcatgacacaatcatctaagaatctagaacttacgttatcacagcgggtaagtgtacattaagggt

SEQ ID NO: 24263 - DNA, 4861 bp, Arabidopsis thaliana landsberg
  unsure (1)..(4861): unsure at all n locations
tgcaaaagcggcagttgtgtaacctcttcttatcagacttctcggcgagatccctgagttcgtgtctgagggtcctgttctgcaaatactcaagctttcgcacaacaatttcaccggaaagattccttcgaaactcggatcaaacgggaacttgatcgagatcgatttgtctaccaataaactcacaggtttgatccctgagtcactctgtttcggaagaagactaaagattctcattctcttcaacaacttcttgttcggtcctctccctgaagatcttggccaatgtgaaccnnnnnnnnnnnnnnnnnnnnnnnnnnnnnntctgacaagtaagttgccaaagggtttgatttatttgccgaatctttcgcttcttgagcttcaaaacaactttttgactggagaaatccccgaagaagaggcgggaaatgcgcagttttcgagccttactcagatcaatctgtccaacaacaggttatccggaccgattcctggttcaatcagaaacctcagaagccttcagattcttcttctcggtgcaaaccggttatcgggacagatccctggcgaaatcggaagtttgaagagtcttctcaagattgacatgagcagaaacaacttctcaggcaagtttcctcctgagtttggtgattgcatgtcactcacatatttagatttgagtcacaaccagatttccggtcagattccggttcagatatcgcagattcggattctaaactatctgaatgtttcttggaattcctttaaccaaagccttcccaacgaactcggatacatgaagagtttaacatcagcagatttctcacacaacaacttctccggttcagtaccaacttcagggcaattctcttacttcaacaacacgtcattccttggaaacccttttctctgtggattttcttcaaacccttgcaacggttcccaaaaccaatctcaatctcagctacttaaccagaacaacgcaagatcccgaggtgaaatctccgcaaaattcaagttgttcttcgggttaggcctactagggtttttcttggtgttcgtcgttttagctgtggtcaagaataggagaatgagaaagaacaacccgaatttatggaagcttatagggtttcagaagctcggtttcagaagcgaacacatattagaatgtgttaaagagaaccatgtgattgggaaaggcggagcagggattgtctacaaaggggtaatgccaaacggagaagaagttgcagtcaagaagctcttaaccataaccaaaggatcatctcatgacaacggtttagccgcagagattcagacattaggtagaatcagacacagaaacatagtgagattgctcgctttttgttcaaacaaagacgtgaatctccttgtttacgagtatatgcctaatggtagcctcggagaagtcttgcacgggaaagctggagtgtttttgaaatgggaaacacggttgcaaatagcgttggaagcggctaaggggttgtgttatcttcaccatgattgctcgccacttataatccaccgtgatgtgaagtcaaacaacatcttgttgggtcctgagtttgaagctcatgttgctgattttgggcttgctaagtttatgatgcaagacaatggagcttccgagtgcatgtcctcgatcgctggctcgtacggctacatcgctccaggtacatgactgattcctaatactactttcttgtatcacacgtaacattcaaacttaggatttcagtacttctagttaaaacgtatgattgatcttagcccattttatccgtttcttgaatgcagaatatgcatatacactgagaatagacgagaagagcgatgtgtacagcttcggaattgtgttattggagatgatcacaaaccagcctgtgattgaccaatcccgtgcaaagtctcacatatcacaatgggttgggtttgagcttaacggaggagatattacgaagatcatggatccgaacctgcacggggattacgagtctcgttctgtatggagagttcttgaactggcaatgtcgtgtgcgaatccttcttctgtgaaccgaccaaacatgtcccaagttgctaatgaactgaaagaatgtcttgtgtctgaaaaatcgaggatgggctgtcagagttctcttaaagtgagcatgagctttgacacagagttgtttccgagggcaagatagtattgctgcaacaatcatgataattggttgggctatttgtcatttttgttttgatcattgacatgtcaagatcatactctttgttagtgatgttttcatttttcttgtatatgtggtggattggatgcttataatcattgaccgtaaaagataatacctctctgtggttctggttagacatttgtaaaatagttggaagagtattaatttaaattgtgtatagtcagatgaacatggcatagtcattctcgctagatagggaacattgcttgtttggaaagtaagatggatattgtgtgaccaagaaactaaacaaatgtactaattcaccaaatgcgacatatgtattgtcccaaatcaaatactctagaagtaaagaaatagagtgggggttgtgatttcttattcacttatctcactcttaaaacaaaataattaggctaatcactttagctaaacttgcgagactttagtgaaatgaaagtgaggacaggtgattggataatgaatccaaattcgttctagataatgggccgcgaaaaaatcaattctggcccaaaactaagcttcctgttatttttgcatccttgtagcaaaatatactgaccgttgcgtttaaaacgccagcctcgttgatcgcgttctcaaaattcaaatcagtgctaatcgccgatgaagaggtctcaaagggccaaacccaatggcatatattcctcactcaatatgcgttcctaaagatttcgtttcacagttttgtgaatggttgcgattccaccacttcaatcgttgatagctggtgagaaaaggtctcaccgccgggaactgctgatggtgaagaaccgctctctttctcctcgacgggaggtttctccgtcctagaccaccggatattatcattctcattcgacgactcgccgaagccggctgagatggatgaaagacctagatttctctcggactcagtgccctgtggattatccaaacaggtttttgctttgacatagcatcatgaattcatatcttttggtgtgattgatagtttctttggcaagtaagatgtgcatattgtctgaattacaagaaactactattgcacaacaaagtgtgacattgtcctaaatcaacatctctaaacatggttgtgatttcttattaatcgacataattaggctaatatactctagctgaatttagagacttacaatttggtgagagcattcaaacaaacgaaaatgacagtcttgttggactcttcttatataattgattcatccattgacttgtcaaaagtctttcttttgtgaatgatttgggtttttggttatttatttgttgtttatctttagaccaagatttctctcagattcgcagccctatggattaatcaaacaggttttactgagacattgcgctaaaatttcttcgtgcttcatatcttttgatagtttctttggaagtgagattcatgctgattgtctgaccaagaaactactattgcaccaaatgtaacaacacttatctataaagtaactaaagaaaaagactgttgttatgatttcattaaaaaaaacgattacaggctaataacctgaagctaaacttgttggactcgtcttatattatcgattgtcctacaatgtgacaatttattgcttaacgtgcttcttggtctgctccttagtttcccagaataacttcatgacggtgatgttgggacattgttgtcctcttgaccctcatcttcttcccttggtgaagggttaggctgcactagatgacacatttactcaatttttcaccattgacttatcagaagtctttcttttgtgaatgatttgggttttgtatttactacgaaaaggatattcattgaaaaacacaaaaacaataaacaaaaggggacaatctttgtttggactttggactcgtcttatataattgataccaatatttattactaaacgtgcttcttggttcactcctttgttcaccaaaaaaattgggacattgtcttcttaaccttggtgaagctgcacactagaaaacacatttactcattttcaccatttatctgactaagtctttcttttggtgtatgattttggtttgcctatttatttgaattttatgttcaacagtatagccagccagtgttttcttgattttggtttgtgtatttaccgcgaaatgaatattcaaagaaaaacacaaaaacaataaacaaaaagggacaatctttgtttggactgatcttatataattgataccaatgtattgctgaacgtgcttcttggtttactccttagtttcccagaaaaaaatcatgacgttgatgttgggacattgttgtcctcttaaccctcatcttcttccgttggtgaagctgcactagaaaacacatttacccatttccaccattgacctgactaagtctttcttttagtgtgcaatttgggtttgctaatttatttactgtttatattcaacagcatagccaatggttttttgatttttccttgtgagttgagagaatatggagggttctgttgggcttttgttggtactgttaactttgaccatcattcatattgttcaagctcaagtccaactaggtatcagacatatgtcttttatgtacatattgcata

SEQ ID NO: 24264 - DNA, 1085 bp, Arabidopsis thaliana landsberg
  unsure (1)..(1085): unsure at all n locations
tgtcttacagatcgcagctcagaaggtgtgaggaccattctattgcagatcgtggtacaccaggtggttctcatgtacaaacaccagatcgggttatgctgagccatttcgtgatgatcgctataaccaaatacgaatggatcagcataacgcttatgggaacttgacgaggttggggaaaatagatttcccaaggtttgatggtagtcgtttgaaggaatggttattcaaggtggaggaattctttggtgtggatctgactccagaggatatgaaggtgaaaatggctgcgattcattttgatagtcatgcttccacatggcatcagtcttttatccagtctggtattggtttggaggttttgtatgattggagagggtatgttaaactgttgaaagaaaggttcgaagatgagtgtgatgatctgatggctgaattgaaacatttacatgaaacggatggtattgttgattatcactagaagtttgaactcattaagactagagtcaatctttctgaagagtacttggtgagtgtgtatttggcaggtttaagaacagacacccaaatgcatgttcgcatgtttcagccacaatccattaggcattgcttgttcttgggaaaaacatatgagagagcccatcctaagaagccaatagtgtcaaatcggtcgtctcgtcccactcaagctggtggttattctcagaactctaaggataaggagggaaagtttgatcaatcttcgtcgcggggtggtttcaagcctgtgagtcagcagcccaagaagatgtctcagcaagaaatgagcgagcgaagagctaaagggttatgttatttgtgtgatgagaagtacactccagagcattacttggttcacaggaaaacacannnnnnnnnnnnnnnnnnnnatgaagagtttgaggatgcttctgaggtcttgttggaagatgaagatcaggacctcagacacatgcctcagatctcagtaaatgcagtggctggtacncagattcaagacgaaatgggtcaaattttatagcaatacctagtatatgtaatactacccaattagtagtagacaaagt

SEQ ID NO: 24265 - DNA, 2616 bp, Arabidopsis thaliana landsberg
tattggcccagaagctaccgatcataattggctgtgaacgacaacatccttttcatgaatcctctcatatgcatagcatcataattgacagctaacgtccaacatctaatgtgcatgttttaaaaatttaaataccatatgcagaagaagcccaccgcagcttaccagctgtgcagccacagaagatacttttgaaagcacatatccctcggatgaattagcatgctgcatgacataaccaaggcagaagctgcagaaagatttcgccatattacttaattgtttttatttatataatccaaaacttcataataaaaacctatatatttcttatatagtcatgattatctcggaaaatgatgtgaccaggaaagcagcagtattctaaaactactatattgtgaagcatgaatgctctcagttgatttgcaaagccaatcaaaaattacaaacttaacaccaagggttgcttcctgatagagcagagggtgaccaactggaagcttaagcatatatcacccaaataacataaaagaagaaaaaatacctaatcaagccgcctttatcatcggtggcaagaaagctccattccctgatagctggttctcgaatagctgcagcagcttgaaacctagcatttgccacctgagaattttctggaagtagaaaacactttcagtcaaacagatgaaacttcccaagtccacttggccggttctggattcatcagaaagacttaccaagaatatatctacacgccttatacggctgtggggattggtgaagcgacaaaatggttgcctcagcagcaactggattactattaatctgtaggaaagaaagggaaatgtcaagtacacatgaggtaagcacaaacaaagaccatgacaagccttttataagcaaagagacttcgtacttcatataaactcagaaagacggtaatagtaaactagttcagtgagacatgtagtctctaacaccttagtcaacagagacgtggagataaacaaacaccataaaaaagaaaacttgataattttcaatactctacagtgacttcaatttcaagccaaacttattacaagaaaacataaaaaaaaacaatttcataaatgcaaccacacacacacatgttcctccagtatattaggaaaccaaaacgatcaaccaggaatagagcgaaccacttgtttatgcatatatgtatgaagaaagaagaagcaacaacctgaatatacatggcaatgatacatataaacctaaaaggggattttccaaaaagttgttttttgatcctctgttttttactctatgaaaacagaatcgtttataatgatgaaacattgccagcatacaaattcacaaaatttggtgtttttgacatacaaatgatatcaaaataacctaaaaactctattagaatcaattgtatgtgaaaaaaactgaactttgatcagattgatagaagaaacaaaaatgtaaataataacagcagaagctagcaacatgtatactatttcactttttttagagtttctaagccaatcagaatgctctatttcacacccactcgcacaaagtgagcgttgagcgcgtgagagcaattctgtgggtgtacccctttccaaatcatgcctttttcaatctacgcactagtctccaaaattctcatcgcgtgaaaatttgtttgttttcttctctaaaccagtataaaccaaaccgcaaatcaattctaatttcaataccaatgtataccgaacctaaaaatcaattttaatttcaaatgttactatcaaatgttttctaatctagtttagcaattaaattgagaagattataatatctatcataactaggtagttgaatactcatttgtggacgggattgtttcagacgttttggtgtgttgttttatatacaaacacatctctatcgtggtgatatcatatcgtatcatatggatttcgacctaaagcaatagaaaaaaaagattccaaaccctaaattagaatttactaatttagaaagaacttgacaaattaaaaaatataggggccaatcgaataacaagtagaaacgtcatgctagattcctaaacttttataaaattctttttattttattttttaagtcgtccttcaaagttttgtattgacttgactttctcagagtttcttcgacgacataagaacctcactccaactcgagagagagagagagagagagagagaaagatgaaggtcgtggctttagtgagtggaggcaaagatagctgttatgctatgatgaagtgtatccaatacggtcacgaggtacgtctcttacctcggattctgtctaattttcgaagttttgttagttgttcagagtttccctgaaattgcctctcaaaagttcaattttttaagctatacgaacttaaatctcacttggggtttctcgatttgtgtttgcacagatcgtggcattggctaatttgttgccggttgatgattccgtcgatgaattggacagctatatgtatcaaactgtaagattctgcttcttaaatgaatactcttgtctatatatgcttgagtatgagctaaaaccggatatttaatatgaacaagg

SEQ ID NO: 24266 - DNA, 5576 bp, Arabidopsis thaliana landsberg
ttgaaccatgtaagatatattaaataattgtttttttttctgttgtggtccagggattcagtagttgacgatcatattaagcatacaactgtatcacgtcacctttattttatacaggaatggagtacgtgtatggaattctattataatagcatatatcccctgtattagtatgatttatcatttgcttagattttatgatgaccataagaggattaattaatatgatctaactaggtatttgtatcagatcatcaagaatggtttcttgtaaatgcttttactacgccaaattggtagtgtatgaaacagaagaggagttgttaattaaggacttacgagggggtgtaacagaggaacttgaggggaggaaagaggtggaaaaggcgcttagggattagctcgaagttgcagtgtcccatgttgttcatgaagtctatgtagattatgtatccggcgaacgaaattattgacgccgtttttgttagcaacgtggtaagtagtggtatcgcgaagaggatgaagtatgctatgtgctccgcaaacggatgtatcaccgctgcatacatttgatcaaatcccattatatacagataaaagctactagttaggacgtgaacgatgtatattttacgtataataattataaaaagaaaaacggaaatataggcagcgtaaaaatcaaggtaagaaacaatagttacaagtgatgggctcagtgacgatagaggagtggtggtgggaatggtagcgggaataaagaaagtgatggtggagagctttgtggagccaataatagaggaactccaccggtccggtgtgaataaggcgctgccatcaacactccgtcagttctccaccagggaagttgtttggcctccggcaataggttgatgcctatatagatcagcgctccgttgaacaatatttggtcatccctgcgcatatatcaggatttcattagttacgttgattacatacactcacgaggcacgcaggtagttaaaaatttagaaaagcgcaccagttggtctccctgtcgacctgattgaagtcgattcccttgtcgacgatgcgtctctttcccgaggacgtatagtaacgggacagagagatccaaacctggttgtgcagaattctgaagagcaagaatgggaacacaagaaagtacccgagatccctcttctctggatcatctgtcacaaacctgtatgtgctatggacagcccatggtgctattacgatgtacttttgtattgtttcaatgtcaagaaaaacattatatcagtaacgtaacgggattcgatcataagcacgcgtttttttaaatttaaaggacaagaaaacagagtgcaccttgaaacttccgaggggtgtccaaggccaatcggtgaggactcctggttttgtggccattataccgtcgaatgtaatatgtttgtgtcgtcactgtgtctcttcaactcttgtgagccaaggtacattatatagcaaggtttatattaaactccttaattggtagatatgtggaatgacgtaaccacccctatcttcccaccagtccaattccttgtggtggggccagctaagaccaaacatgtactactaccattcgatgatctccacatggatcctcatttatgacactcagctaattaccccctcccaccttcatcgatgttctgatatcatatccatgccttgaggaaatgcaccggttgatggatggcttcatatatttatttctggatattattgaaaggtaagggtattttaccaatgaaagaatactaatgaaccaagttgggcatgtgttaggtattgatgcttggaatttactagccaatcaagatcatgcacgttgaagcgccagctagtgtctgttgctccgacataaatgaaagaaaagtgaaaatatctagatctaaggactaaccccttatacgagagctatgaataatacttgtacgtttcgtttttagtaactccatctcccaccgccacaatttatatacgtatacgcaccctaccaatccttaattaggtagcaagtggaccatgcggggtaaggaccatttaagtaaaaacctcgtccagtttttgcaactactttgatttgatgatgcacccaaatatattttgttttggttttttggatattttggtaaataggcacgcagatatatatcacttaggtaagatgtaatgatcatagcactgtttttgaagatttttattgagttttataaaatttaactaagcatatcatacgacgaatttttttgccctttctaacatatatgaagcacgtggcaccaagggtaacaagggtacttatatattgtcgatagaaaaacatagtaaacagcaaacaatgatggaagggaagtagatataatcaagaaaggggacatagatgtatgaatatgaaaaaagctcatagaggagatggtgggagaggttggaaatcatggcgaagagcagcttcccatatggcgtggagacggaggacgttgcaagtgttgccgcagtcatgctcctcccaaccctcaagtgcatgcactatacctcctattttccatgcactcatcaccctcctccccagccagttctatatatatataacaaccattcattcattatagatgaacacatctatcagcttatataatataaaagttacagatatatctataagaattcaaagatgtacctcacaggagtcgatgttttgggcagacttgggaacacgcatagctggagtggactggtagaaacagtccttgcggagtttgttgggcggaaagtgagaaaagggaacaaagagggttccttcttttgctttcatctgctcttcgttctctattccatcccccaccaaccacacctttggggagtaataactattgcttgtagacagtaccagattcttgtcaaccccagatttgatgagtttgctgtgttcctcctcgcgtaacacgaccacctatatatacacattactacattattttttgtttgatatgagaagctgagtatatatattccaattccctcatatattcacaaaccttgacgcccttttggcacagagcaaagacaacagccgaagccacctttgtgagatttcctctaaagacaatttccgtggcttcctttggaatattgttgataaccaccgtagctgccatgctgctcccgtccactagtcttatcttcaacttcggatacttttgcacgtacatttctccagacccgtttagttcctccctctcattaattaattgtgtgttgattagttacttttttcttttgccagcgtgtgtaattagttacagtacttatccaatagtgattcatatatatttagggggatttgaagtaaataaacttacattgttcatcaggccaagactcattactttcacacccttttcatctgcttcaaggatagcttcctctatgatagtgttgatggactcatggtggcgctgtgatttatactaccgccgcatgtttatgaggcaaaattattaataaactttagatgcaacttacaaaaggtatacccacaagaaaatgttcattgttcatttttaggttgttttaattttctttttgtataaaaggttatgtccttcctacgtagtacgtacaagttaagtgagaatcaatgttttttttgtgtgtgaaagtttggaaaatagtggtgtgaagtacaacataataagtaaacccgtttgtgtcaagagagcgagagagagggaaagtgcatatgcatgcgtgtaaaatgcttacgtgaaaggaaaacttgggaaggaggtgagagtgaacggtgaggtcacggagacggtttcgctcaaagacaaaggtgcgcaaagggatagctgaagtgagggcaaatgagcagaggagagtgaagggccacatgaagcatgtgaggtaccatgggggtcgagaccacaaggggcaagaggagagggacgggaaaccaaggcgcatttggtagatggagttgtgtgtggtgaggtgagtgaggtggatgacgtcgggtgattcttcctctatctccaacgacctctcgtatagtgagtcggtcaaattatcagtcgtcccgtagatgaagtcgtatattggcatgaacagagagtagttggtccggaactgcgtgtggtggagcgagtgaaaccttcaacatatttgatgccatgttataaatgcatgcatatattcaaatccaaataaatagtagtgtttttacaaacgacgtacgagggggtgtaacagaggaacttgaggggagggaagaggtggaagagacgcttagggaaaagctcgaagttgcaatgtcccatgttgttcatgaagtcaatgtaagtaatgtatcccatgatggaaacgatggagaggatcccacacagggacgccgttaccataggtatggcaaagagtagtgtgtaggcgatgtgctcggcgaaggggtgcaccacagctgccaagtttgattaaagatatgaatgaatgtatatagaatagaagcaaatggtggataaaggtacgtacacgtgatgggctcggtgacaatggaggagtggtggtgagaatggtagcgagagtagaggaaatggtggtggagagctctgtgaaaccagtagtagagaaactcgacgggaccagcgtgaagtagagccatgaggatggccccgtctagcctccatgggggaaggtgggaggcgcctgggagcttgatgtttgcgagatacatgaggagagtgttgaagatgacttggtcgtcccaagtgcgctctcggtccacttgcttaaactcaatgggcttgtccacgatcttgttcgttcccttagccgtcctctggcgagacacgctgatccatatctggctgtgaactattctccacagcatcaacacgactatcataagtctgctgaggtctttctcctcatccacagccgtcacgtacgagtgcatgctcgccatcaccaacggggccaccaagaggtacttgaagctaccaaggggactccatggccactccgtaagagctccgggcctcgacgccatccaaaggtattaaattttagctaagacgcgaagaagaggcaaagtgggctgggccatccaagttttgaagctagaatgcaacatgatatatataaagaaaatttcaccgtgaccacctctgtgagtttttttttcaggaaggggcaaagtgggctgggccaaccaagttttagccattcggcccaaaattgacgaatttgccctggaacgagaaactgacggagccggttcagtttcgtgaaccgttttctggttacggaaataattttaaatatttaaaattatttaaaaaaacgtaagtaaataattttaaaacttaaaataaatcaaaaactgtcttcgagaaacgtagaacagttccgacgaagagtcattacgaagacgcagaaaaattccgacgaaacttaaaccttatatacaattgaggctctattcgagttcgagtctttgattaagtggaggaaagagcgttacagttagtgttaaagtgtgtctt

SEQ ID NO: 24267 - DNA, 1408 bp, Arabidopsis thaliana landsberg
ttacctttatgttgaaaacaattcaatattctttgttattttttcgtcgattacaatgaagaaaacaaaggataatgatgaaaatgatgtacatcaacaacaagaaaatcggaaaaccaaaaaaagaacaagacgtttgttcgatgaaaccaacttaccttcgcataatcaaacacttgggttgaaaaatttagttcccgtcagttctgtttttggtagagtgcttagtgacattaccaatgtcgatcttaccaaaagaagtgaaactgctcatactcccgtgtccttaccctatacccggcaaataataatgggagttcctcacccattatgcctattaatttgttgaactcaactcttacaggtagtattctcatatatcatcatcattacttctttcgactttatattgaatcatatatgtttgcacttcaaaggagacagagtaatttataatacaccaaacacaagagaaaatatagtcaatcgatctaatagctcataagtttctaatccaacttttacaagagctgccgcaaaaactagaaaatcaggtcagtcagttatatactattcgatatacaacattatcatataaatttaattataaaaatagtattttatttatatgttatttttgatatttatattttttattgcaggaaatttatccaatacaaaaagtataccatcatcacttcgtaagaagaccaatgtacaaacaaccaacaattatgatattgttaacaaaatacctattagaagattgtctgatgttaaaagaatggccagaaaaagatcaaacccatcaggttataatttttgaatactatatacaatacatattagttaatattattatttttctttatttggttgttgttttctcagtaggatcaccgaacttcttaacttctaatcaaactaccttacaataaagtctaattggctaaggtatattaaaaaaaatcagacgaagttgcgcagtaccaacaagcaggcagttcaagatgcttctgatgctggagataatgatctttctaataaaggaaaaagttgtattatttctccatctttcaccggtggtccagcttatatgcagcataactacttagatgcaatgcgtacctgtaaacatttcggctttcccgcacctttttataaccttcacatgtactcctaagtggccagagataactagatattgtaaagagcgtagtcttaatgcagaagatacaccagatgttgtgtggcggagactcaagataaagcgtgtctctcggaggaaagatctagcagaagatcatcttgtaggcataactgagtctggaaattagttcaatcatctgctgcataagattagattctgtttatttgattcgctgtgtctataatgaagacagcggaa

SEQ ID NO: 24268 - DNA, 756 bp, Arabidopsis thaliana landsberg
  unsure (1)..(756): unsure at all n locations
ggctatatcatataaggtaaatgtgattaataaaattgcatgctttggtgtttactattcagctatgcacgtaacgaaatagagtgcaatttttaggtaaagtacacacactttgtacttttagtacatatatatatatatatatatatatatatatatatatatatatatatatcttcttacttcattatatatgaaatctagttgttagcaaatgatacatatatcctttttcttatttctattataaaatactataaattagagagagaagagggaggaccaaaagtagttgatagtttatactttatagttatacacactatatggatcttcaaaaattagaatgatatcatttactctcaaataattgatgggtttgtttttttatataaaatataattgatggttttgttgaactttctttgatggtagatctcattctttattagggctttaatatagttgtattaattaacatagttttagtaggatctgattatatgacaggaagtgtttagtaaataccccaaagatcaataaaacacatatggtctaaaacctagtagcatccatgaaatgttaaattctagaactagtagttgagttaacgacattacactcttccaaagttaatcgacattacgttatgtttatattttttctttctatattcagnactagacgaatccatcgaaattgactatatatataatatttttgaataatcaagaaattgaaatattggcgtaagca

SEQ ID NO: 24269 - DNA, 867 bp, Arabidopsis thaliana landsberg
atgaagagaagttaatctttcactcttctagaaaatagcctcagaattttcgtcaatatgctgaaattttgtcatcctacacatcgagatttcacattctgtcatacaacaagagaaatagagaaggtgtgtatacatgtaaggctgttatttaccctcttcttttttcttcagcgttcttccaatggagcaagttgttttgtatattagctctcttgtttgaatatcatcgtcttctccttttccctacatgttattttacaagaaggaacgtctcattaacagtagtctcattaggggattgttggcttacctagcttctcatatcgcatatagacctctccatgtcctcctcaaactctaaattagtgtcgaccaagcagaaacacatgttcattagtttcattaagaaaatgaaagaaaactttaattagacaccaaacacactactgatcttaagagtatgagaacactaagcgatatgagaaaggtacttgtagataactttaatttttgatatgtcactttttagtcttcagaaaggtacaaggagctgacgtgatccatatttgcagtgtcagaataccttgtaaggatgaagctatcaaaaattagcccatgacaaaattttggtctacaatacacagtgccagaaagatatacaagattgtaagattcagctataaaactaactcaacttaccgagaaccatgaagtttgtttcatcttcttctggaacaaaagcaagaatatggtcacaatcgttggatgattttctgttcatctgggacaataaatgacaaaatcatctgtctagataccaaaattaatgatagaaatcaactgaatgattcagaggaacaaaag

SEQ ID NO: 24270 - DNA, 875 bp, Arabidopsis thaliana landsberg
  unsure (1)..(875): unsure at all n locations
attatgtaactagcattcacaaaaaaaaattaatgcttagtaacagttcttgactgtcgtttagttactaattggtttcaatttttgactatagtttagtcacattaatgttacaaattaagactcgtacatctgtcacaaatgcgtcacatatttgtggctacacagtagtaataatattgtcataattgttatgattttaattgtcggtactatttcgtccctaatcgctacagtttttggttagcacttaatcctaacaatattgtgacgaaataattacgaatttgtgacaagaaaaatttgtcacaacaagtgtatcaaaaaagtaacaaatttgttacgatttttttctgtatcaaactaacgtcataatgattcactttttttgtagtaattataaatatttgaactttataaaaatttaaaataagtttaaatattataaatatttattaaaaaatattaatacgggacaatatacaacacttgaaattttagatatgacaatcaaaatacgattgtgaagtttgagtcgatattaaaacttttcttctaaaacctttattagtgatggaaatcgcaatcattgtttacaagagacatgagaaagaaagggcatgtatgatacaaagaccaaggttgtggacttataatannnnnnnnnnnnnnnnnnnnnnnacaattattttgtttacgatgggtgaaggtgaatcttgagttcatgaaactacttctccaatgttgtattgtccccatatagtgtttgagtcgaaaattgttgccgttcgcattgatgacgtggttaatgattttcttatcaccttctattatcacagagcggtatcctagtccccatgaagcttgtatagctc

SEQ ID NO: 24271 - DNA, 485 bp, Arabidopsis thaliana landsberg
ttctataatattatattatattagaaaatataatataaaaagttgaaaacacacaacaaatttgaatatattatttaaaaattaaggtccaaaatcacataacagttacgattttgttagccaaattactcattttaacttcccttcaatatcactttgttacgcaaacgactcgacaaccgttctctcttccaagcgatctgccattgaaggcaacttcacaaaacttcatcactttggccggcgtcggtctctctggcgtcggctattctcgtgtttgttattgcttttctctaatttctgcaaagttttcagtttcttgtggtaaataacgacaaaccgaagatctcaaatttatgttctttgccacatcgtgacggtggtacatcattactatcgattaatcattactatcgattgtgattcattcttcaatctggaaagcctatcaattcaacttgatttcacggataaatgcatccatt

SEQ ID NO: 24272 - DNA, 704 bp, Arabidopsis thaliana landsberg
acgccacctagatcagatcaaactcctcgccttgtggctcctcctgaaccacctgttcttcttctgtggggggtgtgagacagtaagagtgagctcacatacgttcatagctcaacaagtcgtggggaataatgtggcatgaactcaccaaaggtgggagttcatgtagtgtaaggctgatcaatgaaataaaggctgaggctgagcattgcttttataagttggtcaaaattttattagcaattactaagtgtaagtaaataccaaaccttaataataataaagaacagtaatagtaaaataatcccaaatgtgatgcaaatgtcaaattaaatttaagttccataattaatcatgtgagggtccgagccgctcatgaccgtgagcacggctagtatactagttttacactctgcagaggttgcgcatctttacccacaagtcatgttacccatctgcaaagagacggccaatcccatacactctaccgaggaggcgaggcagggtaacactacgaggcctttacaaagttccactagctttagaaatcccgctacagtttataggaagctccagtgcaggaatccctcgcctgaccgccatcgcagcaaaatcaacccaaggacctccctacactgaccactcccctactgcccttgccctttcgggtaaggaagacctccactagctttcctagttaatca

SEQ ID NO: 24273 - DNA, 1142 bp, Arabidopsis thaliana landsberg
ggttttaaaggtggtggtggtggaggaggaaggagagatttagaggtttagcataatcaaaaacgaatggtttttaaagttttgaacaaaaactacttaaaaacttgcggccggttatacgatttacgatatctgttttattgatcttttaatttattaatgtttgagaattgttttgttggaagcacgttaaagggagcaacgtgcaaaagtgtaagaaatattttttgttttctttggaagatgagaattgattttttttagtcaaaagcttaattaattttgtggataggtttctttgagtttacttgttacaaattagaaaaataaagacagtgaggtactaaattggtgggcagttaaagatttcaaactcttatcctccattaacgataactatagttttttcagtgtttagaaatgttcatttttgttctaaattagtgacagccatgtttagctcattttcagtttaagattggataatactattacagaaacacccagatatttcattttagttataatctcaattattattatacttgtaggttttaacaataaaaatatacatgacttcttaaaaaaaaaatgacctcaaagcgacgccgtctgtggggatcgaacccacggccacgtggttaaaagccacgcgctctaccactgagctaagacggcaattttgatagttgtcaaacatttattttaataaacttatctactaataaaaatattccacacgcataagtttgggccttgaaattataatatgagcccatattaaggtataggtttttgatccaacgaagacaaacatattcatgtatctgaataacattttatgacttgtcttattgtgcacattggcttagtattaaggcctggccgattcatgttagagaaatcattctctgtgctatgatctgtccaaaactccaaatttataggctaaaaggtgattctttaacttttgggccaacaaattctttaaccttgaaaaacctttttccatatatattttctttaaagaaagaaattcaagattctaactattgttctttcttgacgggaaaaaaaaaactgttgttcttcctttttaatgggattttgaatagatatagattcctaacattatgaagtta

SEQ ID NO: 24274 - DNA, 763 bp, Arabidopsis thaliana landsberg
  unsure (1)..(763): unsure at all n locations
atccaaacttccgctgtcctgatttatcgtcctcttctctccatataagagcaattccacggatgaaagaatctgaatggtctcttcctcatacccctccattggccgaaacatgtgaatattcaggctgcactgcttaaacatgtagtctacatcatcatagatgcggagtctctccatggtctcgggatgagggtatcaagttcctaaaaactcattgcacttcagcagcttgtagtacttgtttcgagttgcacacttttctgattccaaatcatcatcgcctcctttctctgtttggtcatcttcctctggtgaagccatttcttcctcgaagtcttcatctaccagctccaacctcctccccacgggcttctttcctcgagtgatatctgccttgttcctcgagaattcccttgtagaggacttactcgaccttcgggatcgagtatttccagatggagagctgaaggtctcttcttcttgcatcacttcctcctcttggctcgattcactatgatcgatcttgaaacttgcttgctctctcctgctcaaccccaagggtgtcaatccagtccactgtattgctagcactcaagatgtgaacaaaaacaactaagtcaagccagattataatgatggtgggtttctagtaacaatcctaggtcaggattcaaacaagtaaagatgagaacttaacagccctactcgatcattgggtcgagtagaaccaacaggtgacaaaattaagaactaanatgca

SEQ ID NO: 24275 - DNA, 1788 bp, Arabidopsis thaliana landsberg
caagttatataacattattgggacaaaataaaacttgaacacttgttaaatatggtgaagacatggggaaacagggacatctcctctcaaatttaataacacttagggaacatcatgaacaatcatagaatatacactgacgatgacttttatcaaatcaattcaaggagaggtaacgaggcggctagacaagaacaccgtgcatccgtccttgggcgacattgtggggatatgcacaatctcatcgcaaccatccgatcggaccctcttgaaatcaaacatcgaggagaacattgcaatgaagagcacgaggtggttcatcgcgtaacgctggcctacgcattggtgaggcccccatccaaaagctaggaagttgcgtttgaacacctggtcctcttgtcttgtctcgctaaaccggtcaggatcaaaccggtccggttcagtaaacccttggaacgaggagtcgaaaaccgaaggaaagacaattgtaccttttgggatagtgtacgtttccgtgagagggaagtctatagcagcgacgtgtgggaccatagttgcaggaggcctgtatctaatgacctcacgcgccacggagcgtgtatacttcatctctgcgagctgatcaacggtgatcaaggcgttggactcaggtgaccagatcttggctacttcttctcttactctgttcagcacctctggctctgaatcaagaagcgtcacggcccataggagtgatgacgtggacgcgtcttgagcggcaaagagaaaatcgaagagcaaaccaccgatctcttcgtctcccgagtgcggtggctgcggattctccgcgacgatcgcctgcatccagaaatcgattatgcatgctggttcttcacctgctgccatcctcgctttggattttcccgcgcaaatgccgagcgtctcccctagcctctttacagccctgcgagcctggccgaacgcaaagccagggaggtctatggggagagccatggatccgagattgaacaaattataatcagtacggaacctgttcttggcttccttgtcaaggtagggtccaacaaaaaccgtctgcgaagtttctaggttgagttcacggacaagctgtcgcagtgacactggacgagatccgccggaggtactcccctcccactgccgtagatgacggagaataactaattgctggagggcagagtaagtggacagtgccttgggagtgaagttaggtgctagctgacggcgaacggatttgtgatcctcgccgaacatgtatataaggttgtggtcaccgaagagcttcttaccaaagggatgtccgataaggtggaaggcatcgggacgaacgtttgagaagatttgatgggaaagctcagtgtctctgatatagacgatgaattttccgatgaggtagttggcggagaggcctgagatgttcgccgtggaggattgcttgtcccagaaggaagtggggtcacgaacgagtgcaacggcgtttccgatgattggagggacgaagaaagggccagggatgtttcgtttcttgaaaaggtaagagagttgctcgacgagaaggaaaagaagaaatgctgagattaagtaggtctcgataatgagcgtgaggatgagaaggaggaggaggaggaagaatttgttgttgtggaatcgccattattggttgttgtgattgagattgagctgttgataatggtggttccgccacacgtttagtgaccgcgggtggcggttgatacggtggaggcggttgagatgacaaagaaggaggta

SEQ ID NO: 24276 - DNA, 917 bp, Arabidopsis thaliana landsberg
ttcacccctaatctcaaaccaaatccttaatcatcaaacatgtcaagataaaacttgcaagtaagagcagagaatctcaaaggaacttacatgatagatggattttctagggaaatgagatcaaggagaaggaagaagtagaagaaaatgaatgtggaatgatataatcatcgttggttttgaagtcgggaacaaaaattatttatgtctgagattagaaacaaatgtatgagagaaaccaaacacatgttacctttttatcatgaaaaggttttttgttttgtttttgttgttgtgagttattaaaaaccaaaaaagaaagagttacttttgtcttctatataccccagaaacctccaagaaaccacttagttaacagagtttataaattgcttttagggctagattcattgagtcgctatttctttctttccccttctattgataaaattctgtgcttttagaaagtctattttaggagcatatataggataagctctctatcactctcggaagtgtgtctttatgcataccatgacgttttcagcatccacaatgatgtcattactctatgcgtcgactcttttggcattctttttttaataaacaaaaacatctaaagagaacttgatcagagttttttgtatcgacgttagaaaacaacatgatctttttctgcctcgtccttttaatttttttacatattttgtgtgacgttaatgagtttgtgccaaatctatcccttaattttgcaaatttctaaaaaatctattattaaatgtgttataaatttatgtgtgagactgtgaacgtaggatgactttacccattgaaattcacaatcttgactattaacttatctagcaagaaaagcgtttattccctgattcgtactaacttgttggtttgttgcctga

SEQ ID NO: 24277 - DNA, 560 bp, Arabidopsis thaliana landsberg
tacacgttaattatctgtctattttagatcttaacagattatattccgttgtgctatacataattaaatccacaataatagttaagtacaagtacattaaaaaaaatatatttatattggttaatataggaatccaatgtccatcaatttaacaacaagaatcagtgcataaaggagcactgattaataaattaacttgattctaacctttttttaaatggaaaaaatgattattatttttccacatgtaggtacatgcaaaaaggagcagaagcagtgcatacatcaaaccctaacgtactggtcatactctcagggcttaacttcgatgctgacctaagtttcttaaaagatcgtccagtgaatcttagcttcaagaaaaaacttgtcttggagcttcattggtattctttcactgacggtactggtcaatggaagtcacacaatgtcaacgacttttgcagccaaatgttctctaaggagcgtcgtaccggcggttttgttctcgaccaaggctttcctttgttcttgagcgagtttgggaccgatcaaagaggtgg

SEQ ID NO: 24278 - DNA, 4923 bp, Arabidopsis thaliana landsberg
  unsure (1)..(4923): unsure at all n locations
gataagtgttggatgagcaaccaaaaatatatcaagatccatttttagatttcatcgtaaagagaagtgtttttttgttttttgatgcaattttatctcttactatacattacctaattatggcgtcggcttcaactttgtgttgaaactgtaaacccaaacaaaaaaaaaaacaaaaaaatatgaggttagatgcgacttcgctttccgtaattatgannnnnnnnnnnnnnnnnnnnnnnnacatttttattataaaatacagaaatgacgaagaaattaatggtatttatcatatagtagatagtaaattagtgtgttctgtcgtaaaaaaatattaaataatgtgttccaaatgatcataaatcatgtacgacaaaaagaaagtcataaagcgtccgattaatttatggctaaatccaacggttagaaattaacttcaatttttttacgtgtgaacaacaagatcaatagattctcggtgagaagaaaataaaagaaaaatggggatatcgggttcaaagcgagttacgacgattctatctaactcgcccgagtttgactcggcttgtgactcagcatacgacgaatctctctctcttgcacagcatgctttcgccggagttcgtccttaccagctcgtctccgccgccgcccacatccaccggaatctttccgctcttcgtttccctctaatcaccagatggctctcttctcctccgagtcaatcccaagtcgactcagctctccgagtcaccgtctctcgagtcacggcggcggatgaggaggagatcctcgggcaagaggagttcaagaaatgggccgtcgaggttttcgcggaagccgttgtgggaaacgcgaggaagacaatagcgagtcggattccgttaggaatcgtcggaatcggtgggatcggcgccgtgactcggtcgggtcaaaacttgatcggagctgcgattggtgtgtacgcgataggggttgctacttccgtttttctaagcctcactgattagaagaaaagattacgttgttgttcttgatttgctgaaattaataaattttaacaatcttgtttaaacatcaaccctatatttgaacaatcataaacttcaaactcttacatgtggtttgattgctaaacataaacatatctgtttaatccaagataaaagacagaactagtggagcttaaaaaagatcacgtgaaaaacgtctttacctacaaagcaatataatccagatttgcccaatctagtagggactgttcgtgcctccgatatttgtagtttcctttttttttggctccgaatatttatttgatattaataagattttacaaaagaagctcaatcaatcatttcatatcactttaaaagcagcaatgtccggatacatctccataggtagcactaagcgaaggggaagcagtttgtttccgtcttcctcgttctgtttatcttcttcctcgtcgttcttggtaagtactgaatctatatacagttactgcattatttacgatattacccactcttacaacctcataacaatatgcagaggccccggagaagatagaagccaaagacgacaagttcatatgtgtggttgagtatggaggagacgtgggtccaacgttctgtaaccctaaattcttccccacgttgtgccgtcaaaactgccggagcttcaaaggtgccaaaggcggtaaatgcgtgaagcaacccaaacacaaacatatcaagtgcttctgcgactactgtaaagacgactagacttcacagtaaagtaccaaaccgctggtttcagcttcaatcgccaaacgcaaccgtcccctacggccctaagtgtttgtacttccatatgatgtgagtttatgtatgttcttgatgtaataatgtcgacttaatttgttatgttttcatgtgttagattatatcatcttggcaatcaaaagattgcaaaaaagttgggcctaatggtgaagaattgaaaaatactgacgtttttaatcaatgtgatgttcttcaatgaatgagtacaatgagataaatatcatacatagaatcttgtaattgtgtatggaagattacaatttgcacttgaaaaaacagagtttcactcttcctctgaatcgagacctggtatgaactctaagctcacgtcaaatatcaccgggctgtttggcgcaactctcggcctccctggagctgaaactagaccctttggaaacgccaacttatggtgtaacatttacagaatcaaaaatgcagagaaagttagaatctctgttacaaaaaacgattacttatgtataatcttgataagcacttacaggccctgggatgtagagtctacgtttgccaccagctttcatactcaagattccttcatcaagtcctttgatcacctgtttaaagtatcagaaactacttttgtggctaaagctaaatccttttttgatatccacaattacctggccagagccaacgcgaaatagatacggtagacctttctccagagaactgcaattgagtgaacatgaccatttgatagtagtagattcattcagctaatatgattccaggatcaaaaatcaatcagtaaagactatcaagttgttctgtttttgtatggattgagaaagatcacctgtcgaatatttgccctgatggaaccatagccacataattagcagcaacctacaacatttttacatctatcttgatacagtttccttaaatcatacaaaggtttgattcagtccttacctgaaaaccaaccggtggactcgggcctctaccaactttaatatccttatactgaagccctgactctgtagttaccattggaacctttaaccaaaaacaagagaaaatcctcatcaatgtcatgaatcaaaaaggttctatagaaagccaaaaggtgtgtgtgtgatctcaccatacattttcaagctctttctcgcattctgcttcacagagtcttggtttatcttctggaggtaaaccagctgcatacgccgcaagtgagctcattgataatcctcctgagacgccgagtaccaaaagcattgcttctctacggctagagagattactgattttacagctttgctctcttgtttctgaagctatgactcttgcagctatatatcttgatgaatttggattcttggtggttagaccatttctagatgctgaacctaaattcataaccgcaatgtcagattcacaaaaccaaacaatagctaattgaacatgagagtaatgaattctacaattctaattgcaactatgcaagacatgaatgaagccggtttaatctgaaccgtaaggattaagagaatcaacaaagatgagatttttatctctgagaaagtagattcagcagagaaaccctgaattccaagacgagaaatctaatctttgagaagaaatcagaaaacagaatcagtagcttaggttcttacctagtggtagaaggagagatggagaagaagctgccatctttttttggttacgatttggcaaatttgacagaagcaaacgaacttcagtggataacgaaatctctggttttgttttgtttgtgcgttcgcttcttgctgacttggctctcgtagtttcttaaatgtttcatttgttttttaatttcgttaaggaaatatgaacgttaaggagtggaccatccggaagttgaaacggcaagtaaatatctgtaattgcttacttctgtttgattgaaacgacaagtagttgctcgtgtggggtctacttgcacctgtcgttaaaacgtcgtcatttcacattcttcctccggcggtccaaatgtgcattggactattggtgattggcgttggcttttaaagcttacattatgaccagcgcgtatcgacggtaaacttgattttgcgctaagttttataagatttctctagaaacattattaaaaaaaaatcatcatctcctctaagtgttgtagaaaattctactagatagataattatgtagaataatctaggagtttgtagggtaaagtctagaagcctttgtaagctaactttggagggtacaaaaacctcatcacccccatcctttgtaaaaaggttgaacaaatgaatcaaaaagaaagttcaaataaaatagtgtttttcataaattctttaattctctatactctttcaagtattttctaagtgttcttccatagttttcatcagactgtacttagaggatttcttatcttggtttatataggatatctcgggtattacggtcttgggaagcactattgggtgttttctttttacacatcggccctttgttgtaaaatccgccgtgcctatgcataagaaatcgtttattgacactagctattacaacattattattattatttttggtaaaatgtgaagtattacaacattattatactaatatgatactttctcttatgtgatctctaagtttttcaaacactagttgtgtttcggatggatagcaaggaaactttaacaagtgaggttatctccaggtgcaactccaagcttgccacaatagtcttggaaatacttaatcctgttggcggctttggctgtagaatctcctccgctacactccctactattcactgcccnnnnnnnnnnnnnnnnnnnnnnnnnnnnnnnnnnnnnnnnnnnnnnngtccagaaccagaaagcggtcttgaaggcaagaacctggtcttgagcaactttctctggtgaagccaataagttctcgtccaaggctttgccacagagaccgtagttgtagttccaagagagctggattgcaccacggccatagtagccctttccttgtgcacatgggaactctggtttctctgtgtcgcagaactcaacggatgcggccttggctggtccatcaatttcctcaatgtaggaca

SEQ ID NO: 24279 - DNA, 631 bp, Arabidopsis thaliana landsberg
catggtactgatggaagctatctctaaattcttcctaggtgatagcgttagggttggcatgtgtggcgagataggactcccaccaagactgggctgctcctctcaacagacggggaccatacagaactttctccctatcatcacactgagtggtgtgcaactcccgctccactatgcgcagcagtcttcagcatccatggtgtcagaagagtgagcaaacactgggggatgacctctcatgaactcaacacgcttgttcctgggcatcggaggcatctgaggctgaggtggtggctgctgctgctgaatggcggccagagtctggcgatggcgtaaactgcctgagtctgcatgaggaacatctgctcgatggtcgttgggggcgagggtggcagctgctgttgctggggtgcctcatcctgcggggctgcatgctcctgctaagcacgccttcctcctctgcgcctgttttctacatctacagaatgcaaccacacatcagaactgatcttgcaacttgcagcataagaaaagagtatagaatccttaacaacactgaacagatgaacatcttcactgatctccacatagactacacagcttctcagataaagaggaaagtggagtaaag

SEQ ID NO: 24280 - DNA, 303 bp, Arabidopsis thaliana landsberg
ctttggttgttgttcttgtataaaggccctaaacgtttaattgttgcatctcttacacctccatcacctaccatttcgctttaccagcatttgacttcatttgattcgagttggataatcggaggtcttttgctcgctacacagtatttgcttgtttcagtctggtatattcttcaggtatgaaaaaggacattggatatgttggtgacacttatataactcttgctaaatgtggtagctctatatgatttcagactcgggtcatggagttataccctgaagaaataactgtagtattcttgt

SEQ ID NO: 24281 - DNA, 816 bp, Arabidopsis thaliana landsberg
tagatcatgaattctcactcattctacattaacagccttcgactcgtctattgattgcttagtcatgaggtactttcttttctatagttttggttatgattggtaacattgcataatatcataactgtataagttgcacaataaaatatgtagaatgaaaaaccgtagagtgaaattacttaaaatatatgatgattgatacatttaaagaacgacaaataaaattatatcagcaatatatatttatactaataagaaactgtttttaataaattttaagtaatatttgataataaaaatataaggttattaaaatctattaaagagttgcgcgaaaatgttttctatattattaataacataatttttgtgtaaataattacagttttttttttgtttacaattgttagtatttagtattgataaaataataacaatttcttatgcgaataagaaactatatacctactttttgcataatgaatgtttacttgtaaatttaggcaaaaatacaaattctgcgtttatgcgttttttaaggcaattatgcagattttcttgattaagaaattttttacatatcgcattagaaaacgccattatgtcattatgcgtgttaccaattagagcctttgtgataatgcctccattgaaaagttctgtatctatattagtagtattaacacttatcaatctgattaacactttcaattttgtcttcttttattggagtttaaacgttataagtaactctttttttgtataggattttgataatggatcatattggttaacaaaatgaaaagatgcaaggta

SEQ ID NO: 24282 - DNA, 620 bp, Arabidopsis thaliana landsberg
tcaaccaccctctttccccgagctacttcttctctttgcatggttgagcggcttgagcttcctccttgaatcaagtttgttctttgagcacggcgagcttggcgaatttggcgttcagtcatgccactcatgtcaaacgcctcaacttcttcatgatcgacagaggatcttcttgcccgagacgaactcttccttcttgaatccatgagtttcaaccaagcaattaaaaacaactctccaagaggtatcaaggggtaaggggatcagtttctttggtgatgaaatttggagcttgaaaccgattgagtgcttgaggatgagcttggaagtgatcgagtaactttggtgaagtatgatgaagtgagaacgaattcgtgaagagtgatagggagagtttggagtgaaacttcgaagctttgtgagagatggagaggttgcgaaaatgagatgatgaaagagagagtttcaaaagtgggtttgtcgaattcaatgggtggaggagattggtgtttggtttctttgggaagggatagaaaagttgattggaaatggtgaggggcatgggtaatcgctttgtccattgagtaaaagagtgttgggggaacaagtggggtcacgaa

SEQ ID NO: 24283 - DNA, 4046 bp, Arabidopsis thaliana landsberg
gggaaaggtagaaagagagggcaaaaccgttaatgcaacatattaaaaatgcctaaatctatattccatccaaaaagttccagttcttacaataccctatacaaaattgtggtttttctataactgaaccgaaaaaagtagggaattttagatctataaccaaagataattaataattaagaaactaacctaaaaaaaaaatctgttgtgatattttctctattttgtatattaagaccattttagccctctcacctctcgcctctcatctctttttgtctacataaacttaactaaaacaaaacaaaactataaaacataaatagcaaaatagggttgagaaaacctaagtatcaaattcaatcacaaacaccaatcgctgctttgattatgttttgatcccatccaatgatgcctaataaaattctaaacatgatttttttcagatttctaaaaactgaaaattgagatgatttcatttagtttaattatttttgtttgggttccttatatagtaccatccttagggtttagttttcttaaatcaataggtttttgtaattagaatggattgagataaaaaaaaacttaattttctggaaaaatgttttggattgaggagaagagaagaagcaacgaagaagatgttgaaggttaaaaggtcttttttttccacaaacaccatttatattaagttatcggaaagagactctccgctatagagagccattcaggaaccgatgcgcttacaggggagaaaaaagactattacgagcccgagcttttttagctcaactatctgctcgagtattagaaatacgaggaagaaatctaatattgaaagaagggaaaaaacaaactaaagatcggtaagaagccaattccgctacgaatgtcggccaatcgtcttggttgtttaggatagaaatcaggtctgagcaatctgaagcaaaagtactagaagtatcgccaatggagatcatgcattccattgcccataacaaggagtcaaattttgcatggagcggtgataagcttcgacgagcactcttgagcccgagatggaggattgagtcttgtcgaacaaggacccatccatgcccgctaagagagtcatcggcatgccatgaagcatcaagttgactttcagagagacgggtaagcgggctctgagagcttagaaaaaaaattaggcagatgtgtgcatcttcttttagagttgcatgtttccacaccgctgcctctttaagtgccaacgccaaagtttcgggggggggggggggaggttccctgaagttctcaaaaacaaaacggtttctacttttctagatataccaaagtatccatggaaagagtttcaatacctcctctccgatttcaaattctcgcccacgccaaaagagaaagacaaagttatagaagagggaatttctagggaaaatattccctgaggtaggaataggcgataatgcttgtctcgacggtggacaatgaaatagaagatgattgattgtttcttctgtttctccgcaacgagggcatcctttatccgtacccatatgacgatatgtaagtctttgacaggtagctagacaaccagagatacattgccacgcgaaatgcataagcttccgcgtagttttaagcttccatacttgtgcctgaagtgccgaaacacctggtccctgaaaaggggggccacaagtaggacgagacagatctctcgcagcccaatatcctgacttaacaggtatttatgtgggtgattgattgcttgcttggttgtgtgcgtttagggtgagttctagatatggtttgattacatagtcttacattcattgattgatttcgtgaatttaaatgagtattgaatattaattgatggtgtgaatggtagtattaagccgtataagttatcatttagatttttatatgtaaaggcttatatatgagaggttgtttgggtaaggatattgatgattctatgtgtttaattaaccatatgtctcctaatatcttgaagtattgggtcttgatacatggtgctcgtgtttggagtcagagttaaccataagcgtatcaagacagtgatatagctgtccttcattgtaggtcgtgtaatacaggatcaaatatgaaaagaactttaaatatcaatggattctaaagagcagattcatagctaagatttcttgttcttttgtatcaatggttcaaaagaacatagaattcaaagactttagaagagaagaacttctatgttttattcataaaccaaaagctgcatttacaaatccatagaagtaaccttaaataagacttaaaaccctagaaagcaacaccgtcaaagaacaaaaagtaaataagaaataacaccaaagcccaagtaaaaagcccaaacaaaaataagaaagatagaccaatatcaaacacgtaaagctcaagtgtgtttgataagagaagatgcgctacatcaggtctcttgggtgagaaaaaatttgacctcgaatgagcattgtcatcctgaaccactaaaggaatctcctcatgaaacaaaccagcaacatcgtggagagagttaggaaaagctaaagctgcatttgaagaagatgacatatccatggtcgtcggcggagccgacatcgtatccgtctcttgagtagcagccaaaaattgtgatcgagtacaatacttaggaggtttgtgttccccgacctttttggtagcctggtccgcaactttttcacagaaactcttgtttgaagtctcttggaaaggcaataatgggatgcgtttttcttcaaatgtgaagctgtaagtgttgacaaagccatcatgcattgtgcgtctatcatattgccatggactacccaaaaagatgacacgcatccatgggaatgacatcacaccaaagtatatccttgtaattttctccctatgaaaacaatacacggcatcacttagaaatacacttatctgttttcgattgtaaccacgccaagcgatatggagctggatgcggttcaatagacaaggcgaatttataaacagtctcttctgaaatggcattggtacaactaccaaaatcgataacgaggcgaaaaacttttccacgtattgtgcaagtcgagcaaagaatgtccgtacgcagccaaagctcttcgagactattgggcatcaagaagcttctacgtgtaatcaacatcatcccagtatcacctgaaactagctcaacctgcatatccttttcctcatcctctacagcctcatcgtatatcgggtcatctctgatgaagagccctcatctcccttgatgaggacaattagattttctatgccctttttctccacatccaaaacatttagcaagacggttactacgatgggcaattgtaccttcgcctgcgtcaattgctcgtggcgggataggttggtgaagagtaacctttgtttgcttattgtttcccaaatcaataaaagaacctccacattgacctgttgttgaagaattccatgaagaagaagcgttaacggcttgtttttcgattaagagagcttgctggtgagcttcagataccgaaatggggtttacttggagaaatgaattctgtaattgtagacgcaaaccaccgataaatctagaaaccaattgttcttatgtttcgtgtagtaagttacgtgacatcacgttggtgtcgaacatgatcccttgcaaacgagttatcttcaacgtcatcatcctcatcatcaacgtcttttgaaaagttgtcttttgttgttgcaagaacacggttgttgtcagcttgagcaagagttctcaccgccgcttccatggtggttcaaatcgtatcaccaaggctttgctgaaactctgtcatcatctctctgaacgccaaggtctgctcttcgaatgttgcttgaagactcttcttaggtggcatgattaggatcgttttgtctttgatacctactaatgcagggaacaaatatgaaaaggactttagatatcaatggattctaaagagcagattcgtagctaaaatttc

SEQ ID NO: 24284 - DNA, 1341 bp, Arabidopsis thaliana landsberg
tacccaggacgacaacatatatgactaatatctagttcttggaactacatgtttaacaacattagtactataattgggtgacacatgcatataaatatacaaatggttatatctaaggataataattggatctctaattttcaaactaatagcattatggaacgtatgttagtgaaaaaagtactctttaatttattattaacatcaatattagtcgccattttgtaaagtcatacgacacataattttttaaattaccatcgaacctaaaagacattctcgtagttcaacgaacgcaaacacacgtattcacttgttttcttctggccagctatatagtctacgcatcgcatacgcaaaccatatatagatccatcactctatatttacatatatcaatgtatacacagagagctatatatagagaatacacaatacattctattcttgtatactcttattacaaaaaaaaaaggagagagagagagagagataaccaatttctctccctgaaaatgtccaacaaggttcacgtagggaacattgagatggaggaaggtttgagcaagacgaagtggatggttctagaaccttctgagaagatcaagaagattccgaaaaggctttggagtgtcggaaaagaagatccgaggagagtgatacatgcccttaaagtaggtctttccttgacactcgtttctttgctatatctcatggagcctctcttcaaaggcattggaagcaatgctatttgggcagtcatgactgtcgtcgtcgtcctcgagttctctgccggtaagttataaacattaaacaatttatctccttatatatacatacatattacaatcaactatagtaatgtaatatgtgttttaactttttgtttaacttcttgattctttaggtgcaacgttgtgcaaagggcttaatagaggattagggacactaattgcgggatctttggcatttttcattgagtttgtagctaatgattccggcaaagtccttcgagctatcttcattggcactgctgtttttatcattggtatgcaatattttttccaaaaaatacattttacccgtttagtgcgtttctttttattcacattggagtctctaaccgtaaaatctctaacttttagagacaaactctatataacaataagactactaatctatgttctcattcttatggttacaggagcggctgctacttatataagatttataccatacataaagaagaattacgattacggtgttgtgatatttctcttgacgttcaatcttataacggtgtcaagctatcgagtagatagtgtgataaacatagcacac

SEQ ID NO: 24285 - DNA, 1039 bp, Arabidopsis thaliana landsberg
taataattttaattttttttagtaaaaaccattattatttgtttaaaaataaatttaagtgtcaaatttattttatgtgaaaacattgtcaaacttcgaacatcgcaaaaatttacggaccaattaaggacggtatgcttaggcgcggttagtttccgatgtttttaaatttttaaaagtaatagtgaaattaacattgttttagttaaaaattataaattattttcttaaagtttaagttttaatttttttagtgaaaatcataattatttttaatagtttaagtgtcaaatctatattatgtgaaaacattgccgaaattcaaacacaacaaaatttacggaccaattaaagactggatgtctaggcagcgtaaacgctgttagttttctgcattttcaaattttaagacttaaactaatttttgaaagtaatagttaaggtcgggatgtctaggcgtgattagtttctgacgttttaagattttaacacttaaacttattttaaaaaaaaatgagtttaagtgtcaaatctatattacgtgaaacattgcggaacttcggacaccacaagacttacagatcaattaaggacgggatgcgtaggtgtggttagtttccgaagtttttaaattttaacacttaaactaatttttaaaagtaatagtaaaattaacatggttttagttaaaaaattattaattattttcttaatgtttaggtttttttctaattaaaaatcattaatattttttaaaaatgagtaagtgtcaaatctatattacgtgaaaacattgccgaacttcgaacaccgcaagacttacggaccaattaaggacgggatgcttaagcgcagttagaatccgacgtttttaaaattttaacacttaaactcatttttaaaaagtaataatgaaattaatatgattctatactaagttttatctattgaaatattttagtgacagatttaacctatttaattatagttttccagcacaatttctagagaaaagaaaagtagacacagatgaataaag

SEQ ID NO: 24286 - DNA, 344 bp, Arabidopsis thaliana landsberg
aaaccgagcccaatcatgtgcatattatcaacttcaattattatgttctttcacctaaaagcttgaagctcatgtttggttacctttttcatgtgtcaagccgaagacaaactttgtgtgaaattcttaatctccatggtcatgtgagagagaatccacatgttctgttacgacttgtctcccatcctctgtgaaccatgactctagcttccatatgctatgttttgtctaagctgaatgctctatccacgacaactctagcttgcaatcttaagcatcagatcaccatcaccttagctcgattctatgtcaaagcgctacttcgtgtagattttctcgtgccg

SEQ ID NO: 24287 - DNA, 3132 bp, Arabidopsis thaliana landsberg
atcgttactttcctattagacaatggaggctaccgaacatacaccttcaaattcaacctttccatatcggagaatggatgttttcgtgaaagctttcactataacatctgagaaagtgaagcatattgattgatcaaaacaggttagtcatcagctttccccttatacagtatcacatttttaaaacatgtgaaaatgtttgttttattttaatagttattaactaataagacaaaaagtatatacacttttttgcacttttaggggttggatttgtgtccacgtaaaaatatccgtttttaattttaaatgtttctatattcatattctttaagtttttttttctttgttttgtaagaatttttgaatttgatatatcatatattctataaccatcgtttcataaatcttttcttgactaaatatccactgcaaaaaaaagtttcacgaaataaaaagataaatatattatttaagataaatctaaataattttttttttggcaaaaatagaatcgagaaataactaaaatttcaaagtcgccattgacactctagattaagttgaaatgaaatttactcatattttgtactattcattgatatcatcatatcaaaaatacaacatatgtactaaataacttctaactgaaaaattaaatgcactatacctaacttaactatcaggtagattgactcaatcatatatacaaacgaaccggtccacatccatctaagctgatccgcatctatttaagatggtatgtgtctatctaagctggtccacatatatttggattggtgtaagatgaacattatttttctgaaccacgataggctagcctgctagaattgtggacaaaacacgtatgatcggaccctcccctctaagtccatcatgataatgggccgacaatgggacttaagttttatatttttaaaagatggtgaaaataaaatagggtcaatgaaatatatgtatttgaagagcgacatatttaagaaagtatacatgtaaagttcatatttagctgacataaaacacgcaaaatacaaatgactattctaaccctactcgcctgacaaactgaactaagatatcgaatatctcgcattaaatgcggggacaaactctgcaatattccgccaacgttacctgctaaaacagagacacgtaatgatgagcaatgatattagtggggttgcgtgctccactattaattactcctctatcaacgttgcttcctcaacaaatttagaaacccataaccgtaaagaaaacagcattaacttctgcgacagagataacaagatcgaagtacttggagacagaggtaagcaattaatgttcatgaatccttgttctgcctaggtatagtgtaataaatgttgtcgttatcaacatagtactttatctccaatctaacttgtacgctaacgttaaagttatgactgattatcaacaggattcatggctctggtggttaggctggtaaggggagagtggaaacgagatgagtccggatgttatgagcacgtagccgagttggatgggttatgcttggcggtgaagctccgggagcgagacacgttggccaaggtgattgagactattaaggaaagactgaatctacggacggaagatgaggtggaactatcgtatcaatggccgcaatggatgatgggtccagattggcagcgtgcaaaccctatctatattgtcgatgacgaagacatgacgttgtttatggccattcgggccgatctagatgaggttcacttgaaggtcaaatccatacgcagggatagagggacaacgacagtgaattcatacagaagcgtcttagacataggaggtatgactccgcaagcgatatccgataagtattggaatagcagtgaaacaagagcagcgtgggattcggcagtaacaagaatgttatacggtaacggctcaaattatgttccagcgggagttaccgggcagaacaacaacggtgtcagtgctcccttcggcaggcgtgggggaataactatttgagaaaatacgggagaaacgggagtgggaagcgtcaacccgttaaacctaactcaagcccaaccaagtgcaacagcaaaagggaaggagcgtgtcttggacgatgagacccttaaagacttgcagtttgcgctatggaggaaaacaaaacaggatgaaatgttaagagagatggaggaaagggagattcgtctagctaggtcgatggggggaccactgaatagtactacggctaatgtccaggataacatggttatcgagcaatcaagctcccgacaggaggagtcaatacgcctaactcttggaagcgcagaaccagcacgtgttgatgtatcagtggtggcggtgtcttcgacagtggcgatgtcttcaaccgactcaacttttaagacagctacgaaaagtgtgagcttctctactgatgagctgatggaggaggatgatttatctagtaacaattgtcttgccaggataggtatgctattcagtaacagtgcgattatcagatattataaaaattgttgcataactttaacagacactaactggtaccagtcctctccgccttatgttcaggtcaagacgaggtggcacactactactcagacccagtcggaccgctctatatggcaccaataaatactccaagaatgagtagagttaacaacattgtaaggggggagatcattgcaactcaagaacaagttatggcattaaatacccaggttagccggaggatggaaaatatctatttcaaaagaaaaagcaataccaaccgtgttgtatgaaagggtcgtcccaccatatttcgacgatccaggagaagaaggtaaaacatgttaggatctaattcaagtttgcaaactagattttagtgaagctagtatgtgtttttatagaatacttatggatatattacagttatcaatcttgtagctgctaatatatatgacgatttaaatgtctacctgtaatcaataagttatctaacaaaatggtaaactgcaaattatttgcatccagatctaaatgatgccgactacgaaggaaacgatatattcattgacaaattgttcaagaataaagaagactgcg

SEQ ID NO: 24288 - DNA, 512 bp, Arabidopsis thaliana landsberg
tgtttttgattaaaacatgtacactaaatggagtgactcagctgagaatcaggatatggcacttgacttctttcttaaagatatcatccacaaccgtttacaacctcatgcgtagacacatgtggcagaacggcgtaagaggaaacataatcagggatcatcaaatgaggatggtgagagtaaagtgatggagtcaacgcctgtagatgatgttatagcagaagtatctcataagaagcaaagaacagggaaagctcatataaaggtcctgtttttaccatttccgatttttccatatacgtaggtctatattttgacagtgaattaactaacattattatatggttcattataggtcgttgaagaggagaagacaagcttgctggatatttggaatatgttggagaaaatgaatgtcacaattagtgacatggacaagaatgcgagcagcagattggatgggttggagaagaaagttacttgcttagaagcgagtgtaaaaacaaggtttg

SEQ ID NO: 24289 - DNA, 1060 bp, Arabidopsis thaliana landsberg
tagtcaaacattaaaccaggaatgttattatagtagcttcagtctgaaacattaacattcagatttttcccaatagaaaaagcaaaatgttcacagatttgcttctgttacataatttaacttctaatacctgcgtaacatatataaatatctctgattttctacaggaagatagataattacagaaaacgttatttaacagagtttttctccattcacttttatcctctgagcttttggacttgaaagataaagagtaaggtttaaaaagttttgacttatttgcttggcgggttgagccaggcccgtgcagtagtgcaacgcatgggcgactcgtgaaagcccagatagcaagctatcttagtgggctttctcccttaaaaaatagagttaatatcgtgtgggccgatggcccacatatcagatattaaactgataagaacagatactacacttgatcttagccaaaaggccgagaaaggtatgatttggacgatgggcggagcttcttatttatactacaatgcttatgaccacggctctctaacttgtcgatgtgggacgtttagaaaaatagactctttacgcatctataagcaaacgcgaacatatcaataagagacattagacatctggttcaatatatgtcatgggcttagccatctggttcttgtcggagattttgacaacgtcgtcatggtttgaaactatcttgcttctgcctctgtgtgctcttttgagatcaattgcagcactaggaaagaccataagaaattgtgagctggtgatacttgaagatcagtgatctgatctgtgcgcacagaggaaaactggaatttgatgagtgtgtgttaaaaaaaaaagctggatcctcctaaagaagaaaggtggaaattttcgaaattacttcaaaagtctgaaaagtggaagatgtttcagggatcaacgtttttataattatcgatctgcagttcaatgatgcttcgactgagaatcatatacaaggtattaaagacaagtctcgagtatgtttgctggtgaatggcctttgtgtacagca

SEQ ID NO: 24290 - DNA, 962 bp, Arabidopsis thaliana landsberg
tgaacgccgttttttcctcgtcttccttcgccaaactaatctgatgatatccggaatagcaatccaagaaacacagcacagaacatccagcggtggagtccaccacctgatctatccttgggagcccgaagatccttcggactgtgtttgttgagatcagtatagtcgacgcacatgcgccaatccactttattctttttgagtacaagaacagggttggctaaccactcggggtgtagcacttctctaatagatccagccgcgaccaagcgagctaactcggcgcgaatggcctctctcttgtcgggcgtgaaacgacgtagcttttgccgaatcggccttgcctggggatagaccttcagtttgtgctcggccagttctcttgggactcccggcatatccgcaggttgccatgcgaatacatctcggttatcttgcagaaactggacgagcgcgctttcctatttgtcgtccaggctggagctgatgatggcagtcttgcgttcatcagcgaaccccaggttgatccttttagtttcttcagttgaccgcatagaggtcgcggcctgagcttcgtttgccggtactgcaaggtcctcctcaggcttagagttcgcctgtgttgaagaaattgtcgacggcttggtggtgagggccgcttggatggccactcggaaacactctgcggtgccttggaagtcggcgcgcacagttatgattccttgtggtcctggcatcttcagtatcatgtacgtgtaatgaggaatggccatgaatttggccaatcctggcctcccgatgatggcattgtacccacagtcgaagttcgcacttcgaacctcaagactcggttctgtagtctctggagttcgaagtgacgggcatgtagatgtggccaacggtattcccttcagtcggacgatgcgaagaagggagtgtcgactcgtggactctttgaggtg

SEQ ID NO: 24291 - DNA, 649 bp, Arabidopsis thaliana landsberg
acttgggcttatagttaagatcctacaagttttgggcttctgggatataagacttttccacaaaatagtttttcgaagaccaaagtcactttttgttgtgtattcgcatacatacaaaagaaacgattataagattatcgagttttcctttttttaaaaaaaaaaaaatatttataatttaataattttactatttaggcacatacagaaataatacctgtccccaattcaacaaaaataactggaacaagatattttgtaaggactaacgacaatacaaagaaagaacacatgacaaacttcattttaaactgagaactgagccatgaacatggacaaagtgacgaggtcatggatttggcatcccacacatatatagctaaaacatatggaccaatgcgaaagatagagagtaggtaaagtaatctgaagaagcttattcctcgaattcatgcatgtgatctagaagatagtttgcagccaactcttcattcttgttgcacgcaaagaacacttccaacaccaatgctctctcaaatcccatcgcttcaagctgtatttatcaatgtgaaaccgagttcatcgattataaagagtgatacaaaacttcttttcagaggaagatcaagttctagagtaaaaaaaaaaa

SEQ ID NO: 24292 - DNA, 819 bp, Arabidopsis thaliana landsberg
  unsure (1)..(819): unsure at all n locations
caagtcctaacattatcctaattgtgtatctattgtagttgagatctgtaatggatcctgctgtacactacaagaaatgtgtgtgacggtcaaagctagctgaaaaatatttccaggcaagtttcagaacattaaactagattaaagacaagaacttttgtttcggcttctgtattaataccaacttttgttgtttcctttctgtgaaaaaaacagattggtacagtaattgaaccagctgaagagttctatggaagattgactaagaagaatagaaaagcaactcttgctgatgagttggtttcagatcccaaagtttctcagtacaggttagttattgccactgtgtattaagaagcaatgtataggaaatgcttagattctgtatcataaacataaacaagattgtgatacgtctctaaatctggacttgttaatgaagttggacctatgttaatcgtagaaattttcggccattgtcctggtgtgtataatgtttgtttcactttcnnnnnnnnnnnnnnnnnnnnnnnnnnnnnnnnnnnttatgttaggcgttagtataagtgtatggttatctattcaaataaagtttgtgttgagaattgagatgttgtaactaagatgatgtgtgcaaactttgctaagtgaatgtgtttgtgttggttatggttttccaggaagcgtaaagttaaggagattgaggagaagagtagagctgttacaaataagaagtggaagaaaaagggaaaccaaaccacgaacaatatagcaagaaggaactgatttacttttgttagaatatgattatagttttgg

SEQ ID NO: 24293 - DNA, 2229 bp, Arabidopsis thaliana landsberg
gtaccggtgaccaggaaggattcatggagctagataaaatatctgtttcaagtatcagagcaactcatgtcccgctatatgacgggagccaaacaatgaagctgcaactcttccttggggacagaccccttcagctccattgtcctcgtctgaaagtacggtttggaatcaatgggaaatttatggataaagctggaagacggaggttgaactttgtaattgatctgtatccaagtctctgcaacgtacttcaagaatgcgacagtgctgcacagacaatatctgttgattcaggcagtggttctgactggaaccctctagtcattccaatgaaaggatttctgaactgtcccactgcaaggatacagtatgttttcctatatatctcctttacttatttcatttgctttttttcctgattatttctttgtatgtgcagtatacccacagagttaaatggagatatagatcggtacgcagctgagatacaccagaaagagttctctggagctactgctactcagaaactcatttctagcaaccccaaggctgaagagattgagtctttgttgaatccgagaactgttcttgacgctttcttgtctctggagccatatgattatcagcagagagccggaatccgtctagttgctagaaagcttgttatacattagtggaccttactcaatagcaccacagagaattaaagaaatcagagtttagtggactgtagagatttatttatgtagtcatgaaagaaacacagaactgttgttcctgacagtagatatacagctgattatgttcttagtttcagataacttaaatccaaatttagattttcatatgcttcttgtctgtgacacaattgcatttgtattgtgtttttccgaggaaagacagaagctttagtggtggaagacatggagcgattatatataattatatatgtaaacacaggtgagagagcgagggaaaaacaagattcaagtaaatgatactggaaggagaagaaaggttaatacatctgagtacttactgagagaatgtgagtgaacatgataaaatacattatatgtttatcaacgaactaagctaaacccaatgagagcttttcaatgctctgtcaaaaagttgagccgcaagagccaacattgccttagagacaactcgatattcgatgtttttttggctgtagcagtatcatctttttcgtgtcagtcgatcaacatcttctgttgtttgataagatgcaagcaaatacgtataacacaacggttttcagttcttggtgtatcttcaagttcccaaagcatcatcctgaggagatgaatcccggttctcctcttcttcttcttcttcctcctcttcctcgtcatcatagtcagcagagtcaggctgtccatttaaatcaacattcacgccgttcatcttcctaacaaactgacccttaacgcggggtctcctctcagcaaggcgtttcctattcacatacctaatcttcttatcaaaacaacgttggttccttttacgtctgaatttcagcagagcttcctctcttctgtcaagtttatttaccctcacctcattagaaggcggatttcctgccggtgaccaagaatgatgaaccatagacatctgaccattctgtaaagacatctgactatgctgcaaagatgtgttcattgggtggtggtagtaaggatatcccgtcattccattcggatgatttggttggcaatgaggaatttgatgaccatattgaggcatcatggctgctgattgcatcataacttggttcatgaccccatgcatatagtaaggataggcatttggtgcagagaaacccgatccatcaacttgagacgaatctttacttctgttcatagcaacttggggaatattcatattgccctcttggtagttcctaccatgagattccattgatgtgggaagcgtgcgtgaccgctcaagggaatgtggatagctggcgccattctgcaaggtctctccttgagaatggtattgctcggtccctctacttctgcgtgcttgcttggtgttgtagatcccttcactagccaccacttgaaacttttccgccgcaccccgatgaagatgatgtgagccatttccattgacaagaggaggatcctgaccggtacttctaggacagtagattttggtgttgctctgcatgcttgacagccgtggatgatcccttcacta

SEQ ID NO: 24294 - DNA, 1047 bp, Arabidopsis thaliana landsberg
gaacgaggctacaaatgatcagacagtagaacaaaaggcccgtgaggcctccatctaagcttactgcccaatacgtcgtcgccgcgaaagctactgagaggaagatgagcgacgggaatgacacgatggcgtgagagagaacgtatgaggatctccggtaagcgttgtaagcagtttctctcatgaagatataacgttcctggagaaaaactggtaacgcatcggcgcatgtgtagaacattgacgacatcgcgaaggcgaagaaccctaaccgctcttgaactcctttaggcgaattatctaatcgccaaaacacggtggcgagaatgaatccggtgataacaacagaggcgattctgattccgaatagctctggttgtcttcgtgaattgagcattgatcgtttcgagagagttttgatttcgatccacattggattcgcgaatgcaggaacggctagggttgtggtgttggtggttgctccgccgttagcgacggattcaccgccggaaactagctttcctctgctgatactcgcggcgaatgcttcttttagtgttagatttgggtacggtgatgacggtggagtcaacggtggttgacgattgctctgtttcttcatctcttgccattttttgtggaattcgattaatcctctcgttcctccggcggatccttcaagctcacggatgagatctaacgcaaactccgttcgattctcgttctccggtatcggactcccgaattcggtgaaaaaacgtggaagactcgccggagatccactatacacggtgtggccacgtgacaagaagattaaccggtcaagcaaaccgagaacacgatgactaggttgatgaatcgacataattacgatactaccactctgagcaatcctcttcaatactttaaccaccatgaaagcactcgttgaatccaaaccagaggttggttcatcgaggaagagaagaatcggatcgtgaattatatcaattccgatggaaacacgtcttctttcaccaccggagattccacggtgaccttcgtatc

SEQ ID NO: 24295 - DNA, 715 bp, Arabidopsis thaliana landsberg
tgcgtgatgacgcaagcccccgagtgtatttcttgtaaaagctcctggccttcggcgatggatatgcatcgctggaggatgcctgaggggctgcggtggtagagctccttcccgtcccccagcaagacgaacgacttggcgcgccgcaatccagccgagcttcggctcggtcgaggggtagctctcctcggtggagatattgcaggtacggggtctaccagttttgattaggcgtgaccccgctccactcctcctcgacgcgtagtgcctcaccctcgggggccgagggtgcctcgggctgagccgagggtgcctcgggcgtgtcgtcggtcttgacggagggttgatgtaggtctcgagagaagacgtccgggggaaccgttgtccgtcccgaggctatcttagccagctcgtccgcagtctcgttgtatcgtcgtgtgatgtggttgagctcaagcccgtagaacttgtcttctaggcaccgaacctcatcgcagtaggcctccatcttcgggtcgtggaagtgtgagttcttcaggacttgatcgatgacaagctgcgagtcgccacgagcgtctgaggcaccgaactccgagctcgatggcgatgagcaatccgttaagcagagcctcgtacttggccatggtgtatgacgccgggaaatggagtcgcacgatgtagcagaggtgcttccagaggggtgcgatgaagagca

SEQ ID NO: 24296 - DNA, 2453 bp, Arabidopsis thaliana landsberg
atggcataactgataacaccatctggatatgattttgagtttactgaagagaacataacacaaaaggatttgcaatttgattcagaccacaatatgttgccattgcatcattttgacatgttataactaatataacacaatcaccctcttggtaaggatgaggataaagagttttagggaacttaattagaatccttgcgttttcttccgagtattgaagctctctggaatctaggaccacctgttctccacttcttgaaggctgtcatcgacaagtgagctgcttcatacacttcaaaaagaacacagaaacaaaaacagattgttcattttggtacaagcttgagatggttaaacactaaattcactaccattagagttcaaaacataaaggcttacagtttgtttcttcttttgttaaaagcgacaagtacttggaagctgttatgtgagctgctgtgtatacttttgtcagtgcctctttgtatctgatcttaaacgcagtcgatagcaagattcccagtgttctatctgtgaccctgtttagaccaaaatcagtatgattaccaccacagaaaatagctttactttaatccagacactgtaaaaattagacaacttgcttgatatattcatgctcaattcacgttgaaatctttctacaacagctatctttcccaaggattagaaattgacaccagaaaaaccgacttttgttcttgaagccaagagataagacaacatcaaaatgaaggggaagtgagtggacagagtcttaaaaggaggaactcacagtggctctatcttgcatccaaattcataaaagtatggacatcgcgatctaagatcgacgtatgcagcatcagcctgaacttcaagcctcgtcctgcacaaaacaaacaaagccatgaaaagactgctacagggtaaaagaagcaactgcttaaaggccatctgaccatagatgcagaagaaaaagaaagaaagagaatcaaattgacaatgccaacattacagttaagctacagaatgcttacttttggtcaaaacagggaggaaggtttatggtaacagcttgcctcaaatgcaactcatgagcaagccagaagggaagttcaactttagagccttgttcagcctgcaccagaaaatctcacaaaaatcatatcagaaaggaaaatatgatatatccattacaaacttttgcactaggaaggagaatactgacacaatttgtttctgcacttggatcaatagtcactccgtttgctgttttatggaataaaaccggtacaaactgcaacaaggtaacaatagagatcagatttcttagttgataaagagagtctaaagcaaagctattggagaataaaggtgacctcttcctctataagtatgtcatcaatgtcaaagtacttcgccatcccctaaggctgattccacaccaccttaaccttgagattaaattcgcgggtctgcggggagttaaaaacaaaccaaaagacactcaaaaatcaacctcttaatagattgacattgacattgtcagactcaaatctgagatttcagatttacaaaaacaattcaacatctagagagtttagaacagtaacagtgaagtccaaatgcataaaacctctctcttgtagttaacacaaatggctgttaaatctactcattcagtaagtaaatttatgtaatcaaacacaatttgaatttttttttatcgtcaacctctaaagacccatactttccctcctctctgcccttacctccttccttaccctatgaaaattcaaattgtgttcaacattttatagaaaactccctaatgggcaaattgcttgacacagccaatactctatccacaaaatcgatgagggtttgtccacaaccacccacttctagatcatcatcaactaaatgaagattcgatgtcaaggcaaacagattacgccatcgttttgacaggacagatgttaaagcagactcttttgtcggaaggaaagatagaatgtggcagattatctcatctgatagaaatggtgtgagagtctgaagaaatatagaaaatttgaagagaagaaacacaaattaccagcttttagacgatacgacagaggaatagattcacctttcgaagaaaataaattttcttaactttaagattccaaatttgcagaaaattttctctctcgatgctactctgcaaaacctatgtgtagatgaagaagaacagagagggtacacgtgggactcttctttttttaactgggcccattttattcacagtacaaggcccattaaaacattgcctaatacactgttacagttttcttttatctatgctctcaacacttttatgagtttatccatgcagccatgctatatggaaaacatttgttatttcgctaaaactcttctcaacgagtccctttaataacccataacat

SEQ ID NO: 24297 - DNA, 917 bp, Arabidopsis thaliana landsberg
tcgcatctctgaactagctcggctgcatcattctttgccgtcgcgcacatagaatcctgacctgaaaaccttcccgactaatgttttggatgctgcatgtaccccgcactgccctgcatggacttcctccagaagttgtttcccggtggacggacgaacgcacttcatgaggacgcctgacgcgcccctccggtataatacctccccaatgagtgtatagtgggctgattgtctggcaatgcgctcggccgagttcttgtcttctggctcttcttcattctttatatacttgataatcggttgcctccagtcgccagggtctgactcgggttggcctatgatgttgcactcttctatttgatccgtcgagatgctcggctgaaggatttcttgcacgaagatcccgggcgggacttgagtcgaccggatccgagcttggacagtacatcagccgccgcgttccgatctctttctatatgatgaaactccagaccttcgaacttatcttctagctttcggacggcggcgcagtatcttcccattgaatcacttgaacaatcccattccttgtttatttgactgatgactactagagaatctccgtacaccatcagtctcttgacacccagtgatatggcgatgtttaatccgtgtatcaaagcttcatactcggcagcattgttagaggccgggaatagcaactggagagcatacttgaggtgctcgcctccaggtgcagtgaaaagaattcctgctcctgctccctgcaacttcagcgagccatcaaaatacattcgccatacttctgcggtttctggattatccggcacttgctgttctgtcactctgatacgaaatcgaccagtgcttgagttttgatgggagtgcgaggtcggaactcgatatcatgagcccca

SEQ ID NO: 24298 - DNA, 6248 bp, Arabidopsis thaliana landsberg
ttttttgaccaagcggtgtttgaggtcctcaatttcagcatggatttggttaatctggagacgattactatcacctccaaatttgaatgcgttttgaatcaattccctgtgctcgccaaatcgtttgtcgatgcaaaagcactgctcgtgaactgcaagatcccaacccttgtctacgtgataattatcatcttgaccactcatcggacatttgagaaatgtcttcttttgatcgccaataagacgctctacaagctcaagctgtttaccacaaaaacagatttgaggaacaccaaaatcaccatcgtacttggaaggatcatcggatcgttcctctgatgaagaaggtgacgaataactaagcggcattatttgctacatagccaaacacatgaaaatcaaaaggggaaaaatcaaaaccctaatttattttctatcaaacccgaaacttaccaatgaacttggacaaggcggctgatgcggaagattcggtgtcggcggaggttcgtcgtgtggttcgtcggtggaggttcgttgtgttgttcgtcagccgaggtcgtcgtcagagaagagagaaggagagaagaaaacttttcgagagaagaaaggagagagagagagagagaaataaagagagagagagagagaagtttgtacttaatgagatgagaaaaagttttttgaattgaaattgaaatacatagtgtgaacacatagtgtgaacgcatagtgtgaacacacaatagtttttatggtaattaaagtggaatgcgggcccagacaaaatactgcgcattagccatagttgtgccataagttattcagttgtcccgtactcaatttatttgtactttgtggaagttttagtatttagagttggatttcattaagggaattaacttttagttggacagatgatataatatgtttaataataagatatcatgatttagttatataagtttccaaatatatgcgttttgccatgtttatgtcaagatggtccaacatgatacaatgcataccatataatgtaagaagtgttttcagaattggtaagtataatatgttcaattgttttttagattgtatgataattagtataagtgattaataaatgttccagaataatgtatagaaagattttccaagtatgaaactttttctttataattatgagaaaaattaaaaaattgcctcatttttaataatatcatattttagtagataaaataaataaactgtatttgtctcataaatagtaaaaatatattaaaaatacagcttcttaaaaatttccatttaatatattagaaataattatagttttaactaaaagtagagagaggtgtatttttcatacaaaaactataaactggatagttttcatacaaaaacccatatttttgatataataaaaatatttaaattaaattaaattgaagcaaatttaagtaaaaaaacaatactaaaattatatttatttcttatatatataggaggggttttattgtaagagataaacatgaaagaactagtacatacggtacaagtacaaggtacatacataataacacttaacaaaattccaaaatacttaaaaatgaagcaatagttcagacgacacaagtacacggtacagacataacaacacaatacttaaaaaaattctaaagtacttaaaaatgaagacataatacatgaagcaatagtacatacagcacaagtacacggtacaaacattcaactcctcataattaacaccaactgaacttcttccctctacccttgaaatttgtttcaccctctcagattctttatttactacctccacgttcaaagctggtctaattcccttagcattcactaccattagataacctaaaaaatcatcatcatctacaatagatgtctctctctgagatgtacatagaatataactcaatttcaccttccttgaggtttcatctatttcaatcttcttgcatatcttttctactaacatagagtatgttacctttgacgtcctcaacaatacaccgcttaaagaattgtttgaaatccactcatgctcttctaaataatacccattttcaaattgtatgaatgtgtgcttgttcttcatcatctcctgtaattacaaataaattataaaaacacaattacgtaatcatttagatttagacataattatacctatattataactcactataccatttgtaccacctgtcctattgtatttcaataaaacatttgtaccgcttatactatgatatctcagttttaccatttgtcccagttcgtcaattctgggtttcacaaatcgtaaatttcgattgaatactcactaaactctctgatttaaaacgataaaacagcccagaatgaacaatacaacaattttatgttatgaacaactaactccaacaaaaaattcacattaatctacaaatcaaaacgagatcggatttacttttgccgttgaagaggaagctcactttgggagcagattatcggcttggaagctacggcgatatcggaagctaactccccggtgaaattagagctcaaatcgccggcgaaatcggagctcaagtcgccggcggcgaagtcggaaaaaatcacgtctgaagttgtcggagagaatcgcgggagcaacgaccgtttttctttttttttttactaaatgatttactctttattttgaattctccctcagttattcattaaggagagatatgtaattacacatggtcgagtggtactcagaataaatggatggtactcagaatagatttttcaaaatgatggtagaatagaacgtggctcggaaaaaaagggaagaatttctattctgccatgattcggaaaaaaaaattctattctgccatccaaataaatcaatttctttttgatttatttttaagtagagaaatagagggattttacgaaataaccttgttactttaggaaaactacatgacccaaccacatgtagacggatagctccactgtaactgggttttcccccaaatcgtcagtttttaatctaagtaatttttttcaaaaatcaaaattatcgctttcttctccgattaacctaaacggcgatttgttccggcgattctcgaaaattttcgtcgctttctttctccgaccagttcaccgtcaccggtttcatctctgcttcttcaccaaacgattttttgaatttttttaacctaagtaacattttacaaaatcaaaattgtcgacatccactttgcaattccgtttagccgccgttgcaattccgccgtgaccggtgctgttccaaaccgtcgtcgttccaaaccaccggcgttccaaattgtaagtgtagattggaacggtttttgatttttgagtggttttcgttgtgttgatttgaacggtttccttgattgttgagtggttttgcaaggtaatcatgggtcgtgtaaggttagtcactcctagttcgagtgaaagtgaagacgagagggtcacgatcatccgtgaagcggatatgaaccgtgaagaagttgcagccgaagaaaacaaatttgaagacgaaaactgtgaacaagagcctccgaaaaaccttaacgaaccggaagaagaaaagatttctgaggtatatacaaatttatgaaacttttgtgtgaatattgatgtagtgtttaggtacaactagaaaacaatgagtacaagttaatagtataggtctgtgtaattggtgcatggatatacgtgattaatcatacattgggttgcattagaaaattgaattctgaaaaaagttgataatgttgttctgagataactagtacaagtagtacagcgaaatattaattgtatggttgtgtatgaattttcagaaagttgatgatgaggaaccaatgcagtctcaggggatggaagaaaaccctgaagaagaggaaaaagaaggggaagaagaagaagaatctgaggtaaatggttatttatgtaaattgtgtttgaatattgaaagtagtgtatagggacaactagaaaacaatgagtacaacttaatagtattggtttgtttgattggtggatgtatggatttatacgtgatcaatcatacattgatttgcattagaaaattggattctgagaaaattttataatgttggtctgagataacgagaaatattaattttatggttgtgtatgaattttcaggaaattgatgatgatgaaccaatgccatctcacgggatggaagaaaaccctcaggaagaggaaaaagaaagggaagaagaaaaccctgaggtaacattaatttctgaatattttgtttgaatatccattgaaagtagtgtatatggacaactagaaaacacttaggacaacttaatagtatagtttcaacttatgtgattggtgcatggatttatacgttaacgtgatcatacattggtttgtttgattggtgcattaatttaattgtatgattggtgcatcaatttaatacgtatagtttcaattctgagaaaagttgataatgttgttatgagataactagtacaagtagtacaacaaaatattaattgtatgtttgtgtatgaaatttcaagaacttgatgatgaagaacaacctatgcagccagagaggatgttctttagtccaagcgaatacgtgaagacgtgtaagatagggacgagatgcactgtgcaacagacagtgaagtatttggaggagtttaaagaagatttgccatggttcaaggcgcatccacagtttaggcatgtattccacatgcctgaggagaaaaaccacatgacccaaggcttgtggatgcttttgcttcgtacagcacagacagagatggatagggagtgctggtttgtggttaatggagtgcctattaggtactccattaaaaagcatgtgttgttatgtggtttcgattgtcatgattacccggaggagttgcagccgagtatgaagatcgtggatgcagatttgaagtttgccaaaaagatctttaagaaggtatctgagattaagatcgttgatgttgagaaaaagttggatgaaatgaagaaatgtggagaaaagaagaagacggataggaagaagttggttatcttgctttttttgtgcaaggtgatcgaggccaagtcaaaggttgatggaaacattgacaaattctttcttttattgttgatgatgtgcgtgcatgtgagacaggcccatggggtcgtttcacatttgatggatgtatggaaggtattaagtcggtaatgaaatccatgaaagggaaagcaaaactgcagacttgtttctccggatttattcttccattagaggtaacaatttagagtattatatatagtgagatgcattagtagacttaaaaataatactaatgtgacttttactttgaatgtgtagattttgccttttgaggctattccacatttgggacaaaagtttagagaccctgtaaggttcgagaatgagtgtccgagaatgtgtaaggccaaattctctagtagtgtcatgaaagggttctcgttggaagagataaacgaggagcttgaaagtgtaaaggtaagagttgtcccagttatctctagcgttgtcctagttatttctagagttagcccagttatctatgagctagaatatgattattttttatgtttgaatttgtataggttatctctagcgttttggaatcggattacgaagagaaagatttgttgaggcgcattgtagatggtgatgatgttgatgatgggatagggtttgttgatccgggtgtcgatagcctgttgaaaccgtttgatcaaagagaggaagagaattttctggaaggatatgtttgaagcggatgtccatgctcgaagcggcgagcaaatggaggaagagaatgctccgagacatgttccagatgttccgggcagcagtagctcttgctctttgaaggaaactattgatgaaggctttaagagagtgatggcgatgttggcggaacacaatgaaaggcttgtaaccattgaaaggagacaagccggtgagagtgtgcctccatttgagaagagggtccattccgatgtcaataaggagaaggaagatggtggtaagaatgagaagaacgtggatgtggctgttgagaccgaggctagtgttgagcccgaggctaatgagacccatgatgttgagaccgacgctgttgaggtcgcggctgttgagcccgaggatgttgagaccc

SEQ ID NO: 24299 - DNA, 602 bp, Arabidopsis thaliana landsberg
gcggtcagccaggaaccctgcattggaacttcctataaactgtagcgggtagtctgaagctagtggaactttgtaaaggcctcgtagtgttaccctgcctcgcttccttggtagaggtgtatggaattcatgaccccttggcagatgggtaacacggcttgtgggtaaagatgcgcaacctctgcagagtgtaaaactagtatactagccgtgctcacggtcaagagcggctcggaccctcacatgattaaatatggaacttaaattcaatttgacatttgcatcgcatttgggattattttaccattactgttctttattattattaaggtttggtatttacttacacttagtaattgctaataaaattttgaccaacttataaaagcaatgctcagcctcagcctttacctcattgattagccttacactacatgaactcccacctttggtgagtttatgccacattattccccatgacttgttgagcgatgaacgtatgtgagctcactcttgctgtcacacacccccccacaggagaagagcaggtggtcaaagaggagccgcctaacactgaggagttcgatctgatctaggtggcg

SEQ ID NO: 24300 - DNA, 537 bp, Arabidopsis thaliana landsberg
gtgaacccccttgacagcatcatccgataccatagcttcacgagccatcaaatgccttgcaagagtgagctttccaattttgctataaaggaaaaaataacacaacgtttaagactacaatttctctttccaatcaaagagagaaagtatataggatatatacctgtcaggcagtataccgaaacattcaacctcagaatctatagcttcctgacgccatttaaaatccatctcagcatttaaccgatccaaggtgacaagagaattcaaatcctttgacttcgcatcccaaatatcaaatccatccgtccatgaaacaatgccttcttgagaatcttcgacggtatcatgaacatgggctgtaaagacaaactcataaggtgcgttgaagttatatcctctggaagaaacgattcctggagagttcccaactctgatcttcactttgtattcgcagggatctgaactgacatatttcagacgagcaacccatacacaggacacctgagaatttttgttcggaattggatcccaaac

SEQ ID NO: 24301 - DNA, 2327 bp, Arabidopsis thaliana landsberg
gtcgaagaatgaacggagttggtcgtcaatggttgcctgtcgttgctcacaggccatagacgagccgccatgttctgtatcagctccagcaggtgggtactcgatctcatcagctctgtggcggccagcaccgctatgaggatactcgacctctcttcttctgctgcggacagcaccgcggtcgcgtaaactacgagactggagaagtcgtttgctcgtgctgctagattgagtgagtgtggtcctcctcttcctcccagattcatgaggctcaaatgatgaatgcctcgcagggacatgcggaatctcctgctcactaggctcaggcctacgccgacttgcctcaagcgcgtcatatctcctcgagggcatgtcctgagggagctgtccctgcgggatagctgtagtggaagaggagcagctaagcttgtccttaagaaacttgatagccctgaggcacttggcgtgtaacttatccagtttcttgcaccacttctgcagcttactgttgttcttgtgagcttcgctcaaactcttgatttccctcgctggaggtatatgctcactgaaatgatacaggctcgtgtcaaactccgcctcatctatttcaactgacacatcacatcttccgatatagctccttctgtgtgactgatctcttcggttggcggactgccctcgaaagaaagatcttcaagcgcaggcttgaagtcaatgttccttccctcgagaatcctattagtgtcaatgcaggggagaagaatattggcgattctaatcgatgaatcctcgaacctgtagcggtggaagtcgtcaaccatgtcatactccaagaactcacatcggcgcaaatgatccaagtccatcattctcggtgctaactctggttccttgagcagtactcaacaagcttccagaattggcgtcacaacgccacccacgcatagtgctcctctcaccttcttcttgccgtttgtcaacgcccacttcctgtatccacacaggtggatcaacagaggcattactggtggcgcgtcattgagattgcctctcaggacattctttccctttgtacggcggagaattcctgtaagtgcggaatctatcatctccatgtccgtgttagacacggtgcctgtagactctctggagtacaaaacattggtaattgaacgctgaaagtagcgaatcacaggactcttgatttggttgctcttggaccgcgcagagttagcgtagattgtcacaatagtggtccacaaatccttgagctcctctctgtcaaacctgggtttggttcccttccactagggaaaccaaacagttcttccaacttcttgatcgaaagctgataccgctgttcatccactgagaatgtcaagaagcctaaccccatggtatccagctcaaagtctgttagtgcctcatacatctccactagcagcgtggaaagaaactcgattgtctcctccttataggcagggtaaggataagacatgagtgtctccaggtgacacttctcgaacagatgctgcacgtcctccagtaaccccagctgggctaaagtctcatagcacggatacctcgttccccagaagtcattcatctcaaagaacctgatatactcctccactgtaacctcgtcgggtttgttcagcagcttcgtctccttgcgccatgactctggctcatactcagtttcgatatcctcatcaatcagctcatatctactcgacatcgccctctttcctctggcgatttcagcacttctctgattacgtcgggctgtagagcgttcaaattcatccctgaagctctggtaaacatgttgctctctcggtctagcggaccaggacttagcttcatccacattataatcagggtccaaagaggattctccactgtagttactcatgatgaaacctgaaaacaaatgtaactaaaaaattaacgttaatacgttagttccaacaaaaccaaaaacacaatccaacagagtaaaccgatcgagtgtaccaaattttttcttctttttttcggtttggtgaactcgtggtcgagtgactgtgagcttgaaaggcagaggtgttcttgtggtgaagtcgagtgaagcgaatgtgacggtcgagtgaaacagagacgaatgagaggatgtggtggcaaagagacgagagcagcggcgatcgagtgatggaatcggacacttgaggacttgaattgcaatgagtgacgatgggaaatgacagaattgcgaaaagttagatgtgtgagataagatgttcaagtcgagtatatgaagaagatagtgcggaggccgagaggtttag

SEQ ID NO: 24302 - DNA, 1268 bp, Arabidopsis thaliana landsberg
gtattccatgcacacggacaaaagatatcacatatatatcacatatatacatcacagatatcatcacaaacataaatagccaacacaaacataaatagccaacacaaacataaatatccatcacaaacataagtgttcaacacaagtataaaatacaaacataagtctcatatgtctcaagctctgacataagtatcaaacacaaacataagtattatacacaagttctgaagtctaaacactgaaaacacaacactcatggaggtgggcggtttgactggtgctgcgttgggctgaacccttccgagggttgttcgacgccgccgattgaccctgcacagagaaaagattgtatgtgtgagaacatatgaataaatatcatgcagtactaaaattttgatactcacaggagtagtgaactctgtagggtcagctgcagggaacaacggaggtggtggagcatgaccctgtgcggcgccaaggctctgcatgtacgcgaacatctccgccatcctcttctccagctcctcacgttgcctcctctcatcatctagccgagtctgtaatatttcgccctaatgttacgataatgcaaagaacagatatataaaaatcaatgaacgatgaatagataaggaataacctggagttgctggatacgatgctgtgaggtgtcctgccgaggtcgtatggctgggctcgagcccgtgctccttactcgcacctgagagagagtgggagtggaggacgagtcgattgccccatcagcaatccagtatcgccctgtctcttgcctcctccgaccctcatcaggacattggggccgatctgctcgatcctcggatcgtattctgggccattgacctcctgtgtcatggaggtgtagtcatgaaggcggctgtagacggcggggttgatgtacgccttgggcccgtcatccgggttataggtgacgtcgaacatcgccttgcccttgtgggccatagcataggccaagaagatggagcaaggctggccaccatgtgacgctgactgcaagaaaaccaacaagatagttagaaataatatttaatccagtgttatatacctaaataaaacagagggcgtacccatgcttctgcatattggcctaggctgcggctgccttggtggtgggagggacttgcatcatcagacgccgttcccggctagcgttgtgcgctcgtccactcaggcgagcacacctatccacatgtgctaccagacagaggatgtcggccgcgaatatg

SEQ ID NO: 24303 - DNA, 4000 bp, Arabidopsis thaliana landsberg
tgggttccttattccaaccatagggtttttatttgtagacaacctctttaccttaatttacccttgggttccctgattccaaaccttagggtttattatatttgtagtgaaaccctctttacctgaatgtacccatgggttccctgattccaaaccttagggtttattatatttgtagtgaaaccctctttaccaaaatttttttatcaatccttagcttacagtgatgctttcactaacgacatatgtttcactaactgcccttgctgcgtctttttctcgatttcagccatggagcacatagatttcaacatagctcttgatattgcatgcagagtaggggctgattcatttacggaccttgtagggatgctttcaacttcaaagttttttcgcagccttgcttacaatggcactgtcttgagacaagtttctctgaagtcgttcctcgataattctgccctcatcaacttaagctccacctttcgtcctttctttgaactttgcctggaagcacaaaacccgactgcttgctatctcaaagccctgagacttgcttgtagaaaagggcgtgctgaagacggtctagctctgttgttaaccatgccatcttcgtctctccatgcacagtttgctactgcattgttggaagtttgtcttggcaagtatcacgatgcaatgcatatctctgctgcatttctagaagcatcatcttcttttgaagcagctgatgcaattgccacgactgtcttccaccagatgattcaaattggtcctcggagaattcattcacactgtaacacttggcactttgaagtttacccttcttgtcctctaactggatgtcaaatgcataaccgctgcacagactgtttgctgtactggtactcggtcatgtttcttgttttatgttaatatcttaacaaaaatctcattttacgcttaagtccaacctatttcctgtgttttcctcctctgttgtattcgcttgtatgaacctatgtatttaaactatgttttgctacaagttccactcagtccatcagtttgttctcaatcttgacaactttacttaaaaattcatcttttctattgctcatcccactgtttgctttatcccctattacgcaacacatttaccacagagttaccaactcctactgtctttacaccaacttcaattacttccccatttaaccctgacctactaccttcacttcaacaactctatgtaacatccaacgcttatacttttaaccaccaccaacattttcatcattgtttgcctaatttaccagaaacaagctctctttcattgtaaacactgaaactttaaaccctcctatctctccaatgtcttcttacattccaatacctttgctcactgatatcgtcatgaaggttgggcaatctggttttcgtttacttggcccattccttgctgcaggatctactctctgcaacattgtcttctctaattccgtcttatctgaagtctgtttaagtgagttctttcagcttaggtctatggccaatacagattctccgtaccgttctttttttcttaggtgtgttttggctgagaaccacaccgccaagtatctagaatccctgcgcattgctgcccaagaaggcccttctgttcagtcactcgacatgctcagagaagctgcgttgcatagcatatatgctcggtttgcttttggaatattcctctgtctttgtggttcttctgaagttggaataagggttttagtaacctttctcgataggattcctaattttggagaagcaattgttatcgcagaacaggtatgcacacatatccgagttatgggaacactgggtcaacatgcttaccgcaactacaagggcatgactcttcctgtgtgtggtttagtccattactcggctttggacgtttgtccatcttgcttacctctacattattattttgaaatctctgacctttattaagttttattcacctatgctctgtatttctactttgaacacctcaatatcattctagatttcttatgtatttcttctttgaacaccaagatttctgttgtattttttctttcattataattttctatctatgcttttttcttgttttaaacaccattattgcatgttctcaacgactttgagctccctacatttcaaattgtatacataaaactccaatttactagccacatattaacgtccattaaaaaaataaggcgtacacataagcaagccattatattcattatcctactaaaaagaggattacattcatctgatttaccgattacattacgattaaccaaaaacggatgacactacgatatcaacagtgattaactgaaccaaaagcttacaataacgtagtcgaatcaaaagatatccgcttacttacgcctacaagaccaaaactgctatatacaacattggcacattctgttctacttgatcctgaatttaccattcttgaagttctaccagaagaccaacactgaatcaccattgtaggtcttctgcaaaattagttctctagcaaacatatttttcaaaacatgctggtaaaccatgcagtttttgcttaatacttatccccaaaaagtttcaccatactactgcttgcttatgtgacccaaacaacttgttttccctactcgcaatgtttaaacaacctaattatgttacgttataaggtaatacataaatgtacaagatgtccaagtgccacagtaccttatccgcaagctttaggacatgtgccctgttatgttccggtttgaagcatcttgtacatttattacgaccttttctctgccttttccaccctaaacagacaaacaattgggttagtaactcaagtacatagcaaagtaaaaaagtatcatgtttataactcaatgttccgttaccatgtgatttccaactgagggaaatctcctcttcatgcggcctccatgaccgatactatgatctcgtggaatgaactcggattcctcaataaccccatcaacttcttctttgccatgagtagacacaggtttgataaactcagcataatatttttcccaaacacagactttgaaccagtttccaactagggttggtatgtgaatttttgtttgttcagttgcaacaagcgcatggcaacgaggtatctgtagtttgtcaaactgcctgcggctgcacgctttcttttgaagaccaacataaaacacagttctctcaacattgttaacttggaaggtccacggagagattggtagcacagccaaaccatttgagcctgcatgatggcgcaatattagcttgtgtgcatttggtataattctgtctttaagcttcagtgctttagcacgtcgcacacaaaaccacttcatcaatttcgttcttattccttccaccaatgtcattatgggcagttcaataatcttccccaaagctgaatttaatgcctcaacaatgttgcagctcgtgagattgtaccgttttgcttcacagtacgcttgtgtccagtgttcttttggtattccagccaaataatcggcacacccactgttgcgcctccatatctctgtattaaaggccctgaaatcagttaaatcagtttcattgaaggctctagatgctttactgacaaggttagacacccctttctttggaaacttgactctgacatttctttctatgtgcacagcacatgccccatgaaaaacttttggatacacctgcctaatcccagcatatattgaagcatgtctatctgaaactatgaccaaatttttagcatcaggcataatggcactcaactgcctaaaaaattaggtcaaagctggttcactttcgctatcaacaataaccaacaaaattggaaacaccatgaagttggcatcctgcatgctagctgttaagagaactcctttgaacttatgtttgatggcagtaccatcgacaagaaccaccttcctcatgtacttaatccctgcaatgc

SEQ ID NO: 24304 - DNA, 1410 bp, Arabidopsis thaliana landsberg
  unsure (1)..(1410): unsure at all n locations
ctttcaatttcgatttccaaaaaaacactgttctttttatcctgtttttaaaaaatgggattctctttttaatcgtggccattgaatagatttattaccagccgtccaattttgtagtttcatgcataaattcatccgactatatttcaggaaacgaatcgtattaatttcattcaatttattgcgtatcttcgttttctgccttcaaatatatcacttctccataattatagcacatctaatattttgtttggatcttcttttggaattatcttacattttccacaagtattccctatatacatccacttttacggaaaatgctaaacattttgctataattatgagatttgtgatatggaataaacttgaattccacacgaataatatcttttgcgcatatttttttgatctaaccacttattcttataaatatcggatgcctcatttcaatctactcactcatcttagactcatacagcttcatatctagtttttttttttttttttaaatgctcgccaatcctcttccatttactcccttgaaatcgctaaagccttacaagaatgcttggcgtattcaggttaaattgcttcatgtttggagacaatattctgtaaaggttggtgaatccatcgaaatgattttagttaatgaagttgtacgttttatagtttaaacagtatatttggtccagccttatagtgtgttcaatcatcattttcatatattaattattatccatttatttttgtcatatagggtgataagatgtatactcctgtgagaagagagcagatcgagaagtttgaaaggtgcttaaccgagggtgtttggaagatcattacgaccatcactctaaatcctacaagtggtcagtatcgtatttctgacttgaaatacaagattggttttgttttcaaaaccacggtctctccatgtgataccgttttcgatgctttgtttctctcacttgctaagtttgacgtgatcttttctggatccgctaacccaaatatcttgcacggctaaattaaattttaaatttgaaatttgaacatacatgctcttgcatagtcaactatttatatgtttctcttttttgtttatacagatcttnnnnnnnnnnnnnnnnnnnnnnnnnaaattcaaaatcttaatactaacaacaagcccacaaaaaaaatcaatttccatatgagatacatgcaatacaaacaatctataccactgggtacatgccaagttttttgtttatttattatttagtgatcaattttcttttttctatttaagtgacactcgcttgacatgtacacttgggggaagtatgttgagatagttgacaaagcttgcaagaagtcaactgatggtattgttgtctgcttaatccgatatgcgaagatcct

SEQ ID NO: 24305 - DNA, 2224 bp, Arabidopsis thaliana landsberg
acaaagatatgaactagataaaatttcattttaactcatttattcgaaactcctagaccgagtgcactttggaggggcctgatcttggtgatcagttggtacgtgttcgagggtgatagattctcaacatatataaatgccagcaagttgcactattatatctgttatcatctctgaatcgatcattgactttgcgttcggacaacctcataaaggaaagatcattcaataatgattttgttgttttgtgaaagtaattgcgtaggctaattcttagtattagtttagaaactcgaatactagttgtaatattgtagactaatactaccgatgatttatacatatctaatctataaatcgatcgttgacttcgtagtcggacagcctgtaagctaacacacgtatatagtactaacattgttatatgtgtaagatgtgtttttattacaattagaaattcagaaacactaagttaatcacattcaaactcaaaatctctcgttactcaagtaatcgttctctctctgcactctatggattctcccgagtcgaagctcatatcacttgctactcagctcatctctctagacaactcttcggatttggagctcgtatcatgtaatattattcaaataatatctctcgttagctcaatggatttggattcgcagccgaagcccgagacgaagctcatgtcactcatagctcaaacaatctctcttttcaactccatggatttggattccctcccaaagttgttgtcggacctcatgtcattcacttcttacaaattaattcttcttgactctagagattcaaattcggaactagaaacggattctgattcggagcaggaccagggttcggagggtagttcactcgttgtaaaaacatggatcctcctcatatcgctcatccaacatatatttttctggtcttctctatgaattcaaagtggaagaagcctatttcattatgtcctcaagtgcaagtcagattgaacgaaggaaagtttcttgcaaatccaaaagtccggttgagcacgcgtgacaagtgggaatgtctccctgtaaactgggagaaattcatgttatcgggagaagaagagacaacccatttccgctgcggaggttgtaatggtgataatcataaggaaaataaaaaggctccggtggagatcaaacattttcttcattcgaaacattctctccggcttgccttgatgaaggggcgagaaaccagaaaatgctattgatgtgatgaagatctcaaaaaaatattttattattgctcaccttgcgattttgctatgaacattgtttgtgtggataaaccaccagtcttgtttatggactgtccgaagtggcatgaacatactcttgctttgtttccaagaaaggcttcgttaacttgcgacctatgtgccttgacacattcaaactgtcctttttacatatgtccccagtgtgactttgtggatcaaagctgtatcagcttaccccgtgtcataaacatatctcgccaccaccatcgtctcttcttttgaccaaggagattggtcttgtggtgtttgtcgcagaaagatcgacattgattacgggagttattcttgcaaaaaggacggttgtttctatgtggctcattcgaaatgtgccatacaaaaaaatgtgtgggatggaaaggaacttgcgggagagccagaagaaatagaagaagaagagcttgcaccgtttgtgaagataagcgatggagtcatacaacatttccttcatcaacaacactatttgaaatttgatgagaacacatgcaaagattacagcgagaataggcagtgtcaagcatgcattatgccaatctattatggtaaattctactcatgtatgcaatgtgagttcattctacacgaaacatatgcaaaactttctcgcaaactatatcacccgatacatccacatatgctcactttgttgggaggatatgatggtgttgtggactttcttgtggataattgttcagtttgttcttggttgtgcaaagttggtttcttctatgagtgtggtaaagaaggatgtgattttcagctacatgtgcagtgcgccacaatttccgtgccattagtcaatggaggtcatatgcatcctttattcataacatccaaaccaggagagcaacggagaatttgttcgatttgcaaagattttaattattgtcgcacaaatgaaac

SEQ ID NO: 24306 - DNA, 938 bp, Arabidopsis thaliana landsberg
  unsure (1)..(938): unsure at all n locations
tgcctatatttttagaagctggtaagcaaatcacagaagccaggcttcattcaaaacaggattagcgccatctcactaggatctgattatgaatgacttaccctttcatcttcttgacaacattctcttcagattggaccccaaatctctggggataatgcgatgcactaatagatctatcaattcgcatatatccaacgatccgaattttgtaagtggatactcttccgaatattcttctcgggttggctccagtctttttcacgttgggatcagcttgggcgacaatttcatcatctgccaccatttttcttattcatgcgattctacttcagtgaaagaaagatcagtgttggaatttctgtcttgttacattttaggctcatgctccggccttctcttactattcatcgatggcctcttcctcgcaaatcccctcacaaagaggtttcgacctttgaatcactctggctcaaagcttctgtctcccatatttggtcgtaatagtcaattcacctcacgtgatgacggtatagaagattacaaagctcgtaaggagagaaggatgcgtgttggtttcgtggtaagtcccaccaaaggtttcaagatcgtatgcatactcgagatggaaacggtgtacggattcgagatcagtgacggagattcatggaggttatcggaaacaactatcaccactagctcaaaaagcctactcacgacatggatgaaacctgtttacttggactgcactcttcactggctgagaaacgacgggagtatcatagctttcgatcctgagacagagcaagcacgcttcgttccttccgtattccatcgtggaggaccgggtacgaagctgatttttacggaagattgtatgaagagtcgcctgaccttaatatcggngacacaggaaacaatttcagtttacacactag

SEQ ID NO: 24307 - DNA, 2327 bp, Arabidopsis thaliana landsberg
tgctaattggtttatgggtagcctaattcgctatttccggtctaaaggcatattagaatcacatcttcatcaatgagacaacactaacttcacctacgaaataatcatttctgcctagtgactatggcttcttttctttaattgttacggtttctttctcttctgtaagaaaactgtatgaattaaattaacagttattaatcgaagccagcttaacaagtatttacagtgagtttctaaggataaaatatgtgcatttggtctattgattgaaagaaaatttgtgtttaagtgaaactaaagagtagaattctgttctggagtctttatagcgaaactcgttttgtaggacatattaccttatattatttcattaggcagatacctatcaagatggttgctagaatttgcaaacttttataattaattccctatgtactgcttgccggcgccctgttttatacaattgcattattgtttagcttctagtgtctacacttaatatgtgtctcaccctaatataccattacgtagcaggatttatcaaaatccagaccatcgtcccatgtttccatgtgcaaaaatagtttgggaaggcatcaaaatcagcctactggttaccgacctgtccgtgttgactggaaagatctcgataagtgcaatgtctgccacatggatgaggtaaaggtttttttttttgtttcacatgagatttcaaacgtttctctttagttagttctgatttatatattttttgtctgcaggagtatgagaacaatttgttcctgcaatgtgataaatgtagaatgatggtatagctcatgctctgggcttttttagctatcatatacctcttagatgtatatctttagtgccttgtgctctttctttctcttgggtatgactcaatttgaattcctggtccactactaggtccatgctaaatgctatggagagctagaaccctgtgatggtgctttgtggttatgcaacttatgtcgtcctggtgctcctgatatgcctccacggtgttgtctttgtcctgtagtaggtaattttaccgtaccatttggtgtatggagtctatatgtgctttcattagtgaataattgaaacttcttttagggggtgctatgaagccgacaactgatggtcgctgggctcatctggcttgtgctatatggatcccaggttcaatcttaacgatttgttgttctgtataagtctgctttcctactaataggaggccgtattacactattactttcctatttacaaattaacacttgttattttattcagaaacatgtttatctgatgtcaagaagatggaacctattgatggggtgaataaagtcagcaaggtacgtacttattttcttgttcggattcctttacctaggtactgtggcctatttcaaaactcttatccctcttcctctttttctctactcttaaaactaggatcgttggaaattaatgtgcaccatctgcggtgtatcttatggagcttgtatccaagtaagatttcgttctatgttaagagaaaactgaatcattcttatgcattgttcaagagctgatatatataatactaaaatgactacattgcattgttcaaacaattcttgtcgcgtggcatatcatccactctgcgcgcgagctgctggtctctgtgtcgaggtaccttagggaataaatcaaaattctttcccacttacacacatgtactggaacacagcaagtccacaaaagagatgtttctaactgattattgctttcctgactctccatgtagcttgagaatgacatgtcagtggagggtgaagaagcagatcagtgtatccgcatgctttcattctgcaagcgacatcgacaaacatcaactgcctgcctaggatcagaagacaggatcaaatccgctactcataaaacttctgagtatctcccaccacctaatccatctggctgtgctcggacaggtatgcagctactgcgtttatctgtggatgctaagattaaaatttagattcacaccacacttttgggacaggattatttcatcattattcttttaccttgcatacggccatgtgtgttttgttctctttcatattcttacatatcctcttaagatatcagtttcttactttatatacaagcattttttagatttgatacaaaggtcaaatttcaggcttttgtttttccattcttttctgcttttattcgtgtttgcatcctatgggtcagtatagatgataatttaagtatattgttgcagagccttataattgttttggcagaagagggcgaaaggagcctaa

SEQ ID NO: 24308 - DNA, 954 bp, Arabidopsis thaliana landsberg
tacaatcgaagtaatgtgcaacgaaattcttggaaattattctaaaaaagaagatcaattgatgactgcaacctttggcacccgtctgaaacgaaggctaaaccgagtgatggatgctataggttttgaatatcctgattatgagcggttggacaagggtgctgaaggccaataaagataaagagtagcaagtgctctgaataaggacgatgaagatcagtcaaagaagaaaaaacaggagtctgaggcgaaaacagttgcttcgaagaaaagaaaggcttcgactccgaagcaaaaatcaattgatgaaaaagaaaggacttctgcgacatcctctgctactaaaatagaggaaatcttaaaggtaatgactgaaactttgcctgtcaaactaagtccactggggctacatctgacgaagctttttcagaaggaaaaggagccacataaacgaaggtacctaggccaaagaggcaaagaattgttactgtgacagaagtcattgaagcaacaccaccaggagcttcagctccgaaggtgccggctattgaaagcatgacagctactgaagttgtaccttcggagcttccgcagaagaggccaaagccgaagatgccaaatccgaagatattaatttagaaagcatggctgctgatatagacaaaatgctactaaacatggccgcggaagaacgtgtcgcagccaccgaagagactacggttgcaaaacccgagaaggaagaaatgactgaagatacttcagaagatgaagcttttgactttcaaaacttagttggccaagagctgacaaaagctgaaaaagaagaactaaaagaatatgctatatcttgcgggtatcggccgagagcgcttctcttcggtggcattgatgacgaaaggttaggctgcatacgagatcagaccggcgcgaaagttatcggtactctatcaaaga

SEQ ID NO: 24309 - DNA, 845 bp, Arabidopsis thaliana landsberg
cctttttgttttctgaccaaataccaaagtccatcctggataacatggtacatcaacaccagacttttgtttggatattaaaagaatgaacaagaatagatgacaaggtgcaaaggtttcgcttacccaacaacgaaaaatgaatagccatcaacatggaagctctggatcttggtgtcattgttctggaaaacaacttgtataaagcccttgtatgttgcgttgatcatagatctatccaaacgaagaggtctattaaaaggtctgtcagggaagtccagcttataagctcctttcactttattgcgatccgcaagcctcactggagtgcttggattcacaaatgagatcccgttaagtgtagcacgaagtgccccgttaattattgttggaggcaaacttctcaaaatgtatgtgttagtgatgtttatttgaccataatgaaatgatccctgcggatttggacgagctccactggcagatgtattttgcctgcaaatcaaaagagtcagcttcactggaaaaaaatctagttgtagcaacaagaagggaacatttctatgcacttgttccaaaaaagtttaaaaacaaacctgatggtcttcggctggctcattgctgaccacgggctagaaacatctgttttgggaactggtagaggaccagaaacaggtcctttggaattagaataatggagaatggcaacaccagtgactctttgccacactgtttcattcacaaatctagcactggcaacaatgtagtagtcacttgtggcgtcttggtccatggttaccaagatagaataagactgtcctacatgaacatcaaaatcagtgaagttc

SEQ ID NO: 24310 - DNA, 1019 bp, Arabidopsis thaliana landsberg
taatacctggttttgattccccgaaatgcaataatgatagcattcaaatcctttagccacgcccaacatatgcctgtcgttaaaagttacacgtactgatattaacaaaattgtttaacaaaacaatatcatgtccagatgtagcttaagatatcagggcagacctgtaagcagtgctcaacgtcaactattatctctattacctcaaaaccctgcaacatccttaaagacattagaatacccaattaaagctattagctttatacatactgacatagtgcggcttcaaacagtgatctgcttcaacaaatgttatacctttgtcaaaccattgcatctttcgcatgtccaagtgaagagttctgacaaatcagacatatagacctgcatacatatataaactcgattcatccctctggtgcacttatcactttatcaggataagctctgttctctagtaatgctagtaacaaataaatgaaaatatgaggacaagtattacacatctagaatttccttcctatctagcagagataatatgaaatgcatactgtagaaatctgctattaacttaccgcagaagtatactccacaagtgtgatggcaagcgtatgattgtacacaggtcgaccatcatcgctcttaaacttgagaactgcaataaatagaaaaaagtcaccataaattcactaagtacagtcttaattcatttgtcatcttcccaatcactatcattgtacagaaatttcaaatcttgattaggctcaaagagactcagagggataagtttcatcatcacctctgccacatgaagatgaaccaaggcaaacaaaaattgccagcaagaagaaccatctcttttgtcccatatcctgcaaaatgacaataacacacagccacatcatcttctgttcatcaacctaaagaagagtaaaattgagctacaacaaaacagaatccggaagcagtttagtcaaaaatatagtcttaccttataaagcgagactcacgaaacccaa

SEQ ID NO: 24311 - DNA, 2070 bp, Arabidopsis thaliana landsberg
ctaatctaggaagatctttttttcctttttaacagaggtcgagcactaaaggaaatcttagttcttgggagagtctttcttggtatgaattctctcaagtgtataagctatgactacttatttgaaggtaaattcttgtttttttaataagaactaagttattaacgtttcgcttgaaacttttgattttcacatagattaaggttcataaaataaaacattcttaatcaattacaaaatagattagaatctatactattaagagagatagaaagaaacagaaagaacagagtttaacttaaaaaaataaaaaccaaacacacacttcagaatagctctagttctcctcaacgatctccatcattacatcgtcctaatcatcttcattcatgtattcgcggctgcatttcaaaatcatcttgggaattagttacgttaacaattaaagtttcaaaaaagccaaaatatagttacatacaggtaatttggaatatcagtttcatcgaatttaggatcgatgtatagctttgagaagccaaactcactgtggacaacattcttacctgtaaaatttaaaaaacatgttaacattataatgaagacataatctttagtattatttaaaagtcaaattcaaaataatgaccatgatagtttgtgattctccagttttggagaacagcgacaattagttcataattttaagtaatcaaactgattctatttgcccagtagttcacaatgaatgataacccctcttttagtacatccttgtacttccaatgaatgatgccttcttgaatagttgcatcaattcgattatactacataaaaattataaaatttaaaaaatagggtttcaaatataatcaagtcacagggtaagctatgctaatttataaatttacatttgaatcgacaagcatcatcgtggttacaacaccatcttggggtggattatgatgccaaagaacaagaatcttcacaatgactctccatttagtactgtgaactcctatgtcagataagaggttcatcatctccattgagattgataagccgtgatagtttatattagaggaagactcaaagaaaaataaaagtaaacagtaaacacaaagtcggaattgtgtagtttatattagaggaagagttgcaatcattgagaaaacagttttagaaccactaaaaatcgagaaactgaaacattatatattgattaaatattataaatatttttaaatatctaattttaagggtaatcgccaagtttgttatttatacgaactaaatatattagagagtatattctaaaaatattttagttaagatatcatatattattatggaaagagtatatacatattgatactatataggtaatttgaattttgtcttctattggaggtttcaatgtattgtaattttaatttttatgtaataaaacttgaattaaacttactaatttattaacatatttttccttttttatagaaaaagagataaagagtggaactcatcatttccatctaaggttagatactaaaaactcttagattgtataagaaaacactctataaatatgaactaagttataaccaaaattaaataactggaaatttaatatttttaacagaaatttgaaactcaaacgcttatgagtcttacatgcttaaagaaaatacaaaacatagtgaaaataaacatgtaaattgcaacataaaataggataactgaaacttgaaaccataaaataaaaaaagaacgcaatgtatgataattcaaacaaacattccaaccatatttcatcagataaaaccaaaatcaacttagaaataataagtttgatttttaacagcaatgtaaattgcttctacaaatcattggaaagatgaatctgactcttggattagttctcaacaacatactcaatcttcccttcaacagacccatcatcttcacatgcaaaccaattgctgaaacaaaaatataaaaagatgtcattttgacttgaatagttagtatctaattaacaaaaacaatttatctaatgtctttcacatacatgta

SEQ ID NO: 24312 - DNA, 685 bp, Arabidopsis thaliana landsberg
tttacttgtctatgtatgcatttgcttcctggggtgtaggaacgtgttgtgcgagagtttgtttcctaatatatatatgaaaaagccaaaaaaaaaaaaaggcagagaaatttgcctgaagaacttttgttcttgtgttttacatccatgggagacggtgaaaaaataaaaataaaatacaagattgttcttaaaatacaagcaattcaattcaaaattttggcaatatctatacttttttggaaaaaatgctcttttccaaaactttggaatgttttaccaaacatcactgatgatgaataaaaattataatctagagttggagacatgtagatgtaggctttaagagagggaaaaggaactaaaatcattacaaagacttatttttatttggggtcaaaggatttgtttctttgtacaaattcaacgacttatttggtgtttgcatttgtgagtcagtctccttgcccaatgtcgcttggtgtgtaagaaactataacatatgtggtatatgagattgtatatattttcatagtgtgatgggttggtctccttcaagctctgatataacaatcaatgagtcattcatttcgagggaaagaggttcattctttggaaccggattgatcatctgcaaccacagaaaaaacctagttatcaagcgctagtgaagaggaagacgtta

SEQ ID NO: 24313 - DNA, 2991 bp, Arabidopsis thaliana landsberg
agaatcattggttgctttatcattggtcttctctcgaagtgatgattttatccttttagtattggataaatttccagcaatagaaattattaatatcaaaacaaaacatataaaaaatattatttttacatttaaaatttgtatgataatattgcatattcaataatatataagttagtaatctgatttcctattttttgcggcagctcttggatgagttggacaaaatacttttgagctattggatccattgacttatatttcctcttgtgtttggtgtattataatttattctgtgtccttataaaacaataatatatgaatgaaaataaagtcgaaatacgtaatgatgaggatatatgagcatactacctgtaagagttgattttattgtattaatgggtgtaatgggtgaggaactactattattatttttcgaataaaggggtaaagacattggagtatgaggagtttgacttctatttgtaatctcgacaattgttaatttcactaagcactctaccaaaaacagaactgacgctaaccaaatttttcgatccaagtgtttgattttgtggagaaaagttggtttcatcgaacaaacgtcttgttcgttttgaacattgaagactttttttgttgttgatcgacagcattttctttcttttcttcattgtacacgaagaatagaaacaaacaatagaaatttagcttcagtcgaaagtcaaagtattaaaaaaacaaaaaaagatgataaacataacaatgctaaaaaattaggaaacaatatatatgaaaatatattgttaacaataatatctgtagtataattctattatggcgtaatttataatatttacagctttattttagttattatctgattataaagcaaattttaacacaaattatgggatgttcgattaggaaactcctcgttgaaatcatggttgtttccaatatagaagattctatggcgttttaaatgcatggttcattgtatacatattttaataaaatttaagttttgcagatttgttttcttcctttaaatacatgcatatctatcatttattttagttaaatttgatttgagtttcacgtttaaaaaattgtgttaaaattatctaaatattttaaatccaaattgtaaataagaataacaatctcaaaactttgaaatttttatctaaacttaaggaactatagtgatttagcaagcattaaatataacaaaacataattaaagttaatattttacaaaattcatgcataggaaatgaaatcaaaacataaacaaagtcttaacagtacatattataagcataatatagtagatttataaagtaagatagaaagcgttctggtcttgatgtcttcaattctcatcaacaatttcacctagctcagctggttgcatccgttcaaggaattgagtcttgaaaatgtaggaaaacaaaaaagaaataaatagtccagactaaaattttatataacacacttatcagtaaaggaacaatgaaaatataaacgttcttacctgatgcgagtcatgttaatctctgggtaagtttgattgaatacaatttttgaagcaccattatgtgaaattagacattgacgacctaaaataattatgtttttattatatgtattagctcgataaattaaagatacgatgagaagagtgttaatatttaccttcgtgatcagaaatcttccaaaatcgaaacacacagattgtaagattcataccgaaggtcccctcataatcaagaccaagaccaagtctcctccataattgcacaaacaactcacaagtatatccgcttgcaacacatatcagagatttacccctaataacaatatcaaattattccaccaaaacatctaagttctatgaattaaaccaactataaagataacaatatttactatgtttgtgcattcaaatatataaccaaatagatgacgaactatataatggaaaatactaaccaagaatttttaatctcaaattcgagaaattgagaaagtatagtattttctgaagcttgaggaacaaagtccggtcttgttatattcccaactatcacgacaataccataagcatctacaaacaaaaaaacgataatatgaaagattaatattttcataaaatagactttatattattgaaaaatctaaataagaaagttaccatgaacagttgaagaattaatagtcttgttttcaatcatagagaaggcagcaaatcggaaaaagttacttggttctctattaggcacatgagtcattttggtagtctgaaggaacttgattctcaacttattatcagttaagggaggttttctaccgccgactgatttgatcagaagtatgttttccaagaaaaaccaacctccttcattgagaactctaggtatgttatatccagcgtagaaataagtacaaatgacatcaatcattgtgccctaaaaaaaatgacttatgaattattaatagattaaatccaaagaatactatttaattattaatagattagataaaaaaaccaaattaccatctcgtcgcacaagatcatttggtaacacttcccacccttatgaggaagtgttacccaccaatatagtagcttcacaaaaaccttccaatctttttttttttgagaaagttgagatagatatgagatacctttgaaataaccatctctatcatctctcaacatctttttttttttttttgaaactaatagggtaaagggaatatggcgaagataagtaatagatgaaaataagaggggaggttacctttttttcaggttatgtgtcctttgacagtttaggaatattacttgtatttttttttttttttgcccaaaagaataagcgcgtatattaaatagaaaaagttaaatgcaatgcaaatcttgtcaatcgaatttggaatctcgatggtaaattatagtgcttttatggttacatgcgagtt

SEQ ID NO: 24314 - DNA, 826 bp, Arabidopsis thaliana landsberg
taaggccaaaccatgggggcctaattagatataccagctgaccaatcaagtcaagctcaattacctgttgtgtcttaagggaggacatgttcctggaaattacggatacagtacaagatagctgggagcattctcaatggttaagaaccaattagttcttaactttcaatcttagcattatttaaaaataaaattttgttttttgaaagctaagactaaaagttaagtatcttaataaatatgacctccaattgttcagattcaattgtattttaaggatagaagatcaattttgcatattttgttttgtttttccttttgtttattccttaaaccaatgtcgaagtgacacatagacacatcttagctaagcaaaaacatattaagttagaaacatatcttagcttaagattgttggtttgatttaatttaatcacttttaatcctaagtttttgttaagatatacctaagatacaccattgagggtgctctaattacgaattttctgctcattgtagtgttattttctacttttgatccaaactgttttccatacgcctttgtttttaaatggaaaccagttcgttctttaaatacaaaccgaaaggtgtgtgtttaaacatgaagattacatcaaattaagattagtttcaatagcaagaagagattgtgtcttcttagttatcagaagacatgattttcctttctgatcattacattggcgtgtgtatgtatttgcattaacgaaaaagggggactgggaaaaaaaaaaaaaacacccataaattgacattctgggcatgaagttgcgcactcttgaaattt

SEQ ID NO: 24315 - DNA, 2489 bp, Arabidopsis thaliana landsberg
agtacctattcgtggtatttcttgagatgcatggcattccgaggccgtaactcaggtactccgttgataactttttctagcttatagacgccgtcgcgtaccacctcggtgattcgatagggacctttcgagttagttccccgttttccggcgtttagctctcttgtgttgctgaacacttttcgtagaacgagctctcccacttcgaatctccgaattttgatattggagttatagtagcgggcggcagcttgttgataattttgaactcggatcattgtctgatctctgcgttcatcgatgaagtccatgttgtcctgtaacatttgcgtgttcaggtacgagttagcaggactggcggtccttctcccccttggtaatatggtttcgacagggattactgcttctaaaccataagggagggagaacagtgtttcttgcgttgatttgcgaggtgtggttcggtaggcccagagaactccgtggagcacgtcggaccacattgatttttttgaatcaagtcttttcttgatgttgctaagtataactttgttggcggcttctgcctgtccgttaccttgtgggtaacgggggtggatatggtaagacggatcttccacttgtcgcaaaatgctttgatttttcccgaggtgaggttagtccgttatcggtgacgatctcataaggtatgccgtgtcgcatacgatgttttcccataggaagtcctcgacttgtttcttggttacctgttggaaggctttagctcaatccatttggtagaatagtcggtgaggactagtaggttttttagtttcttcttcccaccggaggcttccatgggacctacgacgtccatggacctcttcataaatgggtaaggagaagatatcgaggacatttcctcgggaggttgatgaagagtaggtgcatgtcgttggcatttatcgcacctgagtgaatgagctatgcaatcggctagcattgttggccagaagtagccttactttttaatactgagggcgagggtacgtccactacagtggctaccacattgcccttcgtgcatgcttttcatgaggtctttcgtttgttgcccgtaggtacacaccatatagggacctacgacgctgcgtttcatcagtctcccctccataatgcagtaccttgcgctctgggctttgagttttctggtctcccatttgtcgggaggtgtgatccctcgttcgatgtaatcgatgattgggattctccagtcattgtacggttcaggttcgtgcgaggcaggttgttcgggggtcccgagctccggctcttcctccgctgcacctgcctctgcggccgctgcaagggctcaagccgcggaggtggtgcttcgggttacttgcgtaaagttgcaagttgccgaggtttctgtcccaacgtgtttgaccgttaagtcgatgtttgggtgttctattccttcgactgggataattcttttgacgaaaggatctgacgtgtaggcgagactgccaaggcgtccgcagaggtgttttccctctagggatcctggtcagttcaaacgattcaaactgttgggtcaaggttttgactagttcgaggtacgcttccatgcactcgtctttagcttcatattccccgtggaactggctggtgatgagttgggagtcgctatgggcgtgtatatcgcggatccccattccttgggctagcttaatgccagcaatgagggcttcgtactcagactcattgtttgatgcgttgaatctgagtcggaacgattgttcgatgacttccccagtgggggaggtgagttgtattcctacttcggtccttgtcggttggaggagccgtcgacgtggaggagccatttcttattagagttggttccatccaagtttgctaacaggagctagattacaaagtcggcgatatagagttttatgggatctctccaatctgaaggttccaggtctacttcgatatctggcgtgtcggttgcatcggcatctacatccatggtcgttataggatccacgatgacgcatgtcaaaattggtagtttgatacgtggtttgcttatgctctcgacaagactagaccgactaaggcatttgttgaagagttatctctccaaggaattttaatcatgtcaattttgaaagataagctcgcattctttcgtccccgctaaactggcttaccacaagttgagaatcgctaaaggctttgattcgtttggccccaatcccttcagtgaggcgaagtccgccgagaagtgcctcgtactgcgctttgttgttggatgctttgaatggaagtcggagcaactgttcaagcacctccccggtcggagactagagtaggattccaagaccgtaaccttgtagtgatgaagagccatttgcgtagagcatccccgttttctttagggacttcatcgatcacacatggcgatagttcggttatgaaatctacatggacttgtg

SEQ ID NO: 24316 - DNA, 4864 bp, Arabidopsis thaliana landsberg
  unsure (1)..(4864): unsure at all n locations
ttttaggtgatccagcaagagaggtttttaaagaactaggcatggatagaagatgaattacaagccaaagtgtcaggcccataaaaatgggtattatgattccttcaaagtttcaaatgaagagaatgacttcaaagcaaacgtcaagagagctgagttagccggtgtttttgacgaggtgctcggtttattaaagaaatgtcaacttccagatgagttcgaaggggacatagattggatcgagttagcaactcgataccgcagattagttgagcctcttgatattgcaaactaccatcgacatttaaagaacgaagactcagggccgtacatgaaaagaggaagaccaacccgctacatatatgctcagagaggctccgaacatcatatactgaagccaaacggaatgattgcagaagatgtattttggaacaaggtaaatggtcttaacttagggttacagctagaggaaattcaagagactctaaagaattcgggatccgagtgcggatcatgcttttgggctgaggttgaagaactcaaaggaaagccatacgaggaagttgaggtaagagttaagacattagaagggatgcttagagaatggatcacagccggggaagtagatgagaaggagatatttctggagggttcaacgtttagaaagtggtggatcacgcttcccaaaaatcacaaatcgcattctcctctgcgagactatatgatggatgaaataacagatacctgaaccttaggtggtggagtatttaagctattagaacacttgcttctcttaatttgtgcaataagaaatgtttatcaatctggtttccacttcatgatgatcttagaataagaaacatgttgtatgatcattgtgaagtaatgtaatagctctctattctaatgtcaaatttggtttccactttacagtgatcttagaatatatacgttactctactaaagcctaaagccatctcaaatagcatgaaccagtaacaaacaaccttccttagattgaaatggtctcatgatggggtattttgggtaattactcctgtctacatcttcctactatattaacagagtaggaggactaagaatcaagacgactcaaaagaaaaaagagaagaaagtccactcaagaaaagagaaatggcgtttgaagctcttacgggagtcaacggtgatctagtcaccatatcatggatggcgtcgaagggagctaaccaaacggagcactatctcaaagaagaagtaggaggaaccgtttttttcgccttccgagcatctttctcgtcggaagatttgttcgctacggagaatacatctccctttggagaaataaagatgaagcgtaatcaatttccttgtatgagaagcatcggcaacgacgttgacgctactgttaacgaagctttcctcaagtcacttgaagttctcattggtccaagaacctcatttcatgcttctgtaagtaaacaaaagcttcttaaatgcgttttaaatcgaaaacatcagaataatttgtgtctgaaacttactttcttcaggtgcaaagcgcggttgatagaaaacaacaggttgtgttcacaggacattctttcggaggcgcaactgcaattctagcaacagtttggtatttggagacatacttcatacgcaatccaaatgtttaccttgagcctcgttgtgtgacatttggagctcctttggttggtgactctatcttcagtcacgcacttgggagagaaaaatggagccggttctttgtgaactttgtcacaagattcgatattgtccctcggattacgcttgctcgaaaggcgtctgtagaggaaactttgcctcatgttcttgcccaattggatcccagaaattcttcggtccaagagagtgaacagagaataacagagttttacacatcggtgatgcgagacacatcaactgttgcaaaccaagctgtttgtcagttgactggaagcgcagaggcgtttttagaaactctttctagtttttatgagctaagtccttatagaccagtaggcacttttgtcttctctacacagaaaagattggttgtagtgaacaactcagacgccattcttcaaatgctgttttacacttgtcagtccaacgatgaacaagaattgtctgtgattccatttctaagcattagagatcatcatggctatgaggaactggtacagtcgatgggaatgaagttgtttaatcatttggatggagaaaactcaatagagtcttcgctcaatgaccttggagtggtaagtctctctctctctctctctctctctctctctctctctctcttttcatactgtgcagctccatagctccattcttgcaatcatttaaacccttcagagtgtttcctttttctgcagagcacaagaggcagacagtacgttcaagctgcattagaggaagagaagaaacgagtagagaatcagaagaagattattcaggtttgtggttgaaaagcttgttcatgaataatgcaggtacgtgcttcgtctgtttgtgtctaacaacataaaacttgttggctctgtggtttttaggtgatccagcaagagaggtttttaaagaaactagcatggatagaagatgaatacaagccaaagtgtcaagcccataaaaatgggtattatgattccttcaaagtttcaaatgaagagaatgacttcaaagcaaacgtcaagagagctgagttagccggtgtttttgacgaggtgctcggtttattgaagaaaggtcagcttccagatggattcgaggggagcagagactggatcaatttagcaactcaataccgcagattaattgaacctcttgatatttcaaactaccatgggcagttaaagaacgaagacacagggccgtacatgttacatggaagaccaagccgctacaaatacgctcagagagggtacgaacatgatatattaaagccaactggaatgatcgcaaaagatgtgttttggagcaaggtaaatggtcttaacttaggattacagcaagacattcaagagatcttaaagaattcgggatccgagtgcggttcatgcttttgggctgaggtcgaagaactcaagggaaagccatatgaggaagttcaggtaagattcaagacactagaagggttgcttgaaggatggatcaaagacggggaagtagatgagaaggaaatatttctggagggttcaacatttagaaagtggtggaatacacttcctgacagtcacaaaatacatgctccgctgtatcgacgtgagcgtatgatggatgaaacaagagctacctgaaccttaaatggttcgattattgaaacacttgcttcttaatttgtgcaataagaaatgtttatcaatctggtttccacttcacgatgatcttagaataagaatcatgttgtatgatcattgtgaagtaatgtaatagctctctattctaatgtcaaatttggtttccactttacaatgatcttagaataaatacattattctaaagcctaaagccatctcgaatagcatgaaccagtaacaaacaatcttccttagtgttgacagaaggaaagaggaccagaatgtcatcagaatagagcctgaggttacttcaattgtttataacattactaacctctatacctcaaaacaagtggctgtgcaaacgctccaagttctagctactacataaccaaagaagaaaacgattaaaacacaaaaagtaatttgaaacttgccctatgcccctctgtatgctagttagctcgatatgaaagtttgactcaagtatgtctcctaaacacaagtaaataaaagagtaatcacattaccaagacgttcctgttagatttgcgttccaccagaatcctgcatcagtataatcaactcaaggatgcataccatatagctaaggaggaagtagatcattcacaaaagaatcagacaatagaagtaatcttcaactctttcgcgcgaatgtcaattttatatataaccaaacttgactgtctatatgctgtatttagtcgctcaacatagaatcaagtagaatgatataacatctatggccaccttaaaataacagacgacataaaatgatacctttagagtattacagataagcaaggttctcgcaggctatgagaaagagacttattgcaacttttatgtatttgaaattcgtgtaccaccttatgtactcacacaccactctacataaccaccaccaccaccaccacatgtttcagatgaagaagagtcattgacatagaagaacatagaacatagttctcagttgccaaaagacaaattcctatacccatatctaaagagttttaaagacaggtgaaaaacgtagaacatgcgaggaaaacaatgaagaagagagaaaacaaacagacacaggccgagaaaagccacacatcctttcttcatgacctgcaaaacatgctagacgaacgagcaagccgaatagtcagaccaccaccttgaacactagcttcaaacttgattgtgttcctttcataaggctttctgcaaccaggacaacgcccatctccatcgcatatcgtcttgtggcagaaaaggcaaagccggaatccacaaggacatggcaagaaatttgagtctgttaagtcaagatcttcgtagcaaatagggcacgaagatggcaccacagtcacagaactaaaatgcaaattcatgaccggaaaactacgctgcttttccaaattaggcagaccctgaggacggagcttatcgtctggcctccacgcctggttactcttttgctttcttctctgagaatccgnncttgcatcccttaaaaccacatcagc

SEQ ID NO: 24317 - DNA, 1285 bp, Arabidopsis thaliana landsberg
tgccctttcctaatggccatttttaaaattgccccttctaataaggaaaataacggtcttacccttactgaataattaaggttttcctttcattttgacaaacctcttcgttttcgccggcgaatctttttctctaataaaactcaaattcgccaacgaattgttctctccgacaaacctcaaattcgttgacgaatagatctctctaacaaacctcttcttcaccgacgaatagatctctccgacaaaccttttcttcgccgacgaatagatctctccgagggaacaggaccaactcgttattgcgtcgcaaactttgcgacaaatatttccctcgcaaatttgcgagacaattgcgaggaaactgcatggaagtcatgattccccgcaaaaacgtcgcaaatttgcgagggctttgcgggaaactgagttcccccgtaaattgcaacgcacttgcgacgataacttattctgtagcaatttttgcaacagagttgcgagtcttcgcgggttaggtgaacacgttataaatttccttactatttgttctatgttttggttatcatttattgtaacattcgttagttctattattataaatatttaaagtttagaaaactaagacaaaatgatgtttaatttcataggacggggttatatggttagaatgatttgggtcgatataaatacgagatgatattgtacaagtgaaatctaagatataacaatcaaaaaggagatttgcaaaagtgcctttttctaataacctttgcaacaatgccctttcatgatagccattttgaaaattgccccttttaatgtggaaaataacggtctatccctttactaaataattagggtttcactttcattttgacaaacctactcaaattcgccgacgaattgttctctccgataaaactcaaatttgccgacgaattgttctctccgacaaacctcaaattcgccgacgaatagatctctccgacaaacctcttcttcgtcgacgaatagatctctccgacaaacctcttcttcgccgacgaatagatctctctgagggaacatgaccaactcgttattccgtcgtaaactttgagacaaatatttccctcacaaatttgcgagacaattgcgaggaaactgtgtgtaagtcatgattccccgcaaaaacatagcaaatttatgaggactttgcggaaaaaagagttcccccgtaaattgcgacgcacttgcgacgataacttattctgtagcaatttttgcgacggagttgcgagtcttc

SEQ ID NO: 24318 - DNA, 496 bp, Arabidopsis thaliana landsberg
tcagtccagaaatggctcaagaatatcttatctctatcagacaccatcattgagggaaactcgtgcagtttgattacctctctgataaatgcctctgctactgtctttgctgtgaaatgggtgttttaatgcaataaagtgaccatatttgctcaacatgtctaccaccacgagaaccctcttgagactggcagtccctccacgaagtctaaactgatgtcttcccaagtctgttgaggtatcggaagaggagctaataatccagctggagagagtgttagaatacttgttctcttaacatacttgacagcctttgatgaacttaacaacatcacttcttatgcatgtccaacacacctccttagtcaatcgtttaaacgttttcagagctccttcatggcctccaacagcgcttgtgtggaacgaaaccagtagttttggaatgaagggagttactacaggtactacaagacaacctttccgtaaggcacaccac

SEQ ID NO: 24319 - DNA, 1570 bp, Arabidopsis thaliana landsberg
acatggcttgaggtgttgtgtgatctgttaggtgctacgtcgatccagattggccgggtacaatgcggcgtctcgtatcatcactgggtggatagagacaacgacattctcttacttctcaagctagtgctacatacaacaatatataccatgtttggcgagaaaggaatgagagaatccacaacgataagagatatgagatatgatgaaggcctccaagtttggtttcagtcaagaagctaatcactaaactcttttcaaaaaaattctaaactattctcagttctaaatctcaaactcaagatgctaaaaaagttatttttcttttgaatataatttcaaattattttcaaaaaaaaaaaaaaaaaaaatccaccacggtctagtcacacgacagtcacctcatccgcttgatatttaaaatttctttgctctaatacgtacaaaattgctttcttccaacgtatgaacacttgctccaacgatggttccacttgtttggagctcgttaagaatgacctgaggagatgtagagacctagatccagaacctctaagtaattataaaaaaaaacaattgcatcttcttgatgtaatattttctatactatgtttttcatgtcatctgattttactttcaagatttagttactaagcttttaaataactttttttgtttgaataataattttaataatttacctgagaatacctcttattatttttttaatcagtgacataaaaatgtatttaatttttctcctagactcaatatattattaacctttgttattatatttaactatagaaaatttgaatttatttttgataaaaagcgaattcactatattttttgtttaaaaagatgattcacctttgatggcttggataatcaaagacttaagaaacgactcttggactacacggcctaaatgtttttgactacacaattttagaccaaacgaattagacaaaatttcctaaaggtaacataattgttgcacataaatgttggatctgcatttaactgcttaaatgcgacacagtgtacatgtatacgaagacatttaaagataacataacttcttacaggtataggctagaagatgaaataattgttattatttttttatttataaaaagatgacataattgttgcacattttgaaagaaaaactgagatttttggcattttagacaaaacttcctgtgcacaaaaaaaagaaaaaaaaaaaaaaaaaaagaaacaaaaaaaaagacaaaacttcctaaaggtaaagttttacaaagtgagcttcgtggagttggtatacttttcaagattttttgccctctcttttggtaatttcctgcaagtgagtggtggaagaaaggaagctgcgtggagtcccaatgattcacattgcagagaaacactcttaaaacaatcagcttaataactcatgtctctttctctcattctaaagatttaatcatctttcagaaatcaaatctttgtctaagttcgacaaacaagcacatattatttgttaaaacctcatatatcccccaagacaatgtctacaggatgt

SEQ ID NO: 24320 - DNA, 2700 bp, Arabidopsis thaliana landsberg
aaatgccaggttatcgctgtttcttattcaaaactttctctttgtttacggacttcgaatataaggctctaggtagctttttcacccagagggaaaatttgacaactagataaatacctctgctttttagattgtttaaaaggtttcagtttgttgcccggcctgttcttgattttcaaattcctgcagaagtttttgtttttcattgagattagcggtgtaatacttgtccaattgttgttgttcgtttttggagaatctagtggcacaaagtgagtataagtcttgtctcatgttttctggttgaaactgcagatgggaggtgttttctatttgaagagatcaaagttattagacgtggaagccgaactttggtgttacaccagttcccttagttaggtttcaacggttgctcttgaaacttgaagatgacaatgtctccaatcatagctacatttgttggcgaacttctctggcctccattgaccctgaaccacatacgttaggtaccaagaaggtctatcgtgtgacatctttcaggttcttaaggagctcggtatagagaggcaagaaagcaagaatcattgaggaaccatacccaatactgatctttagggtgccaactctagaaaaggacatttaaacttatttttgttgtagcctcggtaattgtataagttatacacaaagtaaataaaatgctgattgtactagctaataagaccattccttaggaagaaagatttttctggaatgagaggagatgatggggcatggcttgttgttgagtttctcttgtgagctactcaccggtctctcaggaagaaacactccagtgccacgtggcttaactcgtgctgcacctttatcatcaccatttggcctcaccatggaacccttgtggttcaatgcataccacattcttggcttccgatcatagtagctacctactcgattactctacagattatgtaacaaagattgattaattatacatccttagcattaataacaatagttcatgatgttataaaagaatagaaacctgtggaaatggacgatcaagaaagagttcattaaaaagatttgaaggtaagagaaacaatccttcctccacaccaaccacgatatctcctttgcaagacatgttgaagactaatacaaaactccctccaatgcatctgtatatttatatgttacttaccccaaacattcaaagggggtaataagggtcgggtcaagtttggtgaacctctcttgtcatgtggagtggtggtggtggttgcagtttatggtatgtatgtggcttctctctatggtttagctcggcttaaaccacaaataccagatttgtgtgtagttgaggtagttatgaacattcttctaacccaccataccaaccctcttgtattcatttgacaccttaccccattatagattttgttaatggttgacctaaattattcaaatcaaaatgtatctatgtttgctttgaaacagacatgacgaattaaggatatgattaaataaataatgacattcattttgtagcttggattattcatttcgtcagcgttgagactagagataaccaaattttaattattcggtttatgaatcataggaacagaaatgttgtcggtttttattaattaaaggttttattggttttcatttggttcggttgagttagggttgtttggataagggaacattaaaactgaatcagtttagttgcactttggttttgttttcggatcagatttttttttttatacggtttcgattcgatttgaatcggttaaaccggatttgcttcgtttcataaaaattaggagataaattcgtgcttttgccttcttgtttcgttgcacaaaaaaaaaaagatttgaaaaatcctttgcatgtcactctacctctcgttcgtcatcgttatgcgttacagcacaattctacgacggggatccggattcacgttcgtctcgtcggaacggatgtgagcgtttttttcatcggattcagtcgttattcgattgatatggtccttcatgagatacgcccaccacatgttcgacgaaattcctaaaccagctttcttggcgcacatttatgtaatagaatccaattgttatgtgagctgtttggagaacctaatagctaatgagattcagcggcaagtgggtaagtacttgctctttccatatcattgttgctgacacattctgctttatagttcctctttgttcaatggttattattagggcctaaaggttatcactttcagctggatactagagcctacgcttaatactctgtgaatcataagaccaaatgccctgttgttgataaaatccatccataactgctcttgaaacttaaataccctttaaagatgtgttctttttcagttttcacttcctgcagttatctcttgaaattttttggcagcattcagctagtgaagaagttctctgttaaatccgctatccatattctgttttcttgctgcatttgtgagccagtggacgtgaaagccaaggtgcattgcaattctagctctttttttttgtattttaactgtgtataacaaatgtagtaatgggaaaactgtaaaaattgtagggaaaatgcacttgacaacttatacactaaaatcaggtttgttctatgatagttatcaaatggcatatgaaacagaca

SEQ ID NO: 24321 - DNA, 1109 bp, Arabidopsis thaliana landsberg
ccttgtcatcattggtttgttgggtaaggaaacctaacatgtttatgtcttcttcttctgcaagtttttgttttgatagatttaaatctaggttttgttcgtgaagaagaagaagagaaaactgtgacatggaagggttttgaggactaattacccgtcaaaccgaagagagttacatcgagattttagcgtctcgggatacatcttggtgcaaggagtccatagaattttacggtttatcaaacggaggtatattgcattcacaattcatctcgcaagttgatgacaaatcactggttctgttttcagaaaagctaagttatttcagctaaatattttatattcaagttggagtttttggaggatatttccggtaatacctaagccgcatagaaaatatctatggtggtttttgatagaggaagtgttagggaagttatctgagccgtcaaagtcgtcggaaaaggtaaatcataatcaccacgacgattacttcttaagcaagaaattgctgtttctgccaattcctgaaaccctagatacacagattcaatgtgtcatctttagatcttaacaaattctaatcgggatgaattttgttgggcagtttcgtggcactatagggttgagaataaacgatgggattaagaagtgaacggtccattgtgaagttactagcgcagtttggtaacacttaagtgaattgtcgaactctcgctgattattacatatcatcaaatttttctccctgctttatatcatctaactagctgatttgagattcacaatcttgattctccaggttgctctgtatattggtggtctttatgtttgtggaaaggttggattttgaactcttattcttgcaaacaatgatcttagcttttgatttgaagccattgtttgagttttcggtcttggtaatatacaacaatgttaaaaatatgcaggttggattggaatctgtaatgaaaatgggagtagagacaagagaactgttcttctatgaaacatttctgtattataactcgctccttcttattgtaagttactgatggtctggctctaggtgttaattttggctttaatctcgtctggagttgattatg

SEQ ID NO: 24322 - DNA, 798 bp, Arabidopsis thaliana landsberg
tttaaggaaggttaattttgccaaaaaaaatgtttgaagtgacaaaataattttcacaattaaaatcatgtcgattaataccccctgaagggtatttccgtcaatcccaattctaacaataaattcaggagtatagaaacgtaaattcaagcgtgccaattataaaccgtcgatcataatctaatccaacggcagtaacatcgatccgcgtgattgtttattattggataagaatcactcaaccgtctctacacagtatatataataaccaaagagcgtcctcttacgcttatcttaatttccctcgcattgagaattttcaactttttctatctctcttcccaaatcacaaatggcgggtcgcggcaaaactctcggatctggcgttgctaagaaatcaacatcgagaagcagcaaagccggtctccaattccccgttggtcgtatcgctcgttttctaaagaacggcaagtacgcaacacgtgttggtgccggagctccggtttacttagccgccgttctcgaatacctcgccgctgaggtaattatccccttctctccctatatctctttactctttcgatcttcaatttcgtaaaaccctaatttctaaattggatctgttgggttgataggtgttggagctggcgggaaacgcagcaagggataacaagaagacacgtatagtaccaagacacattcagcttgcagtgaggaacgatgaagagttaagcaaacttctgggaagtgtgacgattgcgaatggaggagttttgccaaatattcatcagactcttt

SEQ ID NO: 24323 - DNA, 503 bp, Arabidopsis thaliana landsberg
tctatcaatcaaaatcgagataagaattaagaatactcactttccccaccaaagttcatcctcagtagtctcatctctaacaacatgcttatctctcgattagtcttagcaccagaaagtgtcgccaaagctccattagaagtgataaacgaacctatctcatacttagaaatttgctcataaggctgtacgagcaacgtaatcacaaactccatctattaaattcgttgcacaagcactgataaatattctgtatagcaaaacatctctagagctatgcataagaaataccttgctatatgagaactctgaaggattatttagactgaggcaaattgtggttgtggtaattgttcgatatgagatggttatttatagaggagtctatcactgcgatggcttattgttatgctgataggatgagagtgcctctctgctgatgtaagaagaagaatgcgttcagaaggaagaaaggcaaaggcttttgagaagttcttgggaaa

SEQ ID NO: 24324 - DNA, 1702 bp, Arabidopsis thaliana landsberg
  unsure (1)..(1702): unsure at all n locations
tgcttactgtcaaaagattctctttgtcgttaggtataattaaagtcatgaaggccttgttgtcttctatgggtttgactttgagatgctgcaagaaaatatcaaagttcggaagggtgttggattaagttaactacattgtaaaatggaaacagtgaccgggtgctaaaacagactcacatctttaaagaatttcttcactggctcgcgtgaatccgaaccagcttcgccattgtggttgttgctttcaacaaagctaatgttagcaatgaaacctgtgccaaagcgnnnnnnnnnnnnnnnnnnnnnnnnnnnnnngcggagcctacccttaaccattatccctattcgatcacttaagatatcagcttcttccatcgaatgtgttgttagtataatggcacgacctttcttggtttcctgtatgatatcccacacatgtctcctcgtgatcgggtccatgcctgtagtctgtaacccatgtatgacaagtacgcatgagaaaaggaagagggacttaaataaataaacatcaacagaataaatgttacatacaggttcgtccaggaagaccagctttggatcaccaatgagagaaactgcaacactgagtcgccgtttcattcctccactgtaacttcctgccctgattttccctgcttctgttagttttacctccgccagtgacttctcaaccatctatatgacgagaaagtaacattttaagcgacaaatgaggaaaagtattcttgatttgaagtaaccaaccgactaaccaaccgactcatttctaccatttgggtacataccgagttgattgatgaaggtggcaaccctttgatgctagcaaagagtttgaggtgttcttcaccagacaaagcatcccaaagaatatcaaactgtggaacaggaatgtcataaatcattgaaagcataacaaatatctgtaactaattaaagcaaatgccagaagcagatagcaacaaaaaatggctcacctgaggacaaactccaatcattttacggatgttggacataccaacagagcttcttatagaatttccataaatttttgctgttttaatttagtcaatcaaaatggatcttattagaatagttaaatttttccaaaatcttgcttcattcagactgaaacaaaaagcttttcttaccatccccaccagtgactggatttatgccagtcaaacaactaatagtagttgttttccctgcgccattaggtccgagaagacaaaacaactgatctttggcaatattcatccacaaaccctgaaattttttcaatgaatcaatagttgaataataaatgtaactgttgtaacacttttatctcaagtcacatgagctaggaacatctttggcaaaagccatacattatcggaaagatttatccatcggaagataatatacctttacagcatgaaaaggcgaagttttggtgcatttgcagcatccaagctttgttgttccaggatatgtctttgcaagaccatgtatctgaactgcaatgttaggatcaactcttccatccattgcttgttgtttaactaaaatctcctcttcaagcacatcttcgtcctctggtgtaatatgctctactggtggaactgaaccaatacagctacagatgctcccttcttcaaaagtgtagaaaaacatgttttaagttataattagttat

SEQ ID NO: 24325 - DNA, 1084 bp, Arabidopsis thaliana landsberg
agtgagagaccataaccatcttctagcatacctgtgaatcaccatagcttgagccgacaaagacaacggcattgtcaaggtacgatatagtcgatgcaatagatgtttcacccaaaagctcaatttttaggccagtgacccttcagacacaaatacaaagtaaataagttctaaagagcttttaattatttcgaatatggatggatgtaagagtaagcacacatgtacactcacttttctttctcgtgcgttataacaagcagatgaatcattccagcatggtcaccaagaagatatctagagccatcaacatcaactcttccatatgctttagtgatggactggatacgaaaaatgaaggtcgcatatcaaactaagaaaacaaaaaaaaaggagtacccgcagaaatctcaactctcaagcaacttgtttacaaaagcaggtgagattacgttgaaagaacttacaggtcttattggtattgctttgaatgcactagcactgcaatagacaattgtttcttccccaatgatgaggacgccacatagaggtgaaggtacagggatcaataagtcagcaccattgtcgagattgttctgtgaccatggaccttcgacaaagttcttatcctttagagaaacttcatatgttttgacatgacgagcatctttgttgtcctgtaaacccaagcattaattagttcacccagcaaacatccttgagcacattgcattagcaaagtaaaccaagatacaatttatttaaaaaatacagcagagctaatttgctcaattgctgccagcttaccaacagagcgggtattaagaaagaaaacagattcctttgaacaatattgcttacagaactaggttcgtaaatgaaagaaataaatatatatgattatctgttttccatagcatatccatttaaatatgtatgctaacctgataaagtactgcaattgttggtttcgtgcatccatacagaaacttgatatctaggacctgcaactcctccagcctgaaatgaaacaaaaaagtcaaaattagattcagtgagtgttgattgagtcaagtagtggttt

SEQ ID NO: 24326 - DNA, 2497 bp, Arabidopsis thaliana landsberg
aaacttcaaatccttttgattttattgctgattgctttaaattttttcacaaactccaatattcaatgaaaggcaacagttcagtgaaaaaaaaaaaaaaaaaaagtgggaagagcttgcctactcaatgctatctgcaaatatttgcgaactttagttcaacatcgacttctttactggttagagatccaggattttgtgcctttgtttgtggctatagcgtttaaaagaggctttgagaccagcttattactctgaacgacccgtatttaaggtaaataccatagcacacataccactcacaagcacaagcttctgtgtattctttcctaatataggacacatgtgaaccataaactgaccaaacatagaccagcttgagtaacaatttatccaacaattgaattctccagcactcctagagtttggatgaggtatatatatatcagttcgttgtcgttgtgatatgataggccgagccataaatcatatagacagaataaaaatgtcaccaaagatttacaacaaatcctttacattgttagaaaaaacccaaccttatttccaattataaaactttacatttgaaagaaagaaaaaaaaaacaaagaagaactgagaccagatcttcaactatgtcagaatcttacaatatggatcatcataataatacacaaaggttctttagaccaagaacctgttcagattagagagcctctacctgagtggatggtggctcagtctgcagttgatgcattaggtgttgtgaccagtaagcgtgtgccttcaaaacacggtccagaagttcctgtggcaccggctctcctctccgctgttgtggagatatccttgccgtgtggaccagcgtcttccacttatcctacaaaggcaaagactcaataccaaactgtatatattaaggttaagagttagttaaaaaactaactaaccttgagatcaacataggtacgatggtctgcgtcctcgaaagcacgaaccttcacatctctccacctgtagttttcaaacacattttgtcagcaacatgaagaagagaaagtgctatttctttgttttgtaccttccggttccgagtttctcaacggcttggaccagtgcttctacttcagtaactgagaaaggtcgacgaattctgcgttgtgcagctagctgctgctcagtccttttaaacttacggttaggaggccgaggagccagcattgctgctgaggcaacaggaatcaaagctctagaatgatcacttgtgcctagtttcccaaatgagtcagctggggatggttctggctcatgactagaatccaacgcattgtcgtggcataacgtcacatcatcacaggcatgatctgacagataactggcagagagaaaacaaggcccttaagccgcaaaagattgatttttatcgatgtggcatctctgagagtgaagagaagagtgaacctggataacagtggttgaggggtggtctctaagctaggttcaaggctgaaaccaagagaatccaagtggttgttctcctcagagatcccagtctgaagaagagttttgccatcatctcggactttctttccttgaaccatcagcccgactcgaagtccatcacccagtatggtggtcactgcttccatcaccatccgctgacaaccccgacattacaaaaatacaaatataagttcttcttgatcaggattttcagcacaactaggttttgttattacaccttcaaggagccaacagtagcagtttctggaatctctacgaaaagctcaggcaccctaaaagacttgatccgcagcttcactaaagagtaacaaaacaaaacaaaaatatttcaacgaaacaataagcgaacaaaggatagattgagacttgagactccattaaattaccatgatgatcccttgacacaaaggacgcatttcgacttttcatggaagatattgttctgcttcctgcggatgaatttgcaaaaccgtgttacaacagcaaagacttacaacatactaacaagagaatgagaagattacaagttttggacctttatgagtctttccttgcaaacggtaatcatcagagttcgagtcgtaaacactgtcaaagtatttccttttcttgatgggataactcctctgatgatggtgcaagtaataactcctctttgagcaataccatggctttgcatctgcaaataccaaacatcaaatcacaataataaagatagtcaaaactaaaacaaaaggcgattttacctgtgttgttcttcgaacctcctttccaatgtctagatgccaatatcttcctaattcttctgtctccaatacgaggcacaggcctagtcatacgagttcgaatgtaaccagaaaagttttcatcatcatcatttctactaaacaaatttacatcatcccgagactcgttgggactaccgttcccacatgctcccacctcggtactactgttactacctatactagct

SEQ ID NO: 24327 - DNA, 2309 bp, Arabidopsis thaliana landsberg
aacgtaaaaatctgagtcttctgatatgactaagcaagaagaggtggagatcaacatgcttttatggtcatcagtcatccagttatgtatcagaccgaccttaaagcaccggcttgcaaagaatcttgcagagacgtgacagcgccgtcgtagtttaaaaaacccatgaaccaaaactcatgattgtctaccgaaatcacctgtatgtacttctctgcaggattgactatgctcgctgatggattcactgctttaagttgatgtaatggaattactacctatttaagaagaagacacaaagtgttcatcaatcatcaatgtagcaaagcttattacaatgaataagcaaatgcaatcgtatcggattggtttcgatgaaacaagagatgagaagctgatgcaatcatgttattactatcacaaaaaaaaagtccatggatttatgattccgttaacaagtccagattatttttctatccaaatgaatcactctacgaaggctccttagttgatgctactaacaaattataacgaaacattgtctcaagcattgaccagataaccagccaacagatttcgaacagttaatgatcacaaaagtaataatatggtgtcttcaaaatggctataattctgaaatgaaaggtgtaggacacattaccttgtaatagctccattcggtttgatcaccgtttttataggagagagggttgtcactacagtaagcaagtttggcactggatatatatagaactcccataactgggccagctgatgttgacaagtaacatgcaaaagaatttagcaactgttcttcgggatctgtctcaaaggtttgtcggaatatcttctcatatcctccttctgcaaagacctttgtactctgtgcaattcttcccattgcagcatccgcaaaactcggagcagttctcactgattaaaaagagaagattataagatatatcaatcagatagatcttgaatgaaaatgctagcgaatcaaacaagtaaagcacatccaatcaaggaagagatgaattgcgagttcacacacaaacaattgaaacgtatattgaatcatgttatttttctcagtcacccaaattcaaactttacgtccatactatgtaaatgcaggcattagacattttccctcaaactccattactcaaacacttacccaggaactcatctctatccataacacgaccatgtcccaagctgaaactcatatccacagttctagctcctaactcaccaaaggctgattcttcttttttttttaatgttcatccaaatgtattatctaatccaagttcctaaaagcaatatagcaactctatctgttccggagcatctattcaatgtttcacttctttaacaaaagatctactatatttgagcgcaaacatccattccaacaatgccaaacatagaagatcgattcaaacatgatatgaaatacaaaaaaactggagcagttctcactgactaaagtagaagattgtaagagagatcactcaaacgaatcctgaatagaatatgctagagaagcggacaactaaaacacacccaatcaaggaagacatgagttatagagttcacacatgaacactctaaacataaatttaatcgtgtaaactttcttaattccccaatttctatagttttagctagtcatcagacattttccctccacctccattgctcaaacattcaccaaaccaccaagaacatcacttgattagagtggtaattcttcagtccgcaaaaaggctttttgatctcaaaactaggagctaattccctactacttagactacatcacgaatgaccatgtccgaaggtcaaactaatatccagctcttaattcgtcaaatggcgtttttgattaatgttcaccaaaggcattaaaattccaagttccaaagaagtaacatggcaactaatacctaatccagagcacctaatttcaatctgatattttatttgttaccagacaatctactaaaaacttgactgcaaacatcacacagagaaaaaacagctttaaggttattccgactctcttataaacacttgtcatgggtcaagctacaaagtttgacagactgaaactgggagaatcttcttgttcaaatccaagacagagattttttaattactgtgatcacaaacttgacaatatcaaaagatcatcctctaataccgagcagatgtggtattaatcttggttaaggagacaaatcgaaggcaagagatccacgtagaacaattgtgattctggactatttaggaagataaaccta

SEQ ID NO: 24328 - DNA, 1482 bp, Arabidopsis thaliana landsberg
  unsure (1)..(1482): unsure at all n locations
cacatctggcttttatgttggcttagttggtctaacgaagctttctttttatttttagatgtcgtgagaagcagaggaaagaagctgctcgtcttcaaacagtgaacagaaaactcaatgccatgaacaaactcttgatggaagagaatgatcgtttgcagaagcaagtttctaacttggtctatgagaatggccacatgaaacatcaacttcacactgtaaagttcacttttcactattttctatctctaaaactcaattctatgaagcattttgtttgaaagttgttatcttttttttggaatgtaggcttctgggacgaccacagacaacagctgtgagtctgtggtcgtgagtggtcagcaacatcaacagcaaaacccaaatcctcagcatcagcaacgtgatgctaacaacccagcagggtgagcttttcttgtctactctataactctctaatgaattctgtttgccactctgtgacaacctaaatggttcttttttgtttagactcctttctatagcagaggaggccctagcagagttcctttccaaggctacaggaactgctgttgactgggttcagatgattgggatgaaggtaatactttctggcctgaatactcttaaagttgtataatctgatttctgttctttagttgtgtctgaagatgaagttgtttatgattatttgatgaaccttcattgctggtgtagcctggtccggattctattggcatagtcgctatttcgcgcaactgcagcggaattgcagcacgctgtgcggcctcgtgagtttagaacccatgaaggtaatggngntttcttttttctttaatcttgtgttgtaagaagcggaaattctacgaaggcaatctaaacttcaaatactgtgtaggtcgctgaaatcctcaaagatcgtccatcttggttccgtgactgtcgatgtgtcgagactctgaatgttatacccactggaaatggtggtactatcgagcttgtcaacactcaggtctgtttcataaatccatgagtgttgtttttgttcctttaaaatgtaatgatcattattcatggttggttatcagatttatgctcctacaacattagcagcagctcgtgacttttggacgctgagatatagtacaagtctagaagatggaagctatgtggtgggtattaggacctggttttgttcatctatgattctatttattagatttgccttatatttgcttttttgccttcaggtctgtgagagatcactcacttctgcaactggtggccccaatggtccactttcttcaagcttcgtgagagccaaaatgctgtcaagcgggtttcttatccgtccttgtgatggtggtggttccattattcacatcgttgatcatgtggacttggatgtaagcatattggatttgtatagcacattangtttcgtaaaagccttctatttatgttgattgatacgtttttttg

SEQ ID NO: 24329 - DNA, 855 bp, Arabidopsis thaliana landsberg
gattttcacattccttctatttaattcgaatttcaaattgccatttctcagattccggtgaaagaaaaaaaaacctagaaaagtgttttctccgttttccaatcatccatgagtccggacaataaactgcttccgaagcggatcatccttgtacggcacggtgaatcggaagggaatctcgacacggcggcgtatacaacgacgccggatcataagatccagttaacggattccggtttgcttcaggcgcaggaagccggagctcgtctccacgctttgatctcttctaatccttcttcaccggagtggcgtgtgtacttctacgtttcgccgtacgatcggactcgatctacgctccgggagatcggacggtcgttctcgcgtcgccgtgtgattggtgttcgcgaagaatgtcggattagggaacaggattttgggaattttcaggttaaagagcgaatgagagcaacgaaaaaggtcagagagagatttggccgctttttttaccggttcccggagggagaatccgccgccgatgtcttcgatcgcgtctccagtatgtttcacttccttgcttattcgaaactttctcatatctcgttatctatatgtacattgaatgatctgagatgatagtttagttaatttagttaagctaagcatggatttagatcattctctatgatcctgtcctgtagaaggagcaaaatttgaaggcttttggttaagtagcagaacaatgacattaaatcaaatgcatctgttaagaggaattggttgatatctgaccttagaacccttagatcgattggatttgtgttgccattcatgcttgatttcaggttatgatcacag

SEQ ID NO: 24330 - DNA, 1884 bp, Arabidopsis thaliana landsberg
taaaaaatacaaggtttaaaagtttaaaagggtttaaacttacaaagtttttaattaatatttgggcgaaaaaaaactgggggggaaaaactttttgcggggaaaaaatgttggaggaaatttttttgggaaaaaaattaagttccaaataaatgttccataaccagaaggtattttattcttttgtttaaaagaaaaggtatgttaaaaaatgaccaaaagaaaagggtattggtgcaaaaaaatagtagaaaaagattttttggcaaatccacccatgatattattaatttagcaatgagaaatatttatcaacgacattccggatctataaaagtttataatattaataatgtagataaactctataaaatatatccatatataaaaatatatatgtctttatattatgagaaccatttgaatgtaaactttaaaattgactcaaattatatgtctttctaactcatggatgacctttaacataaacagttggaagacaagagggaacccgtcggttgaagaatgagactggttgaacttggcaattagtccaaagagattgctaaccttctaactgattttaaccattcgcattgtgagaaggaaggactcacgcccccaggaatacgcctcaaaagtctccaaatccttgactatttcaacaacttgcatggaagctttaacaggttgggaactgcggatcaatatcccttccacgatgacgataacagcgagacaaagccttctacagttttccatctcctcttctttcgggttcatcttgttctttcttcaaccattcaataatgtccttgatgaggacgatagggtgatccttaccgatgagcatattccagtaaagatgtcttcgtttgatgggttgctccgactttaatatatttgccggttggggggtatggccgacaattcaaaccagtcagaatagttaactctcttaatgaaaatcggaatggctgatcggcaaaaataaaccaaagtttgtattttttccttgtgtagagccctctacacaacatctgatggactaatttatcagaaaaataacatttgcggacagaaagctgaaacagcggaccaaagcatgaggcgctaagataatttaactttcttgtcccatctaggattttgacgagatcaagaagatactcaggctttgagtaggtattaatacgaccacaaggcggatagcaatcaatggcgtagagccttttgggaagtctatccatgtttacttcaaggataaccagtcttcctggaggtcaaagagcgtctcgacggatgatctggcagagacgaaagtatcatcatcatcttcgaacgataccgttcgcctgaaactgccaagaggggacttttgttttgatttactcgtggaggacctcatctgcagcggagagaaacaaagaagaaaccgaattggttaatccaacaaatcaaaagaatcacacagaacgagaaaaaaactaataataattagggatgaaatgattaaatcgggacagatgagcactactaattaattatgttctacaaactgactttggatgaacaaaattgggggatagaatcgatagagcgttatgtgcagagaatcaaaaaatatttacaagttataaaatccgatgagagtagacaacgaagaaagagaaagagaaagtgagagagagagacgaaaatctatgaggggagataacgttttgtgctttacccgcacgattcctagggaagagagataaaaagaaaatgaaatagttcaggtaggcgcaaaaactgctacaaaccgtgagggtaatatggaaaattcaagtcggcaatgtggtatgggttggaaggagttttgaaatgttgtagattttaaaa

SEQ ID NO: 24331 - DNA, 1150 bp, Arabidopsis thaliana landsberg
  unsure (1)..(1150): unsure at all n locations
gctactttaattaagaatcacgtgctttggtcctaccattctataattctgtttcctacgtgcataatttttttactgtttagccaataacttttaaacatattggtccccgcatatcaattatatagctgattcctaactcatgtcaacctatttttaaatctatttatggtatttttaataaagagtttactttttcttacaacgattgttccggactttttcattttttttggacggcaagtatagctcccaaaaattgtgataaatgttttctccaaatttgttttactttttttttatatacttggcatttctaacaatgatttgataaaaaaaaaagtcttgtgaaacaaaactacggtattttgtaatatgtggcatcctagtcactttgccattttgttttaagttatgtaccatagttcaaaaattcgacaatttatttttctttttttaatactctacatcatcttatatctcttccacctaatcattcaactcgcatttttattgtaaactttacaatatttttgttcaattaaactcaacacattctggaagcccccttggcttagtggttgatcaagggttcattaatgtttctacaccaaaaagtctcgagttcgagttccagctattgcgatttattatcagattaataagaacaaatgtgcatgaaatctacaacgatgtacaattatagtcgttcgacaggattctacgcataaaagatattgaaggtgtccatcaagagcatggagaaggagaaggaggtgtccatcaagagcatggagaaggagaaggaggtgtcatatgtcgtatatctaacagggtcggaaggaattatccttggtagaatcgtttatgtaatagttttcataatttgcaatatataataaatctagacggcgaaaaaaaactcaacaccttaccctactaattttactcatattcattttttctttttctaatttttattatatgataattaatattatagattaattaaacaaaattattattgaaattcatttaacaagaaatagaatatttaaagatacaaaaaggtttatttgaagataatataaaacctataatgcagtttttttttgtgtcgaaacaanacgagactagtgtctgtttatag

SEQ ID NO: 24332 - DNA, 2752 bp, Arabidopsis thaliana landsberg
gtggtcgttttgcgaggttggggactcgaccaaattgggtggcggagtgtcggaaactgggttttttccgttaggtttgttgcaggtccggccagctcattggtaagagatttgcggcaggactcgtatacttcggccaatgatctcgttccggtggttgtgttgcaaagtagtgggccttgtatacgacggtactaatagatctatttgctgcctccgttccactgcccaaatccacctctggttctctttttccggtgaccggatttttcctgttttgtaactgtggacgattgtaattccgggcctaagcccaattgggactggacctttttttttaaaaaaaaaaaaaaaagatatctcgtttgtggagaacgcatgctagcaacttccctatctataaaatcagatttgcaccccacaaactaaaatattatttacgtacttgattaattcctacaatatagtcatttacaaaaataaccctccatttgatatttaagtcaaaatcagtcaacggaacgtggaataaattataactttcgacgctccgatcagattcatcatcatctctctctgtgtcgctccgattttgaatttggaatctcttagttaagttggaagtttgttctttggtcttttcgcctagttgttgttggatctgttttaaattaagccaaaaacctccgattagatcgatctcggaaccgtcgaaatacagttcaccgtatccgttgtttgtttttggtatatgtatgtttgagaagctcttaccatctttgtttacaagtctggttcttggtaaactttagctatgaacaccatcgtcgttgctcagttgcagagacaatttcaagactacatcgtttctctttatcaacaggttcgttcctaaccaaacttttcttactttggctggattctcacttttgggcttagataagcttaaggtgcagttatgtgtgaatttgaatttttttattttttttataaagatgatataatatgttgttgttttgaagggatttctggataatcagttctcagagttgagaaagttgcaagatgaaggaacccctgattttgtagctgaagttgtctctctattcttcgacgactgttccaagcttattaataccatgtctatatccctgtaagctttgcttactctcttaggcttctcttttttatctaacatgggactttgtctctaatcctccttcatattcatttttgagggtgtaaattagcttcatatattcatgacagcattttatgagtttattataaacattagggagcggccagataatgtggatttcaaacaggtggattcaggtgttcatcaactcaagggtagtagctccaggtttgtcacagtgaacactgctaaatttgcttttctagttttaagtgaccaaactacattgattttaatggctcagtctctgctttgtactcagtgtcggtgcaaggagggtgaaaaatgtgtgcatatctttcaaggaatgttgcgatgttcagaaccgtgaagggtgagtatattttttagcttgttgatgcaaaatgttattggatctctaaacttttttattatatgagaagctattcttctaattcacacacaaattgtgataatgatatctggcacaggtgtctaaggtgtttacagcaggtggattatgaatataagatgttaaagactaaacttcaggatctctttaatgtgagttttaaactttgcgaaaacctacttgttctgcttgtgtattctttttactgagccttttgctacttctcattcttctgtttctgttatgttatgttgttgcagttagagaaacagatcctccaagctggaggtacaattcctcaagtggatataaattagaccgatgcgtttctcgattatgcaaatgttcaaggctgatgacacaaatgaaaccgaaactcctctgtagttttgttgttgttgttatgttttatattgattaatgaggttcagcaacactgtccctggccagatatcgtgtcttgtttagactcttaattgagttctaagagtaaaaattgaattattagtctataaatagacatgtccatatgtattcctgtcacaatgcaaccaccatttggagcctttgttctgaccatcatgacttagaattctcagcattattctgaatctgatatactctattggattcatgattttgatttgagccgtaaagcatgcgggtactagttagcactttagacgatttcattatgtgtggattaatcaagaatgatttgtttgaattatggataacacgattccatggtctctttattttgttaacggtattccatggtctcttttatcaacattattgttatagggcttataagacatgattgtgacaatagattgagaaaggattgggcatgtcttgttaggtatgtatttaatataatgtccgaattacctcaaactaggaatgaaataaaaagaaaatgtcgaagaattatcaatagattgtttataagtggaataaaaaatgtgaagccatgtgtctatggtaatcactaggtggagcatttttttttttttaaaggaagagtatgtgaagtgaaagagactaatgaaacataaattgaaggcatggaggcgtgtaatgtaacaaataataacaaagcttttctcctctatccttcattttatcatatccatcttcatcatttttatttatctcaaccaagcttttaagaa

SEQ ID NO: 24333 - DNA, 836 bp, Arabidopsis thaliana landsberg
  unsure (1)..(836): unsure at all n locations
tttggacaggtgtaatcacactattagttcaactattaaataataattaatgtatttgttttgattaaaatattaatatttttttttttgagaaattttccttatttttacggatggagatggtctaataataacatccgattcgtacacagatgtatagttcaaaaaaaaagaaattgtcaacagattttactttcaaatcaatccaaaaagtcatgataagattcacgaggaaagataaatacctcgcgacggatccgatactttggtttcagtcaccgattagtcattagagagacgaccataaactctgaatggtttctttcgtcaagtgatggagaaataagagatgcgcttcttcaaatcacacgtcaccaaattcctaatttcttattggatagaaaatattctaaaatatttaaaagaatcgcaattaaattttttgtctcttctgtagagttttgtccgaatacctgtcaactaaaaaaaataaagggaataatatcaaaaagaacaaattgaaccgaaccataccggaagttatcaaaccaagtaacagttacatatttcaaactaagaaactgaaaaaacccacaccaacataacaacaataaatcaatagaaaatgctcanaagaaaagaaaagaatcataactcataagatgattgatgcacatatatcattctactaagcagagacgtagagaaagaaaataagagaactagaacacgaatgatatggaaaagaaaactcacaagaatttgatcaccgagttattcgcctctaatcacgtctccggtgaggactggtaactgtctcccaaagacgaagaaac

SEQ ID NO: 24334 - DNA, 2484 bp, Arabidopsis thaliana landsberg
cctaaagaagagaagtcaggaaagtaagttagacgaatactaatcagataactgtctctgcactaatgctaagaatagcaaagttttctctctctcttacataaggacttgtggtctaactaagaatcacaaagagtaacaacccatttctattattagttctattggaagcaatcaatcgcatgcatctataaatatgaatagccaggcatagtaagggaataacttaaccatcatctaccaacgaacataagaaagaaagaagcaaagatggcagcatacctgacgaacagagttttaatgtcttctctgatgttttttgtaatgactggttctttgaacgcacaagtggcagacataaaagcgatatgtggaaaagcgaaaaaccaatccttctgtacgagctacatgaaatccaacccaaagacctcaggtgctgatcttcaaacgcttgcaaatatcacatttggttctgcacaaacaagtgcatcagaaggtttcaggaaaattcaatctctagtcaagacagcaaccaaccccactatgaagaaagcatacacctcatgtgtacaacattataagagtgcaataagcagtctcaatgatgctaagcagagcctggcgtcaggcgatggcaaagggttgaacattaaggtttcagcagctatggaaggaccttcaacatgtgaacaagacatggcggatttcaaagttgatccttcagctgagaagaacagtggtgattttcagaatatttgtggcattgtacttgtcatctcaaacatgatgtgagagtgggattgattcaatctcccttcatcatactcattagacgattacattaaacagtaatgcataaatgttacatatataatcaaagaactttttttctccaacccacacatcaacaagaacctggtttcttttcaacttgttattccatataactcaactctattgataaaagaaactaagagacaacaactagtaatagacttataacaaagaggagtctgaaatcaaacactcttaataaactcatgatctttttacagatcaagtataatacaacagaaggaaacaaacaaacaaacaaaaaagagagaaattcacagagaaacatgagaacaatgcaggaaaactcaaaaggaatatactttattcaacatacaagatgcatacccgagaaaaagatcaatgatgaaaatgctgctacaagataattagagagagacagaggtaggcttgtagtcaataaccaaaactttatccaagctgccaaggaagatggtggcgaattcaacgtgagcaggatgagcaatgtactctgcaacagcttctttactctcaaatgtggattcaaagatgtgtgtgtaaccttgatgcagattctcaatgctcacatcttttcccctaaaattatacagatccaataattcaataagacaagagcagattcgtcgatttagttgatttaacttttcaaaagatcatcaatggagatggattctctctgagggaaattagatcaacactaggaaggtcatgaatttccccaaattgcttagttttacataatcatattgagttgatggaagtgtttttcggatctcgagcatatgtctaggaagcaattcagaatccaaatttactaaccagtggaaagctttcataggttcgatgagattgacgagattggcgtaacctttgatgagctcttcgattttctcaggactaaccccatctttgaaactagcaagcaatacgtgcttcacaggtccctttgcttcctccatttttgatccttatcccctgcgaatgcaaatctccactattccacttatcagctctctaaagtcttaactaaaaatggacggtcgagatctttgattaaaagagcggatttgcgacgtgcaaatacgatcgtcggattattgttttcgttccaaaaaattaaataaaacgtcctcagatataaacattaccagatgctcctggtatactctgtattgaatcttcttcttttttttttcttttctgtgcaaattgaattgaagcttttttaatttataaagtgtttgtaacaattatgtttacttgattaatccatgataagtgcgacaaaaaatgtatatagagatattcttaccccggtgataatagagttggactgtccagccgcacttaacgccgttttgcagccgtccaaatagcctttctatagaaattggttaacacaaatccatgagattgttagtgcatttgaatcttgtacattccgtcatattgccacaaacgcaaatctgatcgcgcgttccatttctcgggagtgtgattcaagacagaaggtttcagtcttacttagcacttggagagccttcatgacttcacaatcaagtgtctaaggaaagtaaagtttaaatttcattttgtatttcaaataaattttctgtcattttgtttctgttttaataattatcatat

SEQ ID NO: 24335 - DNA, 3090 bp, Arabidopsis thaliana landsberg
  unsure (1)..(3090): unsure at all n locations
aaaagaagcccatgagagagaaagcccacaagcatcctcgaggtaagggtatggatgagatgctggcctgcgaagtgagggaggagtcgaagtcaaggatacccggatcggagaggccgagtgggccgaaaggtgaagtcaagaaggcccgaagtggattcaaattcgtacgttcaaataattaattcgaagattagaaacggatgcgtttctaatagaatgattgaaattaaataagaattaaatgaattctttggatatatattgtgggtcaaagaccatgtaaagacacacgcattttttggtgcaaattagctatacatttttttttacaatactcatagttttctctataatcatctatttactttctagtgtatttgtcctcaagagtaatccttcccactaaacaaataaatacttgagtgtgaatccgacatctacaccgtctatcttgaatgacaccttctaataagaaagtccacgccaacacatttaaagaatgtaatgagttgactgacgtgaattcagagttctgtaggatcaaagcggatggacaagaacgagaaaggcgtaggactattgagcgaccgttctaacgcaacttttgtttaatgtggtctgtaggatatattcgagacacggtcaatgataacaggagagttcccgcgatttttagaactctccaccagatttgttcttttgtttgcttgaggacaagcaaagtctaagtctgggggagttgataacacgactttttagcccgttttagctattgttttcttatgtttcaaagagcatttggtgccattctagagccaataagaggagaaacacacattctaggtgccaagaaggttttaagagttttgatgctaaaagtatcaaaagacgatcattctagtgcttcggaagtttagcatccggccaaggtcttctcgatatcggcatgaagatatcttgatctcattggaaagctagaagagtcaagattaacgtcgaagttgactcgaagcaagccatgaagccggtcaaaagatatgacccgaagagtgaagacatgtcaagaatttgctgtttggaaataataaatccaaaacacatccggccgatgagacttgaacccgggcagctcctagtagctcaccaccgaccattaggtcacgcccaagtcctttcctctatgcgctgccgtcattaggctctttccctgaagcccactactcggcccgatcacttacttattctaagccctaaccgtaggtgtgccttcatcaccagcaaaccctagccgtcgccaagagctgctcactcgccgccgcacctctttaatcttgaagaacaccatctctctctttctctttctcgttttcgtgtaagactctttaaggtggagctttgcctcttgtattctacattcaaagaaataatctctaaaccccttttaagtattattcatcttttacttatggtctactcaacccaacttttgattagctcctttgccatgagcgagtagatttctagtcaggtttgagggggtttcaaaggggaattcatggggaccaacagatcgaagatctaggttggtggtttctatggctttgtttgaccgtttacactattccttctagttgagttttttcttaatgattatatgtgcggaacgccacctagtacttgaccttaggtatttcattctttggcaaaatctcgtttgaatgcttgacctaactcaactgaataaaaaattataagcgttgcatgcccgccgagtgatagggacttatggactagaatcgaatttgaacttaatgctttgatcttgtattttgaaactatgttagcaccaactagccgatagggcaactgagtacgcaagatattagtgataatagcaagctttcacctactagctgttaggtttagctggtcttgatagagtttcgtatctccaagaatttggaagtaaacaaacctagccatgttatcacctagattgagatctataccttattattgaaccttgacatccggagaaacccctgatgacctaacgcttctctcttatagtttaccggttaatttagttattcgtcttttattttggttactcatagcatacaacaaccccctctctttattttgatcctagcttcactctattcttaaggatttctcttgactacttctctccttgtggattcgatcctaaaatactactctgatattctgtgcacttgtagtagtcatgtggtctttcgggtaatagtttgaagcgaactaaaatacgcatcaagctttttgaggcctttgccggggagagattgttagttccacaagtccgagaaatagagtgaactctaggacactttgcttttaatttttgtttttgtttttcttagtttcaggaagctcaaggatgaattcgagaaattactccagtagctattacccaagtgtgaaccatgggtcaaaccgcgtatcacatttctcaattgaccgctacacgcccgatgcatcccaaatgcatggtgagtctttgcagccttgcccgtctaatggaggagcttaccggaccgatcactactctaatgatcaccccgccgccttcattgagaattggccgcaagctaaccgcttggttagcccgttccaccactgcgtcccatctcccggagatcaacacgtgggagggcccaactcttctcatccttgtggagctgccagacatgaagctttcggctatgaccgaggatatttgcaagaggtgatgagtgtagatgttcatccgaacaactatacttaccaaaccaataagacataccaagccgccgaggcggaagataggatcattggtctcttccgaaacttcgttgatgaacatcaagaagacatgaggaagatcaacaacactctccttaaccatcgagacaatatccaagaccaaaacactagaatcgctgatannnnnnnnnnnnnnnnnnnnnnnnagagctatctagattggaagattgaagagctagagaagaagctcactacttcaaatgagtctttgaaatggagaagcaatcaatcttttcaagaaga

SEQ ID NO: 24336 - DNA, 1925 bp, Arabidopsis thaliana landsberg
attataaatttaatgtcaaaagagaataatcaaaaatttaaaaccaaaagaaatgaaaaaaatatacaaaatatagggggaggtggacaataaagaaaaactctcataaaactaatatacagattatatcatgcgcttggctttgattctagtttgttaaggtgaaaatttctcaagtataagaaattcatatcgatcatgatagattccatcttttcaaaatgctttctttatctaaaaaatcattcactctaacacataaaggccaaacacttacagacctatgttgtaggatatggggtcaactgacaccagttaaaattcatatttaattatatgaacaataatttgtagttcatttttgttagagcaattaagtttgaacccattattcaattgtcaacaccaataatgtttgagtgttgtggatttttctctaacttgtttgaacacttcttattgttattgggccacaactcaatctattaacatatagaaactgtcctttttataataactaagagtttgattggttctctctctgccacctgcaaacgcagcgtttgcgggtggtagcggttgttagcgattggcaccaatcataaaaaccgctagataccgctttggaccgctcgaaatcgtcagatctcaaaagctccttcccgcaagcgtttacggttgcgggcggtagcggttaggttaaaacaaaaatttattttttataattaattaaaataattatatcttccacccaaaccctatatatcttattcttgttagaaaaccctaatcaatatattgtaactctattctctcaattatggcatcgacccaaacggatgaaaattaaaatcaaaatcaagaatcaaacgtaagtatgatctatccgttcatctattcacgaccagtttggaaaaaaatttagttggagatgtgttaaaaatcgtttggatatcttgaagaaactttattatatagaggcaatccggaaaacccgcgagtttaacgttatttacagtttatcacactatttgatgcaatttttggtgatgtaccaaatgcataaagtattaaactttttcttacaaaatttatttatttttgaatttaatgttttatttatggttttaattattaattatgtttaatttttctaatattatgaatttatcataataatatattgtattttttctttcttttaatagtaatatattatatttattttggtttatttttgtttaattactatcacacccgctggtttaccagtcataaaactcccgcaagcgcacccattatcaaacgttcaaccaatcgtttaaaacgcttgatatcgtttaaaaccgcaaccgtccacttttgtatactcctgtaattttatccacattggctgcgtttaaaccaatcacactaagttccaaacaaattctttcttatactgagtatgaccatcgtttttagttgtaaagaaacacattttttgtttttgatttaatcttactattctgaattttttggtctaaaattccttaaattaaaaaaaaaatagaagatttaaacgaactaaaacaattgatacaaatttattttctattaaacaatattacattaaagatcgaatccgggtcgggtactgtaactcaaaacttgcttggtgcgaccctctccactttgccagcctcattcatctctaaaaataaacaaaaaccagtttttttgttgttgttcaggtcaagtagtttggtttaactactttttatacgtggaccaatgaaacaccaagaagccataaaagaagccactaattttctttattaaaaactaaaactgaataacaaaataactaaaaaaaaaggaaaaaaaataaaataaacaaacaaaaccgaacattatgaaagagaaagatgccagatggatgatga

SEQ ID NO: 24337 - DNA, 706 bp, Arabidopsis thaliana landsberg
taaaattaaaaaaaattaatcataatgaattgattagttaaataaaattcgtttgattgtatttagttcagtggttaaaattcttttttttttgtcaaacaagattttcattcattcaaaccttaaaaaagggaagttcgtacacaatgacattaagataatataatgaaaataaagatatgggttttatgagttttccaaaagatgtgtacttttaagaaaatttacaaagattgaaaaatctgttgaggccttggtggattcgaccatgaaggcgggcttcacgaaatcctcgaccagtaagtggtcataagcggctcttgcaaacaatgcatccgagcttttgaaaaggtgctccacggaggaggctatcttgttagcgcggttgaaaaagggacggtaaccacctctcgaagacatggtcgccgtactttcctaaacaaacagagggttacaaattatccaagcaatagattaaaacatgactgaactcgataattggagaataggtaggttgagagttaaaagagcttcggtaacacctactccgtagagacagggtcataatgccggtactcttaactctaaaggacgacagactaagattgggtaagcgagtcttggatagggtccatagtaagcttaataactgatctcgaaaaaagtacctatcatttcaagtaaggcaaatcattactctgtctgt

SEQ ID NO: 24338 - DNA, 1202 bp, Arabidopsis thaliana landsberg
ctctcgactctcccccacactctctacaacccacacctatttcagacctttgtgataagttctcctctatcccttctcctgttttaccttcgattaaatctttagattcttcgaagtctgcttcaccggttaacaagcctcgagtttctcgaaaccttgtttctttagttgttcttgcagttaacaaagagagttttgatcgagacgactatttgtgtcgatcgacacctgctgcttcacagcccggatccgtttacacactgccttggatggcgaggttgcagcacaagtcctccacactccacccacatcttgaactccgccaagtcaagctattgactcaaaacaagcgcttaatgagaggcaacccactggtttgatgtttcttttcttttacttttcttttatttttggtttatttttccactctctttggatttaaatgccactggggacagtttcatttaagtatggagaaggcgcttactaattatgcttttatttttcactctaattatttttttcgtttttctgttattgagtcatttttcttttctaaattctaaattaaaaaaaaaagaaaaaaaaaagaacgggaactaaattgtaagtaagctcatttcattttgtaaatatacgaatgacaaacataaaatcaatgcatcaacatttcgattaaattatatggtatttaggcagttttttgttttgtttggtatggtatgaatgcaggactaagaatgggatagaggagatgtgtagggatctatggaattgggcaagcaataacccttacggctacaattcctcctccagtggctcctcttcataatcctcttcaacaaacacaaaagagagaggctgacaacaagtacaaaaacttttgaagaaattggggaaaattcttgtactattaatttatcattgaaactatattttattcttttccaaaaaaaaagaaactatattttattaaatcgtcagttcgtacattttaagtttttttcttgtatttgtgtatttgttctatttttcttatagttatgtttggaaatgtggatcattcattggtcgacaaatttttttatgtggatcattatttggatcaaaagatgttgtgacgaaaatttgacaaattactattttctgatatcagtccaatttacacaaaaatacaaatgtctttaagacgacttacagac

SEQ ID NO: 24339 - DNA, 1374 bp, Arabidopsis thaliana landsberg
  unsure (1)..(1374): unsure at all n locations
tgaatctgattctttcgtccttctaactctaaagacttagactcaatctgctgcctctgtaagccatttgtcttcctactatctagcgatattcctcgattcacatcagcttgggaacgaggcaagcaagggacatcataacccttattcggatgaccaacatcttcatggctctggctttgtcttaacctcttcaaaggacggtcacttaaagctccatcatgatcttcctcatagtcatcatcatcatcaagatcttcgttttggtgtttcccatgttcatcattatcatgatcatcacggcttccaagcgtaatcaagtgaagagatctctgtaccgcagggtcatgaggcaaatgcaatctgtttccgttatgataagaacacatctcttcatagaaaagatgtttagagctcatgattctcctaacttcatctttctctttctcattcaagtaatcaatcttatccaaaagcgcaggattctcaacaacttgacaagatgttcctctaccaagcatatcattaagcttcttataccgtttattcaaatcattgaacttatcctcacattgctgcggcgaaacatgataacctctctcagccataactttagaaacagatttccacttccctttcttctgcaaaacagcaaactttcttctactactactatctatactcgaatcatctcctatataagaaacagcagtaatcaacaacttcaccatcttatcagtccatttcactcgttgccatggagatcctttagttgatctattagcttcattatgaacaccatcaccaccttcctctgtgaaacttggttcatcatcatcactcactgaattcttctctctttcagctttctgttgctcagacatagacatgttctgattctgatgatgatcacaggtttgacctgtaaccatagtaaagggaagaccttcatgaagtggtctagaattaggattgtgtcgatgctgctgattcatggagtcttggtgatgaactctcatagaaccttgtaaatcaaatcctccataagatgaagctccactacgaactacacctccttgtggaaaattcccatccatttttggatcaaatttcttcctaattcatcagagaaatcgaagagaaaacagatctcaaaaagtcaaaacctttgtcaacaaaattagtactggatcttaggggaatattaaagatcgaaactttaggagagaatgaagcagagaggaatcgggatgaagaaaataaagcggtaaatatatgagagatgagtcaaaggaagtaaaactcacagaaaaaagtttgctttcgtcttctccggtcagcttcctcaggcttctcttctctctctgnatatga

SEQ ID NO: 24340 - DNA, 590 bp, Arabidopsis thaliana landsberg
atcttatacgtctcgagatcttcaccagcgcgaatctcgctacccataaatggaaaactcgctctagcagtcataatctccgctcggaagctgcaaccctactttcaatcccattccatcattgtaatgggatccatgccgctccgcgctatattacacagtccaagccaatcaagacgcctggctcagggaatatgacattgagtatcgaaacaaaacatgtgcaaaatcccaggtcctagccgattttattgtcgaactgcccactaaggaggtccgggaaaatccactcgatacaacttggcttctgcacgtagacggctcgtcatcgaagcaaggctcgggtgtaggcatccgcctcacctcgccaacaggagaggtcctcgagcagtcatttagattaaacttcgaggctaccaacaatgtagcctagtacgaagccctcgttgccggactcaatctagctcgggggctaaagatagaaaaaattcaagctttttgcgattcccagctcgtcgcgaatcagttcaacagagagtacacggctcaagacgaaagaatggaagcctatctgactcatttacaaaatc

SEQ ID NO: 24341 - DNA, 756 bp, Arabidopsis thaliana landsberg
  unsure (1)..(756): unsure at all n locations
aaactaactcttgctagaagattaaatagcagatgatatatcgggtctggtacaatttgcaaggtacataagggctccaattgcacttagatacggtacttcaggaccaagtatcttttcattttcttcatgtgggcggaaaggatcctttttaaaattaagtgatctaacaaccattggtgtactaagaggatctgctttatccatattaaagcgttttaaaactctttagtgtatgtggattgatgtacaaaatattcccttatgagaatgttcaatttgtaaaccaaggcaagactttgtttgcccgagatctttcatctcgaattcccctttcaaatagtttgttgttttctgtattatgtcttgagttccaannnnnnnnnnnnnnnnnnnnnnnnnnnnnncaattacgaatccataaatagttttcttgatgaaaacacatgggcatatagggttatttacatatccttctttattaagcgctcacttagacggttataccacatacgtccaaattgttttaaaccatacaatgatctttgtaattttattgcacataactcttttggtttagagtttaatgatttaggcattttaaatccatatagaattctcatgtagatgtcagcatataatgatccatagtaataagatgtgacgacgtgcatgagtcgcatttctagatttttatcagctgcaaaactcattaaaaacctgaatatgatggcatacataacgggagaatatgtt

SEQ ID NO: 24342 - DNA, 1292 bp, Arabidopsis thaliana landsberg
gcagcttgtcaatcatgtaaacaggtgggaagtactcatcacagcaagaatgtaatgaccacatcaagacctctggagttacttcatatggacctcttcggacccgtcgcctacctaagcataggaggaagtaagtatggtcttgttatagttgatgacttttctcgcttcacttgggttttcttcttgcaggataaaacagaaacccaagggaccctcaagcgcttcctaaggagagctcaaaatgagtttgagatcaaggtaaagaagataaggagcgacaacgggtccaagttcaagaaccttcaagtggaggagtatcttgaggaggcaggaatcaagcacgagttctctgctccttacacaccacagcaaaatggtgtggtagagaggaagaaccggacgctcatagacatggcgaggacgatgcttggagaattcaagacgcccgagcggttttggtcggaagctgtgaacacggcttgccacgccataaactgagtctatctccatcgcctcctcaagaagacatcatatgagcttctaaccggtaacaaacccaatgtttcgtattttcgagtttttgggagtaaatgctacattctggtaaagaaaggtagaaattcaaaatttgctcccaaagctgtagaagggtttttgttaggttatgactcaaatacaaaggcgtatagagtcttcaacaaatcatcgggtttggttgaagtctctagcgacgttgtatttgatgagactaatggctctccaagagagcaagttgagagcacctagaggggggggtgaataggtgatcctgtaaacctcccaaacttaagccacaaaaactttgttaagtgttagcacaattatggccaagtggctagagaggagtcaaaacacaataaccacaagacatcaatcacagagatgacacggtggttatcccgtggttcggccaagtacaaaacttgcctactccacgttgtggcgtcccaacggacgagagttgcactcaactcctctcaagtgatccaatgatcaacttgaataccacggtgttcttgcttttcttttctcaatcccgtttgcgaggaatctccacaacttggagcctctcgcccttacaaaagatgttcacagagaatcacggagcaagggagggattagcagctacacacaacacaaaaatgacagcgaataccaacacacaagactcagacttgagctcagaagactagcacactagaacggagctcacatactagaatgtcgacaagtgcgaagattgatgtgtg

SEQ ID NO: 24343 - DNA, 1082 bp, Arabidopsis thaliana landsberg
cggtcgaggggcagctctccttggtggagatattgcaggtacagggtctaccagtctcgattaggcgggaccccattccgcttttccttgacgcgcagtgcctcaccctcgggggccgagggtgcctcgggctgaaccgagggcgcctcgggctgagccgagggcgcctcgggcagggccaagaccttctcgggctcgggcgtgtcgtcggtcttgactgagggttgatgtaggtctcgggagaagacgtccgagggaaccgttgtccaccccgaggctatcttagccagctcgtccgcagtctcgttgtatcgtcgggcgatatggttgagttcaagcccgtagaacttgtcttccaggcatcgcacttcgtcgtagtaggcctccatcttccggtcgcggcagtgtgagttcttcatgacttggtcaatgacaagttgcgagtcaccacgagcgtcgaggcaccgaacccctagctcaatggcgatgcgcaacccgttaaccagagcttcgtactcggccacattgtttgacgccaggaaatggaggcacaacacgtagcggagatgtttcccgaggggtgagatgaagagcaggccagcacctgctcccgttttcatcagcgacccatcgaagtacatggtccaaagttcggcttggatcggagctgtcggcaattgggtgtcggcccattcagccacgaagttcgccaagacttgggattttatggccttccaaggagcgaacgaaattgtctcacccatgagttccactgcccactttgctatcctacctgagcgtctcggcactggatgatctcccctagggggaaggatgacaccacagtcaccggatgagactcgaagtagtgtcgcaattttcgccgtgtcagaattactgcgtacagtagcttctggatttgtgggtagcggatcttggtctcggatagcacctcgctgatgaagtagaccggcctctggacgagcagtgcatgcccttcttctcgtctctcgactacgatcgcggtgctgaccacctgagtggttgcggctacgtagatcaagagggcttctctcgcagcg

SEQ ID NO: 24344 - DNA, 827 bp, Arabidopsis thaliana landsberg
  unsure (1)..(827): unsure at all n locations
gtgcatgcaaagaggtttatgagaattaatttgaccacctatgtcaccagggtgcacttatcttttcggtcaaaggtcctaaaagaactccacagttaaacatccttgagctgtagtagtttcaggatgggtgactttccgggaagtgatagccggaaccatgcgagtgaggacaaagaatgaaaaaagatcatgtggcgatttgtaggatcggtaacaagtttttaaaaacctcccggacatggcgcactgaccgtcggacagggatatgcccatgggcccaagaaaggacgtggagcctactagtaggggcagtcagggggttacaatttcggtgagcccttgtttttttctggatcattatgtctctatgtgtgttgcaatgttggttctataacactgaaggttctttggtttactccaatgcgtaatatttgtttctttgctctaaaatgtttcctctcatgtagattgagccatgttgtatatccgtagatccttcggagataaactctgttttcagcttccattgctagaaaaatctactagagaagcggtcttggaattggtgttttccgtatgatatatggaggaagcaagagaacggagaaaaataagtagaagaagacgatggtgggattttagagctatgtgattgttcccaacattgcaaagcgtcacaacatcgacaatttagctcgtggcgccactgcttttggattnnnnnnnnnnnnnnnnnnnnnnnnaaaagaagtattgcgtttcttttcggtaatgagctcatcaaaagctctgatttttacaaaaaattgtggatccctttataa

SEQ ID NO: 24345 - DNA, 2971 bp, Arabidopsis thaliana landsberg
gtttcttctcactaatagacccatgtcacctcgtcaagacttctggatgtacaaacgattgatgcttcccgcgttcaagtagcttatggagcatctttgcatgttgtaaatgtggatgaaaaaaatgcacatgccgtcttttcgagaaagagaaattaccatgcatccatgcaatcgtagctgcagagcatatgggtgtgtctcgtatatccatgtgcagtccttactataagagcagtcatttggtcaatgcgtatgctggtgcaatcatgccttcagatacggaagtccctattcctcaatttgtaattgaccaaccgtgcttgcctctgattgatgtgaaccagccagacaggcccaagaaactaaggaggaaatcagcactagaagtcgccgttgagactaaacgccctaggaaggaacacgcatgttctcgatgtaaagaaacagggcacaatgttaaaacttgccgtgcatagtactgtttgtactctgtatgtgtctactttcccttgtttggcaacagtggtatgtatttcggtcattttacatgttatggccgagttatataattagggaagtcgaaaggttcggtcattttacatgttatggccgagttatataattaggaaagtcaaaaggtccggtcattttacatgttacggccgagttgagttcattttacctgttacggctgagttatcgataaactatgttaacttacgactgagttatattcgtattatgttatttagtgtctgagttatttaattaaatacggctgagttatcaaactgaattttcaaggcaaagacaaaatgaagttcccagaaatagttgtttgaaggatacataggaggaaatgaaaagtaaacaatggtaataacccgattccttccatcttgcattactcgaggaccatttttaactcttgcacttcttcgatattggggtcgacagtcacatctgatatcccggcataattttggaacttcacgtgtttggggccagtatgacacctaaagatcttccaccatgtgagtgcaacaaatatattgtcaataacaatactgtcattgcaaaaagatcgaaatttcctatgcaagtcaaccgccaattcgccaaaagcctcacatttcaacctctccttactgaaacatataaaacagtgttacaattatacccctctcaagaaaaatacatgatgaaaagaaagaaatttagaagtaaagaaacaaaagaaattatactatttgtccataatcttgaaggtaagtctgaatccgtccatctcccaaccatcttctgtaatatttctcagacatccgacatcgacgagtgcaccaaccaaatcagggagtatgaaataaagattaaaaacaggcatgtgatttgtgaaagtatgaaatttgtattagatacgtattacttaccgaccaaattttcagtatgagcggtgtcttcaataatgtagtcaaaaggtgtgaatctgttaaataatacagtttcccttgggtcggaatgatttacctcaattgcattcatgaactcaatcatgtatttgtgggttgttgatcggacaaaaccccagttttcgataacaccaaaagttctgatttctttccactgattctcttcaagcatgtcgtagtaacgttgagaaaaccgacttccgattatagcttcaatttggataccctatgaaaacaaaattggagggtgagttatatagggaataagacaagcagaaggttaagtatgccttgtatcacgagtgaagatcccattacccactcatctacaaagacgacccgtagttcgaatgagttatctgtgataaacaagacgtacttcctaagaaccataacacaaatcgtccagcaagttatgcaaggattcaagtcgcggaggccgtcgtaacccatggtgaaattctgagtcgttgaaaattaaagaaatattttgaactcgtgaacttctgtttgtgagagtttaggcttcgagagtttatgggagaagccgtttttataggcgtattaaaccggtgttaattgggccggatataaccgtaaatcggttagtcagtaaatcgaatggaacgtcatgctttattgacaactcagccgtactgtggtttaactcagccgtaaaagtacaatttgccgccaaacacagccgtaacctatacactttcccgccaaacacgcaacctttcgtattcctttacctgtcttttttttaatatttcttgacaactcagccataacattgttacatgtcttgagtgtaactcagccgtaacaatatattttgccgccaaactcagccgtagcacggaaaattttcccgccaaacacggaacctttggtattcctttacctgtctttttttaataattcttgacaactcagccgtaacattgttacatgtaaaagagtgaaactcagccgtaccacggaaatttttccggccaaacgaacagacacggaacctttcgcattcctctacttgtcttttcttttctatatatcagttacttgaactcatcatttacacgtctcatcctcacttcctaacgatatggttcctcacattgacggacagtttatcagagatgtcgaagccgtgctcaccgctcctgatcgggcgaatctcccagttctaaaccctggattgggtacatgggttgacaaaaccattgttacgtggttcaaattcaatcaccaactatctgtcgcgattgcagatatactccagcgcaactttcaccatgcgtggccgacgtaccggatgattcctaggcaagatggtttttcctcctcacggtaagcatcgagtttttatataaagcacttcctgtaaaccgtagactaaattcttactatttgctctctttgtagtgtatgtaaacctgagattcaggcacacactaacggtgtggacgcagtttaattttgtggcttgaccgttg

SEQ ID NO: 24346 - DNA, 1806 bp, Arabidopsis thaliana landsberg
taacttttcaattcaaaatctaaaatagcttagtaggtaagtagatacaatatcaaccagaaacaaataagatcttcacttattgaaattaatgtattaaatttcatcttgtaaaacaagaaaaattctaatattataacaaaatagactaaaggccttattaaacactttatcaggatacatatgcacaagttttcagaaggtgacggttacggtttctaccgttattaagtgatttataagatcggtttagaggttagaacatttgcgtttgcgagcatctatgactggttgtcgatgtttgtcgatgtttgtcatagcggtttaacatcaaagttaacaaaactacgtttttttgtcatctaaaattttattattgaacttgaaatggaaccctggtggaatacaatgcccaaaagagagggaaactaaaatcggcgaacgaactgaaaacccccagagacaaagccgacggacgccaaaatttccttggaagctaggccctatagaagggagactaaaaactgtaaaacataatctataatttccgattagaactcgggacttagtttacggatttgaaagaaatagaaagaacgcaaacaaagaacaccgatattttacgagttcaggttccagtgtagaaccctacgtctcgccggagattgactccgaaatccactagatcagagctcaaactcgagctcaaactcaagctcatacaagtgaccgttacaatcgctcaccggattacaatcactctcgggctttctctcactcgccaagcaaaaacaattaacaatctatctctaactcagctcatgtctatcgacgacttccatcgtctcgctgtgacgcttctctcatctgtttcattctgtaccagaatcgatgaagagtagagaagaagaagatacagagccaaggataaaagacccttttacccttctagttgtgacttattactaatcacgtgtgtgcttctcatgtgtatcattggaggaagattgggtcaaaccctctgattgctacagatacttatcacactttaagcatatatcttgagatcgaatgacactaaaccttcagattgaatataaaaactagactgttacagtgagtttacctcgactacaacttataaatttaattactatgaacataaaatgataaccaagcaggtcacggtgaggtggatttaaagagagatcaatttcagatagtttctgggtctggtaatgaaaacatataagttgcttggggtgtgttaggtaactattttgctctcatgataattgcttcttatttagtttacctcctcccaagcttatgcatatgcaatggattaacttatcatatttaggttacgaaccaatgacttccttccaaaacaatagcatttctcaatttccaaattcttcacaaaaaaaagaaaaaaaacgtattcaacttgtgaaataatttctagttttccatatgtactttacactcaatgctactatattgttcctttttttcttttttttttccttttcacacaagcattagttgcacatgtgcgtgttcaacctcgaaacaaagatcctcaaacgcttccctcgtctctccaacatgaagctcatggatgctcgctggtttctccctgggatttgaaacttactaacttttcctttatttcccatgtctgcttttggttcttataaactatgacattgcactttcaacatatgagcattttcttctagtcgcagatgtttggagaattgtgttgtacagtataaacatatgttgtcagaacgtttttta

SEQ ID NO: 24347 - DNA, 1280 bp, Arabidopsis thaliana landsberg
ttagtttttgggaaaaatgccgaggataatatctactagtctcagcatgtttgactttcgtgtctaacaactccttttctctaggctgctttcttggcgatgaagagcaaaggagggaagcttatggtatttcaatcaagtatgatgctcactatatttgggcattttatatattagggtatattgatgcatgtgcttccaagtcacctagaatctatcgatgcacattgaaaattattgatttattagaagcatactgctcagtacctctataacgtaactgatatgattaccatcttttccatagttttgtgttctgttggtgttggagcactttcttctagagaggccgaagggagagctaatatgtctgctggtgaaaaggtaaacatgcttctttcttttttttcaaaagaatatactggttcattgcaaaatattaaattgtcctgcaattctttttatttcaggaggcccataaattactacaaccagcagacaaaactctaaagaccatggctattgaatttgctgaataccaggtataccaatagaattatgttcgaatttaactgataatctttccatctgcgtatcagtaatctacaatgtatcattctttcttcattgcaatagttcgtccatgtctaagccatccataaatgtctcaggtctgtgtagatatatttatcacaactcaggcctatgttgacatggcttcaatttccgttattccaagaactactggaggacaggtaatttccaatattccttaccctttctgattatcgaaaccatgttgagcttgatgtctaggttttgccgcacttacgatttcaatcttttaactattttttccaggtgtattgttattaccctttctcagctctctcagatcctcccaagctttacaatgatcttaaatggaatattactaggccacagggttttgaggctgtcatgcgagtcagatgcagccaggtatgtttttgcggtagagggttctcttcatgcattattctgttaactccagcttaaggctaattttctgtaaaccatcgtttccatttattgtagggtattcaagtgcaagaatactctgggaatttctgcaaacgcattccaactgacattgatctaccagcggtgagtggatcctctttaaattttcccactaattagttttggtttgcattgtgtgtctactgagttcttgtcaatatcattgaaacatatctctgtatgtggtccctagtgaaagttgttgaatctggaattag

SEQ ID NO: 24348 - DNA, 584 bp, Arabidopsis thaliana landsberg
gaatgattggattgagttgatggtgataaagcagaaacactaattcggtggcactgttcagatgatggctttattatgatttctcgttgaatggttttaaatgttcaaatgtatatggttttaaatgttcaaatgttgtttgatatgaattaaatgtaggaaaattataaaatctgccatatttttcccaatcgttatgtaatctgccatatttcttcgggcattacaactcataccacatttggttgtgaaatgtccattttgttcccacggtttactgagcagttttcgcgctcaacaactgcgtctttttacaatcccttttatctctttttcattgtaaaccgtgcggaaaaacaacaacagttaactctctctctttcgtctatctctctcatactttccctttccttcaccgataactttcatcggattatatctccggtaaggtcatttcaagtttctgcatgttgctatcttcaatcatgtcttcatattttattcagtgaagtatttttgaaaaactttagcaaatcccttgtactggtctgttatgaaaaatcgagtttgtctctcattatgat

SEQ ID NO: 24349 - DNA, 463 bp, Arabidopsis thaliana landsberg
cttgatctgttttgattatacgacagaaagatttgttcgtctatgtcttccgtatcagattctgtattggcgtaatacatctgtatcaggtgttaaagaagagaaactttccgtgttattacaaccttcccttacatcgaagacacagatatgggtgacaaataagattggtgaggccaaagcgttgtcgtggatcaagtttttaacggtggatttgaagcctgagattaaatatggcataaaattcttggtcgatgaggagaacaaagtcctcgtgtatgagcaaaattttgtaataaacggcaaaaacaacatgatatacgtcgttggagaggacatcgaagttaggcaagtggtgtttagaggcggaatataatccattacttgttttattatgttccaagttggactcagatctagcaagatgatgattaagtcacaggccccccttttctgttttttt

SEQ ID NO: 24350 - DNA, 479 bp, Arabidopsis thaliana landsberg
ggccgtattaccaaagaggatatcagcggtgtagccatcccagtcttaacatgacaaatctgcaacgagttcgatgttgggatgtgtaagatctcttcccatgtaccattctcatcttgtaaatctattttcgcccataaatttggtccaagataaagatcaaacacaggggctgtgttttgaccatcgtaatttccatataaaaagtaagccctgatcaaatatttacgctccttgaacacactcagattgtagcaattccgtattccctctgggaaatatctcagcgttctgtatggcttcaagaattttctctcttgatttgcttggactctaccagtttttccgctctggatgaatgttgcgtccgaagagaacaacagaccagtacgattctctttataaggagacgtctcatttgggggtagcccgcaatccaaactgatgaaccctgttaacagacatggtaaacattaacc

SEQ ID NO: 24351 - DNA, 4543 bp, Arabidopsis thaliana landsberg
  unsure (1)..(4543): unsure at all n locations
aagaatagcaaaagggtcccatagccaaagcatacacgtcatcccagagttaactccaagaggtaaaccaatttttcatagcaaaatacatagtacgcgagtatgagcaagaaatgagaattttcataccttttcccaattatcgttgcagcaacagaaccaacagcacccgcaacatctattagaatcatcatcactctttgaaaacttcggtagatgttttaccatgatatagtcttctttcaatttgggcccatactctggtgagaatgacaacatcgaaacctccaaaaacctgcaaacctatattaggcatttagcatttaactatgcatgcatatagcctcggaaatggaatgacgatcaatgtgtacaggaatacaagtttgaaaagcatggaaattttcgcatagtcacttgctgtactaagatttctagctagaatagaagagaaaacaacccttgacataactaggtattaacaattttaaagtagttgaacaaccaagtgaaatagattttacaaatatacctcccgtgaattgacgatatcaagattccccagaaaatgattcagatattcttgcattgcatgctttcctctaactgatatggactgctgtcttcccaaaggacgaatgactggcaaagcagcgctcgaaggaacatctctgaacaaaacagtctacttgtcagaaaatgatggcatctgttggaagagtatagactcacatcagcaacttatccaagcaaaaaaaaatgccagcaagtgtgacctatttttggcactttcatcttgatgtagcggaacttcatcagcatcttcatcttgcacaacgggtggatgatcccctattcctagattttgaagccattctttaacctttaatgtgatattcgaaagaaaaccacatcaaactcaattcaacagaccaaggaaaaacctttaaaatattcactcaaagggaatcacaaactagtagaagaaaattccttgatatatcaagtcaccacaaacctgttcctgcttctcgtgaatttcttcaataaaagcacgtttcttcaatgcaaaatgcaaataaaagacttgagatgctttcttcacaagctgccacttgaactgttacataaaagcgctaaagttaggactcaagtattcaaaagtcgaaagctccactataataagcagcctttccactaaactaaggtgaaacatataaatattgataaatatgtctctgttccgggcttccaaaggacatataacatcgatcagtggtatcagattcaagctaggtatccaaaagaactacttcgatcaatagtcagacatgacaatttacagttgatacccatctcctctaagtgattctgatccaagcatctattatgcgacgatattagtaagacctactatagagaagagatggactcgcctgcttgtattggcactcaatggtgtaagacaagagtacagggctaatatcgccggcatcagggcgagagacagagacgatcactgcttttggtaattcttcaaaaatacgattagtctcctgcgtaggagccggcgcgaaagagaagagcgaagagaccatcgaaggaaattgctcaggctgcatctaaaagtagcgtccaccaccactggcgggagacatcaactgctcagatgccatttctctgatctcttcaaacctccaattacccaattcgatcgctcaattcaagatctagcaaacaaaaaatctccaattctcccgtcgcgttgatcctgagtttgatccttttcgttatgcttatactccccccgggaattccgatgagaaaccgatcaatctgaagaccaaatcgtaggaagatcgatccagagcgaaaatggattacaaaggaagacacatctgagggaaaattcaaaagtcggggagagagagagagagagagagaggaatacacacggtgttggtttttgatatacaggtgcacgaagaaagcaaagtgaacaacatgaactatgtctacgtctacgtcgactttgacctctctctcccggtttactccgataccggatccggctatatattattttcttaacatttattaatcaaatcagtgatcttatactatgtagaaaacataatcaaattatcttatgagaatattacactctaagacacttttctcaaacaatttccgagatacgatactttcaaaatacaaggcacttctaatataaaaattgtccattttaccctcaaaccaatttcggtttaattctctaattttaatttctatacgaaaatcaatttgtaagaaacctctctttctcacccaatccctcacgacgactttacaatttctgtttgtttcccttttctaatagatggttcatgcttctttttggcgatttcgctttcaaataatcccttggcatcttcgtaattgttgctttctcacttctcaatgtcaatacacatcgatttctcctcccaataccgtttcaatttcctcgtactactcccttacgactgacaatgatcaatccttcttccattacttccaccatcttcttcgattatgcgtgacggctcaacaatgcaggtaagtgcatgcccaaataattttatccgatttcatcttctgttctgggtcattagctgcgaatctcatatttgtttactctcggtgaggactcgtcctcgatgcctgtaacgtctttgagattgtttctcttgttttgttgtcggatttgcgtttgtggaactcgattcaaaaagctaatatgtctcatgggatatacgagtttgcttttgagctttacataggaatgcgtgaacgagatctcacagagtaattgtcatgtcttgattagattttgacttttcattgcatgaatcttaagtcactgtccatttatacattgttaaatgaaacaattgatcttatattctctttgattcaattttgcagatgattccttgcactacattaaattatatcacaaacggacgtactgtgcatccatgaattcaacttaattcaaatgattggtgaccatagatgatagaacaaacaaatatggttagctggatgcttacttattgatgtcatccaagagaatctgtccattcagaagcaaacatggatattgtgctcattctattcactatataagtatatatgtttcttgttatatttaggattagtatacaattttggttataatgatgggagtttccatacacaagtgaataaatggtcaaagaaaaatgaacgatgatgtactttgaattggcgtttgaattggtgattattgttcatgtataaacttgtgtattgaaatgaaacaaccccgtaagttactagatgacgacatggactagaccgcttggacagtcatcaatggacacatgtgtctttgatttgctgcaaatgtgttttattggttggtaaaattatcattttttgtatggttgacagttttgttttatggttttagatttagtggagaaggatcatgggagggtttgggtttaatattagggtaagtaaattaggatttagtgtagagggtagagggtttacacactcgtatgaaacatttcccaaccccctcatatgaatattaccataggaatgatcctatattttacaattcttatattgaaatgttttatctgcacaaacaaatacacgaaagatgaataacaccaaatctaaacattgttcaccaaaatcaaatgaaagaatacttcattagttggataacatatcttcgaagagtaatagacggattcctataggtgacaatcggcaagtacgtgttcatctatgatttttagaagtagagttgtatccatgaaacatcgaccaaatgaatatagtgcaagaaatgaaggtgtatccacctagcgccgaacaaatggatatacattttcgtgttttctcgtaaacttttcttgacatccatgagtcgacataagtataaagttgccagacaagacactagagctcacagcggccaccgcagcctcatggaccaaagtttcaaaaaaagctcataaacatcaaccaatcttcttgcataaccaccacatacccagccttatgcgtccaatcactttccgtctacgcaaatgacatccaaacatttttcaattcaaaaacaaagacaataaattcaacagatctaacaaaaataaatttaaagtgaaggataaaatcataaaattaagaacccataacaaaaaaaaaagtttaaagatttacaatctaaagcctaagctaggatcaacgaatcacatgtaccgttggcctttatgattcaaaaccaaagaaacctattaccaaaaaaaaaaaaaccgaaaccagaaaccgtaagtaagacaagagagaagaacatggaaccagaaaaagagggagattaagggaagagggaattcggnnnnnnnnnnnnnnnnnnnnnnnnntcttcgtctcgaaaaggagaaatcgatgattttactttttttgttggtcacagtcgttcattgatggaggttgcaga

SEQ ID NO: 24352 - DNA, 814 bp, Arabidopsis thaliana landsberg
ctgtaattatattgatggctcatcgattcatatattgatatggttatgaatgtcaactaacgaagtgatcatcacatacttaagtttaccagttaatcttactatttgcaagtgtttcaaggtttatcagagaaatatttctcgacacattccacaaatttgtgttgctgtttcgaatttggtttcgagagaatgacgatatgctcctcctctatttgatattgatgatgacattcatagttttgaaaatctctttccaattgcattctctagctatccattaaaattgattttgcaatgggactttacgattaaaattgataataaacttgtctaacttctaagtcttagtgctacgattatgaatagaaaaacatctcttgatcaatgcactctcttatggttgaagaaaaagtaaataatgagtagaaatgaatattgcttagtttttttcaaagttgaagacgtatactaaagatttgattgttcatttttgtaaaatcacataagcactgtttcaagttttttttttgaatatacagaaaccatcacaatgttaagagagacatctacggaagaatgttggtatgagcaactgattttgagaactgagaagtatcttcaacaaaggtaaattgtcttattgaatcatcttgaatgtttgtttagaggaatgacaatagagacatacatcatcatacgtgacaaatatataaacatttataatagggagagtgttaatcttttgcccaagaaaaaaaaaggagagtgttaatctagtctaatatctaatctagtaatgtcagcaaaattt

SEQ ID NO: 24353 - DNA, 445 bp, Arabidopsis thaliana landsberg
tcttaaaacttctgttttagagaccgggattggagtcccgtgctctacaatcttagatattaccaaaaacgggtcctgagcatgaacaacaacagtgttatattcatgtctgaagtatactgagataaactggtcaaagagtatagcttacacttttagagaaagtatcctttgattccaaattcaaccccctaaatacaatctctgtattggtcttagaagctaaagactcctcagcatgaacaataagctttccattatgttgtggctgagtctgtgcagcaacaccttctttacgcataagttctaaagcaatcgtcctatttgatttggtaaccacctgcatagtcaacacaacatctaaatcaaactaatctatagcaagtttatcttctcttccttacactaaaaatgatgtaatagagagggttgacatacctcggac

SEQ ID NO: 24354 - DNA, 474 bp, Arabidopsis thaliana landsberg
tgatccaccccgagcgtcatcatttaagcccagggaagtgatctcttgagcagagagaaccattgaggaggctaaagagagcaccagaaaaagcatctacacgctcgaccaagagttctactagacaggacgagcaaaaccttcccacctcaacatcagttcctgattatactcaagagagtatggacgatctcatctccacctatttgaccgcacaacttaggtaacataacacaacacccacattttatataccatagtattttttttatctttgtttgttctttgctttagtcttgaattctttctcagatttttattacacaagggactgtgtaatttaagtttgggagaagattcaagacacatttgacattgtgttctttttcttatctcaaattttgcatcataaaaaaaattctaaaattttgaaaacgtttctgaaaatgctttaacacaactagagtgtcatgt

SEQ ID NO: 24355 - DNA, 632 bp, Arabidopsis thaliana landsberg
ccaactgcgaattaacttatgcatcttagggatggtagaaattctatatttttaatttataaccaatagataaaataatgagttttgtgcaagaaaactctcaaagtcgtctattttttcaagtttacactccacattcaaaaatgcaaaaatgaaatccaaaataatagtcaataaacctcatttttacaaatttatatatattatatacgtttttacgatcatatacatttgtttttgaaacttttaaagatatagttgaactctttatcttgcgagtttcgatttgatattatttattaaaatattaaaatttgacaattattattttagattttataagattattttgcattttggacgtgggggataaagttgcaaaaatgaacgacgttgaaattgtttttgcataaaatccaaataatgcattcattaattttttggcttttatcattttatgtatgcatggtattaaattggatagtttcaaagacctaaaaacacatgttatttttcaaaatataccgcacactcttttaccacatatatcacttttgaaaacaacgatatatgtaagccatgattatatatgtgagatataaataaccatgataaagacttttgacatgaat

SEQ ID NO: 24356 - DNA, 823 bp, Arabidopsis thaliana landsberg
  unsure (1)..(823): unsure at all n locations
agacacaccagttctctaagttgattgccagccctatttaatgctagtttttccaaatcattggcatcaggatgagatcaatttcttcaaaccattttgatggagatccaggaatcgtccgcttgaactggttattccattgaacgcgcaacctgttttttgcggcttgaaaggaatggtatttcccttgtaggtaattgccctaccacgtttgagaattacagcgtgttctttagagagtgtcaatctgtgcctttcattaaggaaattttctagtacctccatgtgctgcaagttgtttagaatgaatcatgtaataagcatattgatccacatgaaaataaaatgaattaatagggggtttgttttaccatggtatcaacccaattggtcggctgtgcaagctggattaggaatctgttggttatcacaacatcacccgagtaacgtgttccttgaaattattaaataattttaggttgtggaaaaagagacaaaatttatagaaaaataagaaaaataatcaagttacttatgtggctctttccgaagagtatcaatgaaaactttgaataatgttttgtctaaagaaagaaacaaatctatcttgtctatgagtcagcattgcggatttttttgcaacaacgaaacaagttggacttctttttcaaacaagataattattttttataactaaaactggttttggtgcaaaaaacacaatttgaacatttgtagagataagatacgtaattgttaaaatataaatgtttaantttgtaagaaattgaaaatttaaaatatataccataactatgatact

SEQ ID NO: 24357 - DNA, 582 bp, Arabidopsis thaliana landsberg
gcagcaaagctccttcaggccgccagctccaaggggcagaggtgtcaggggcttcggaggaagatatgaggatcagcctaggagaaactattgcttattctgtggagaggacaaaggccacactacaagaacctgccagatcaccatcctgaagcaaaaagagattgccgaagcagaagctcggcagaatcagccgaagcaagtcctacatactgcttcgtgccattctccttacataccagaatatgtgggcaaccaacctgcagcttctgttgcttcggcaagccattcataggcttcttggcctcagctcccaccgccaccactactgcaacctacttactcccgaagccagcagccagaagggcgccacgactcctaacaacaacatgaattcagggaggaattcgaagctcgtacattcaatagtactataccagaatcgaagcacatatactgaacgatatcctgcttctgaaataattttatgttatatgccattttgctttttaataaggaacaaacaatgtaaatttagctttaatttcttgtaatgagtttgcttctatcagaatgaaatat

SEQ ID NO: 24358 - DNA, 874 bp, Arabidopsis thaliana landsberg
agagagagtacatggattcgaagggattttgatctattccactatcttttgcaaaaaacatttccattctgccagtcgcaaaaatgaatttctttttgatttttttttaaatagaaaaacagagggagattacgaaataacctcgttgacttaataaaactacagtatccaaccaaagtccacggttagctccaggatccgacccactgttactgggttttcccccaaataagttttttttaacctaagtaacttttcaaaaatcaaaattgtctactcttcaactctctcgtttcgattccggcgaacttcaaaaatccaaaaccgtcgactttctcttctctctccgttcagttcaccgtcaccggtgacatcacttgttatctcctttctgcatcttaaccatcgccgattgtgtgggtcgtgttcgatttcgcataatcgttcgtttagccgccgttgaaattccgccgtgaccggtgctgttccaaaccgtcgtcgttccaaaccgccgacgttccaaattctaagtatcgaatagggcttttagtatagaaagtgaaaagtttttgatttgaaacattagatttggttttcgttgtgttgatttgaacggtttccttgattgttgtgtggttttccaaggtacttatgggtcgtgtaaggttagccactcctagtttgagtgaaagtgaagatgagagggtcacgatccgtgaagcggatgtgaaccgtgaagaagtggcagaggaaaacaaagttgaagacgaaaactgtgaacaagaacatccggaaaaccttaacgaaccggaagaagaaaagatttatgaggtatatacaaatttatgaaaattttgtgtgaatattgatatag

SEQ ID NO: 24359 - DNA, 2083 bp, Arabidopsis thaliana landsberg
ggggttagggcggaaagctgaattctttctttaccgttctttcaagccatgtcttttattcttcttctttcttctttgggaatatttaactctgcttactatttttatatatcagatcattaagtgttgtacaaaaaaacaaaaaaaacgtcattgttgatttgttgtaatgtttagaaatatgctatttttctagatatttttgcagtaatgctaacaggtatgcgatttctatcagttagtattcatgaccacatcatactgctctctctaaataattcagggctccacattacgattttttattataaaatctactagtacttataagaaagtagagttaatgaagtcgatgggaaccacttgggagagtggttacaacactccagtctagtcacatgtaacatgttcatggatacgacctagcttcctcttagtgaggttaaataatcctatagagcccattagaagtcaatgggctaacaaatatatgactggctctagctctagctctagctctagttctaaaaccaaaacccaagaccacaacaaacaatttttgccgtaacacactactaattttcactttcatctacaataatctccaaaattttgtattatgtagagatttgagtctgaatacgctaaaattttactcaaaaactggactataaattagaaattttggtctttttggattagcattccgttcgaattgatccgcataccaaaaataaaataaacgttgcggtttggttggttaataaacggacatgaccacataacacataagtcagtcacgagtcacatattccttttggtcaatcaaaagcccatatcatcatcatcgtccacacaacacaaaactatattcgatttcttccaccaccacacgctctcacatctctccggcgatgccttccttatccaccccgccgtcccaaaatctcgccttctcccctgccgcttctgccacgtcatccagactcactccctcctccaaaagatctttttaccctcatcgtctccccgatcccaccgctctctgtcgctgctcctcctcctccggcagcaattcttcctcttcctcttcctccgatgataaccctagatgggactctgcgattcaggatgttctcaagagcgccatcaaacgcttcgattcggttttgagctggtacgctactctggataacgatgatggtgagcaaggatcggagaatgtcgagaagattgatgatgattgggattgggaccgttggaagaagcatttcgatcaagttgatgaccaagaccgtcttctctccgtcttaaaggtttcctcttgatgattgtatctatcattgttgttaagagtcctgaagaaatgtttctaatgcggggattttgtattttggggtgtacagtcgcaattgaatcgagccattaaacgagaagactatgaagatgctgcgaggctaaaggtggcaattgcagctactgctactaatgatgctgttggcaaagtcatgtccactttttatgtaataactcgagttgtgattatagtttctaacaacactgtttgggatacttacttttgattctgaaagattccatttttgtatttgtcatagagagctcttctagaagagcgttacaaggatgcagtatacttgcgagacaaagctggtgctgggttggtgagctcattatttgtattttttttcgtttcttttataactgtggtttagcttcttattggtgttacattgttttctctatatggcttgcaggtagggtggtggtctggtatttcggaagatgtcaaagatccgtttggtcttattgttcaaattactgcagagcatggaagatatgtggcaagaagttataatcctcggtacttctgtcttctttactcatcgatttatctgtggcagtgtgggttttgtgtatcaaaacgccaaatttctcgaggtcctttgttgttttgaaagattgtgctatataacaatcctttctctctttcaggcaacttagtacatctgctgctggtgctcctctttttgaaatctttctgacacttgatgggaaagggaac

SEQ ID NO: 24360 - DNA, 954 bp, Arabidopsis thaliana landsberg
atatataatcatgatgaatacaaattaaatatgacaattgatgaatattatttttatttgtttacccttgttacttttattttttggatatatacttttatatctttcaactatgtagctaattggataaagaatcatcggtctaaagtctaaactgatcaacaatccagttttttttttcaattatttttcaatcagataaataccaattattagctataatttcgatgaattactaccgaattgtttatattccggacaaagttaaacccctcatgcagttgttccaatttttttttccatttgttccaattattagtagaatagatttttttttttctaatgcccttttcacactaccccttttcaattatacccttttctatttaccattttcatttataccttatttaaatttttaatgaccattttacccctatttgtaaattgatttagattaacaaaatgaaatattaatatttttcgcctaaaatattccaaaataaaatttcccgccaaaaagtttcgggaaaaaaaattcactccaaattcttttttcaaaaacattttttcctgtcaaatttttcccgccaaaaattttcgaaaacaattttcccgccaaaattttgttttcaaaaatatttttcccgacaaattttttttttggcgggaaatagatttacaagggattttaaagaggttttataagatttacaaagaattttaaaagggtgatttacaagggattttaaaaggtttttaaaagatttacaaaagattttaaagggatttaaaagatttacaaaggtcttttaaagatttttaaaggatttaaaattgttttaaaaggattttaaaatatttacaagggattctaaaagggtttacaatatttacaatgaattataaagggctttaaagatttacaaatatttttaagatttgaaagggttt

SEQ ID NO: 24361 - DNA, 860 bp, Arabidopsis thaliana landsberg
actcggatcattttaatggtattcgtcccgaacactcaggcaccatggcatgttcccggtttatgtgtgcctcttgaggtaagtcacatgttttatcattgttacattttcgtaattgaagctaacaattaaatttgcatgtattttgtgtaggttttattttttgaggtcattccatcacttagggaaagattcatagaagaaaaagagggtgcatatgccggttgtccaaggatgtgcaaagtgcatttcaagaggaccgagatgaaagggtttgcgcttgagcaaattaacaatgtactgggtactagtgaggttagtattttatagtattcctaaagaaaatatgattttatttatttctaatattcattgtttattatttccatagatcattgagagtataattagagagaaggatgaagaagtacctcttttcgctgaaatcaagggagtagaggctgattttgataagcacgatgttgtagttgatagttggatgaggcgtcttggtcaagggcgtgaaattagattttaagaggtgtacaacgaatatgtgcaggcccgaatggaagccccaaatgaagaggaagttcccacagctgttggaccgggacacccgacgttagttgatgtaatggagaacctccaagccaacaatgacaagctgaatgaagctttggtggcgcttatggaaatggaggaaaaacaagcaacgttcaaagcatttatgaatgagatgaaagctaaggtaaatctgggtgatatcggatatactgtaccataattggtaatatcgcgtaataccagggtataactaaattacaatgctgatgttctcccacccaccagatgtggag

SEQ ID NO: 24362 - DNA, 544 bp, Arabidopsis thaliana landsberg
gaacccaaactactcgaaaaaaactgaaacaatcaatagtatagattgtttccagttttatgggtcgtgggggttttggggttttcaagtatttattcaagttttggattttttgggtattcattgagatttcggattctacaccaaccaaaccaaaactcaaaaatagatattttaggatctattcggataatattcactatccaaaaacgaacggaaccggatttattttaactcagtttcaatcggactttagattgtatgcccatgcaggctgaatatcattaaaaaaaaggaaatttggaaaactgacttacaaaaaagttataattaagaaagtaacactaaaaaaaaaaaaatgatattctttatattttatatattaatcctaactttaccctctttccttctctttctctctctctctctctctcccttctccgcctctctctctactttttttctctctctccttctctccctctctccttctctctctctccttctctctctcctctcagccttttctccctacctctttttt

SEQ ID NO: 24363 - DNA, 586 bp, Arabidopsis thaliana landsberg
agcaatccagcaagggtttttagtgggtttctatgttgttgttttttttaaaaaatgagcccagatgataaaaaaacaggacaatccatttaggatcgttcctaaaattgggtttttcgcgaccaatagaaacccatacgtggcttcattttattgggtaaacgttttgactaaacaaaaaaaaaaaaaacgcgttttttttgttttctttttctctctgatttcttcgtggtcgccgacggagaccccaaatcgattctgcttcgaaccaaatcgaaaccctcatcatggttcgtatctcttcttctttgaatcgatttgattttatgagctttgaaattgaattttgaaagagattatgatctgattgcattggtatgtatattgaattacgaattctgggaatttttagttcgtgtactaagcttgagctgcatatgttgttattagcttgttcttagttttctatatgtttgcttcattctcagtgaagtcatattgttgtttctatattaacatagaaatttcagatctttatgtgtttgttctgtagctttggttgtacctatttcctttaaagaaaaac

SEQ ID NO: 24364 - DNA, 559 bp, Arabidopsis thaliana landsberg
  unsure (1)..(559): unsure at all n locations
ttaagatctgtaacaagtcaaatctcggcgccctggcaggtgttcgatgcgcgtctcacatggatgcagtagtgaaattatctacaccctattagaaacttaatttttctaataggtataaccgagactagttttctcgcacttaagctctggttcagacataaacgtttttctaataggtattacaaagacgtttattcgaaagacgtttttctaataggtattacaaagacgtttattcgaaaagaatcaaagtgatcaaataagatcggtagccattacaagggcgtttattcgaggaaagataaaaagagaaatgacctaaatactactaaggatcatcttctatcatgacaaaggcatggtaagagaacatttcatagcattcaggagagctacaggccagatggaagcatcaaatcgtccgatccgaaacgacgcggttgtctttgagaaggcgattcggcataggcacaccagctgaagaccaactttctccaatcctctgaacgaatttccacgctttgatcgtttgtnnnnnnnnnnnnnnnnnnntgac

SEQ ID NO: 24365 - DNA, 2390 bp, Arabidopsis thaliana landsberg
caatttttcggttacaattgcaaaaaaaaaaactcacataagaaggtaatttaacacacaaagactctttttttgttctcactcaaatttggaaatctttaaaaaccaattttgtggaagcaattcgtctacgcaaagtgtaaagttgcgatttattcttcaatggcatgacttaatggtggtgccaaaccactctctctcttaaaggaaaaaaaactcataactcctttaattcatccgttgactcgtctcgcgttataccttcgaatgaataatttatacagtattagctaagtatatgtttcttgttttatatagtcagcatattacattcttagatggtagtcgcttttcttatacataggttaatcaaattggtcgctgcatgaactaaagtagcaatactcttgatgaagtcaactaatatttacaaatttaactcacatatgttgttatttattatcttcctaagtatttgattgagcgaaagaaatgagtcaactaaaaatggaaaagaacaaactttaaaagttgccaatggagtgacaagtatcgccagttccccaagttgcctaaaaagcggcacgagtgatgttaggagtctttttttctgtcatccaaatacgtattacgagtttaattcgtttgacatttcattttgggtaacattcgatgcctctcaacttgcataagaaaagcccattaatatttaggcccactagagttttattatagttcaataatttgtattgaataggctaatctcttgagatttgttataatctgatcgaactagtttgttcattagtaaataatctgatcgaactatttgtatgtattttagtaaataatctagtcaccttaagcttatatttatagtttgttttctatagtcaaactactatataatctcatattggtaaatcatatatatttttattattcattactatatcataagctttcaatatgttgtagtttgactagagaacacaatgaaatgtgtcgaaatacaatatgacaaaatcctagaagttaacaattgatacggtaagattcgtcaggtttccaattcgccggaataacattataagctacgactacattatgagattcagcagaagtaagtctgatgttgaatggtcctgttagaggagagccagagttgaccttccatacagcagacctcatttcttgcatggggatgaatgttccgccggctggttgaatttcagtataggccaaatctccatcaccgttttcatactcgacaacaaatgaaatgtagtacggatttgctccagggtccatacggaaagctatgttagttcttcgatataaacattccacgctgatcaaaaaacaatagtcaatattttgattcgtatatcatagaaaatagttgaattttaattaaataatatttctgtaaagataataacaaaaatgaaaacattgatttctttgatttatcaaaaaaaaaaaattcaactcaaaacctagatatacatactaaaaggaaaaattttaaaacaaaaattatgtaagtatataagtaccgtatgtagtaaacacgtagaacaccagccgatcgaagtcgatcgccttggccaggtctggctaaggcacccatggctttgccgctaagatcaaagtgggctggttcagaggcacaaggaccaccagggcattcgtcggttatcgtcaccgttattggtctcctcgagcatgctggatgcccattgcatagaatctgataaataaaaatgttaacatatactatatagttgatgaaagtaaaatcttgttgtaaccatataacatacattcagatcttgcatgctatgtcaattttttttccaacccaaatttttaatgttcattctgattaattaaaaaagacatatgaactggtcattttattgaatataattacacaatttttttttacgttttatgaacaatcttagctacatatatatataaaattgtatcatcttttctgaaaatactattctaactaatatattacctaaaaagcattaacaaagctgaccaaaagggcataaattctgtgttacatacgtaacactatgctcttgagtcttgccctatatacattcatacaaacctgaaaacatgttccacatcctattccattgttgaacactgaaggacctccagctgaaaccatcccgtataatggtggattagccactgcgaaaccacaagctcctcctatatataaccatatatatatacacatttaagcatcatatatattcatataaagaatttactattctaaaatgtatgtgtgtatatatatattgttacaaatatgtaattttgttacgtaccggtgctaccggcgcctaaaggttcaccgt

SEQ ID NO: 24366 - DNA, 1317 bp, Arabidopsis thaliana landsberg
caagatcttcaaaatccttgaaccagaaatctctaatccggaaaacaaggccatgtctaaaacaggcggtttagatacatgtccacaatacgaacacataaattggccacccccaggattttggtccctgtaagattttgagcagttccgacaacgccttggggcatttttcttcaacttttgcaattcaatagcttctaatctttctctctccctaagttgggcatttctacgtacccgccaagtagagagctgaggcatcaaaacctcgtaccagaacaaagtaaccaagagcacaaatacacaagcaagcctgggagaagtaatctcaaaacgaaaagctggtggaagaagctgagagagagcccatagtccaatcaaaggtatgacaaaccaaggtagcatcgttgcaacctgacgagaccacttttgtataacgcacaatatacacattatcctccaaaagccaacaccttttcttcttcttattagacccaatagatggaagaaccctaatgacttagagaaatttcaaccgaggggatgattgtagtcacaacagaaaacccaaaccctaatcttattttaaggttatacaccatcgaagtaaacaagtctctagctcgaagcaactgtagttaaagattgttatagcaacatacctatgtagcaacagcaatggaatcaaattagacgaaccacaacgttctacaaaaagaaatcgatgaacccttgtacgcagagttcagattgacttgttgtgcaatgtgaattaatcgagagaaggtaagaggagacttaccgatagagaggccattgaagcaaagcatcagccaaaaagagaagagctttgaaattggggatggaagatgatggaaggagaatcctgattcggatcgtattcgggttgaatcacgtagtctcgtggctttcgttcgaatcctgctaacgaagaaaccgtaaacgcgaaagatttgagaagaagatgatgaagaaaaacgaaagaaaatgtttacaaggcaaaaccggaaccaaggaacgaaccgggtgggtagtcgggtcaagtcagtgcctcttaaacgccgccccacccatatatccaacggtttgttgggctaatggactaataatgggcatttcaaagaaatgttcaaataacatataaaacattttaagaatttttttgaaaaaagaatattttaaaagttattttataacatggtttagatatggtcaaagctattttaagtttaagcattgataaaagtttttatagcacatacatactatatccaatcattcattatctaccaaaat

SEQ ID NO: 24367 - DNA, 1090 bp, Arabidopsis thaliana landsberg
  unsure (1)..(1090): unsure at all n locations
ttcggctgcggaagaggttttgtaaaaagatcagcaacatttgcatccgttgaaactctgctaatcttcacatcacctctatcaataatctcatgaatgaggtgatatcgcctttgtatgtgtttggatttctggtgtgatctaggttcttttgcttgcgcgatggcaccattgttatcacagtaaagatcaatggggccagaaatactaggaaccacaccaagttcagtaatgaacttcctaatccannnnnnnnnnnnnnnnnnnnnnnnnnnnnnnnnnnnnnnnnnnnnnnnnnnnnnnnnnnncacagtgctctatttggaactcttccaactcactgctcctccgttgagacaaaagacaaatcctgattgtgatcggaaatcatctttgtctgtctgaaagctggcatcagtataaccactcacaacaagttcctcacttcctctgtagaccaaaaaattatccttagttcttctcaagtacttaaggatgttcttgactactatccagtgtctttcacctggatcagattggtatctgctcgtcatgctcaaagcacatgcaacatctgggcgagtgcagagcatagcatacatgatagatcctatagcagaagcatatggaatcttactcatccgctctcgctcatcatgcgtcgaaggacactgtgtcttgctaagagtgtataccatgagacattggtataaagcctttcttagaatcatgcatattgaacatgtgcaagaccttatctatataagtatcctgacttagtccaattattttgtttaatctatctctatagattcttattccaagaatataggcagcttcacccatgtctttcatcgagaaacaacttccaagccaagtcttaacagactgaagcaaaggaatgtcatttgcgaggagcagtatgtcatctacatacaataccagaaatgcgactgcgctcccactagtcttcttgtaaacacaaggttcttcttcgtttctaatgaaatcaaactctttgattgcctgattaaaacgagcattccaactccgagatgctcgcttcaatccataaatggaacagtgaagc

SEQ ID NO: 24368 - DNA, 1161 bp, Arabidopsis thaliana landsberg
  unsure (1)..(1161): unsure at all n locations
acatgtgtcacatactacagttatacatatcaaaagatagatagtatgaagtcagactataaaggtggtttacctattgaaagtttaattttgagactgcatcacatggatgctatctaccaaattcctttttacagaaaatattaatggctgttgaaacttagggaactaacaccaaagaaaatatgaatatacaagagtaaaaaatgaaggatttactgtaaagagaagaagaaaaaatgtccttaaaacgaaaataaaaataaaaattctttaaatagtaaaaatagggaaagaagaagttatctttgtagactttaaacctactcatagagccctaaatctgatcaggagctgtttcctttgagtttactttgtttgagcactaaaatttatgtttcaactaccgaacttcttttgcttcttttaggtatctcatcacgcgttatagaagaaaaaaaaaaggaataaaatttagggtttctgaaattaagaaacttccggtatatatcttcatcaataattaatcacagaaaagatatatgttgatctatgaactagatgcaaaattcatcatgcaatacacatatagatatatcaccaaccatctctgataggtaaataatacaatatcttatataacagtttgatttaagttagagaaaaggggatctagctcagagtaaataccaaattaacactctttcttttgagaaagatttacatatatataagaggannnnnnnnnnnnnnnnnnnnnnnnnnnnnnnnnnnnnnnnnnnacatagcaaacacgctcagatgagaaatctacagacatttttttttgtgtgggttctctcttcaatgatatgtttctcttcttgaaacttttagttatcccaatgagatcaaagaaggaactatttgattttggaagaataaaataaaaagaaaagggcaagcaaagaagaaagaggaaggatgagagagagagagagagagatgggtgggggatgaaggaagtgtacaaaaaatctgaaaagactaatgtggtttatttgcagacgaagagagacaagtgcggcctatgtgtcaatgatcctccctttaagcatcccataagaaggttgttgagatagggtttgatcccaccaccactaagtttgttttagcttgcgg

SEQ ID NO: 24369 - DNA, 807 bp, Arabidopsis thaliana landsberg
gggatgggtgaccgaccgaaatattttttgggtgcacatgagtgaggacaaagtgcgtacaaaagactcgtgttggtctgtggggatggtctatgatcctagagtgctgacaggagtaaatatctctggtttgggaatggatggggtgttacaaatcgtatcaaagctggccctcgtggtttcatgggcgtgtgtgggctaggagttcgggcatatggcgcatggtgcatgtgggcctagagtggtcacatgacatggcatatgacgacactggacatacagacatggccaagatgggtggttcgtggcttcgggttgatcgacgaggacgttggtcttctaagggggtggattatgatatcctggcgtcaatggatgctgatattctagcccaaagcttaatagaattaacagagtactcatacaaacaaggtgcatcttcttttttggaagcctacctcaaaataacctctaggttaagcgtgcttggccaaaagtaatcttgggatgggtgattgactagaaagtttttctcgggtgtgtatgagtgaggacaaagtgcacacaaaagactcgtgttggtctgtggggataatatatgatcctatagagcagccaggagtaagtaccactggtccagggattgaacggggtgttacaagtggtatcagaatcgaccctcgcggtttcacaagcgtgtgtgggctaggggtttgggtatatggcacatggcgcatgtgggcccagagtggtcacatggtatggcatatgacggcactagacatacagacatgaccaagatgggag

SEQ ID NO: 24370 - DNA, 1055 bp, Arabidopsis thaliana landsberg
cgcaagggcttgttatttgtaactccattaaacctagaactcaaaaccattcaagcattcacctatgtgttttctcttaactcattaatacaactccatccccaaatgaacttggtcaatcattataatggccattaataaaggttccacaagtaagcaacgtaataaatttcaacacaaaatccttacctgcttcaattccggacgaggcaaattcgacatagtgaagaacttgatcgcatcgttaccagtaatacggccatcgccgtctgctcatttacaccaaacagagaataagcttttagcgcatatagtgaagacgagaatcgaagactgaagaacacaagacaacaaaatgaacatgaaacgagacctgaatcggagaattcgaaccattccttgtagatcatttgattctccttggaacaagaaccagctgcgacggattcgatctccatctccgattgcaaaaatctagagatgtaccgattaacaaacttctcaggtgtgaatccagatttgtggattcgcagatattgaacttatacggagaagaacaaaaggtaagctaaacaacaacaattacaaaaaaaaaaaaaaaaaaaaaaaaagttggttgatgtatacgtgagattacggtttcagagaaagcgggttcttcgtctcgacggcaagggagaggaaaaagaattaccaatgcaagaaattgccctttattttcaaaatcttacacatatgccccagaactgttgagttgttgaagtaacccctattaaaaatctatgtgatagattttgctgcgtcgtctcaattattggtagaagattttgatagctacttgtcaaggagcattaaagaggtttgaataacagattggtttcttggataagtgatgaacttattttttgtgaaatttggtaaatgtacttttatgtctcaacatggtaaaaaaattttttgtccacaagggtaaagactttagattttaatacctttagattttaataatttgattgatagatcctacatttaaaatgaaattctgttgacaaaaa

SEQ ID NO: 24371 - DNA, 704 bp, Arabidopsis thaliana landsberg
ggaattatgcaaattatatgcgttcatgatatttttgataacaaatctaaagaagctaataaatacttttctatgtgcagaccctataaagaaaggggagttagactggacaaaacgggacaacattatccggggaatcactcgaggaattctatatcttcatcaagactcacggctcacaatcatacaccgcgacctcaaagccagcaacattctgctagatgtcaatatgaacccgaaaattgctgatttcggaatggcgagaatttttgggatcgaccaaagtggagctaatacaaacagaatagctggaacacggtatatggctattacccttgttatggcctatgtacggaagcttcaagaatgccattaaatggttgtgtagtaatttagcttgtgttttactattgcagtggttacatgccaccagaatatgtgatgcaaggccaattctcaacaaaatctgatgtatatagttttggagtcttagttcttgagattatatgtggtcgaaataacagattcgtccaccagtcagacactacagctgagaatttggtgacctgcgtgagtaccaaagaagaactctgttcttgattgatgattaaatgataaattttggtttttgactctatgttcttgattcttgaatgataactaaattatgttacaggcttggaagttgtggagaaaggggtcac

SEQ ID NO: 24372 - DNA, 3912 bp, Arabidopsis thaliana landsberg
  unsure (1)..(3912): unsure at all n locations
aaaaatcaattatatgttttcacaaattataaactcatgcatttacacatgagtttatatgttacactatcgtctaattaattatttaaagtaaacgaataatttggttatacgcaccttgtgactcctctataaatcgaggtacgttgtccaaaactctctacgttcttcttcggagtaggcgaagcctctgagacagctagaggattcggttgttgtttatgtacgctagagacctccgacgagtgtccaccggagtagtttcctaggaagctagcggctattgacttgagctcagagtcgtagatctcggcggcggacggaggatgaagcggtggctgtaggtcggaagagaagacaacgccgccaagagattgcacttgttgcattggtcttgttgtcgtcgttgaggctcctccgccgaggaagttctcaagtttaggaccgccggggtatacggaaagaaccgccgtggcatcgctgggtgaaactcccggtgacccatcttgccgttcgactgaaaattgttatcgtttacaaagggtattgaggtaattagtgttttactttgaaggagacaatatctagtgaaagattctataggggaaattaatagatactatttaattttataactagatcttatagatacaggattcactagatttgactgattccaagtacaccgaatcgaaaaaaatgatataagagaaacagaagcaattaattaaaaattgactacttactaaatctaaagtaagcaaaactttaattaaaccaaaaaaggtaaggaactggtctaggtgcaacagaacacaaagttggtctgtcctaattcatacaaaatttcaaaagacaaaaacactaataagttgagagagagggggagagaaagaaaacctggagaagtggagaaagcttgaaagagagagaggtgagaagggtgaggatgatgatgatctgatgtggaggaagtgagattagggtttgaggaagaattgaagttgttgttattgttggagagagagaaagagagccagttctggtgggaggaggatgaagaagaaggagacaaagaagaatcatagctagaagaagaagaagatttgttgttattgttcttcatctttgggaataggtttttttttttctttggggactcgtgaagtctttggatgagagagagagaaagatctctggtgatttcacgactttggaaatagtggaaggtctctcgtcttttaactccttcctctagggtttgagagatagatagagagagaaagagagaggccccgacacagatatagaggtcaagatgagagagacgagtgaggaaatgtatatgagagagagaacacgagcgtcgagactctgtagtctatattccaagctaaataaaattattttgataattttggttagaaaatcacatgcagagactacgtataatcaatactagtataaaacaattagaatgtcggatgtatatatttagctaatgatagatctatattaactagttttagtatttaacacaaaaaatacttaaaattaacattcgcacatcttttgttcttcaattaccacatctcttccacttaatctgaagtttttattcctttaagctgataataaaacataagaaaatcaatttatatcagtgttgtcaccagctgctacaaaaaaaagtcacatatttaccaaagaatgtaatgatgaaactaaattatttctcaaaaaagtgtgtaaaatgtataatgaaaatagtagagcagagagagagaggaagacagcaaaagggcaagtggaagcttttgatgggatgaactgggcggcgactgatctcacgtcactttcattttatttttgatttttttatttcattgtgtatttctgttttgtgtttctttcttgcgacgtggaaggacgaacggtctacgtattataacacatacggtgaatcttttgaacatttgttttttgtaagtaaatatatttataaatgtcatgcaagttgggaagcacttccgaaatagaatccaaatgttattatcttatgtaaatgtagcattatttgcagaaattttttctacttcataagattaccaataccatgtcaaattaaaccagtaatcttgattatgggtcttattgtttacatttcctcattgttgtcgatgaggcttagcctcgatcctaggctaattttttaattaattgtggagtttatatatatagagcttaattattactacaaaatagtgcaaggaaagtggaataattggagatggtccaaaaaggtgacgcgtgtcccctctgttctgtatccaattattacaaactttggccttcctcctactctnttcgtcattctttgaccactccaataccatttgatattttcatctcctttttaaaagatttatatgagtaattttggtacttnttcactacattctacgattcataaaaataaaaatcgcttttcaaaaaatgaaaaaagagagacagaactcgagcgtcttgtggattcgctattcatatcacagctttggcgtcaatttccattcttttcatcaccatctgcttttttggggttctttttttttgcaatgatgttgaattgttaataattcggtgatacacatatcgaatttaagaaagcattttacaattttattataaataaacagaattcgccaaatctagcttttgtcgtggcaaaacaaaaggttggtcggtataaaacaattgtgtttctcggaataattgcttatgtaatcctttgattaatctacatttatgttacttccgtttctttttttccgataaatacgtataagacaatactttgcaatgacaataatttatttgatataaatctctaagtatattgaagaaagttaatgcactttgttttaccaaattttgagtgccacgatgtactaatgcagcactgtacaacacaccaacaaaccaaaacaatgttttcttcctatttagttgtggtttagcaacatatgcacgtaaatcacgtatagttggtacgttttcgaagctttccgatgcaccgatgagtatgaccgacaatttcagttgaaactatagcgtttaaagtttagcgttcagagtttgagtcaaacgcgtgggatgaagaattggtgagatctgttaaaaccagtttgtaagctattttaatcacatgtttggaccgataagaagaaatatagacgaggtttaattatgtatgtatgtggtaatggcgattggcgagcacatggtttgcatgtaaaccgcccacacgtgtcagctaccatgcacacgtgtcatctgcatgctgcgttatcccattgtctatctcttcaccctgcaccattatcgtgtttttaccaattatagtatatgcttcctttcaattattgtgttatacgcatcgacattgttttatacaccaaaatgcaaaaacagtcgtctatacatgtcttcttcttttacttacatatatgttctattatatataattttttcaaattgcttgtttaagatgatcatattgatgtagacggaaatatgaatatatcatatgttgatggatatataggtgaaaatacactagatctaagaatgtaaaagattaacatcaattatctacttatgttccaagattattgatgttttaagttttgcacataaattaagaaaaaagtaattttttgtactttttaattattattttgttagtttaataatattattgttatctctctcctttcactattggccacaaacaaaattaataatcatacttttacaaaacattaatttttatggaacaagtaaaagaacccaaagcatcaaataatttggaagagagggaaaaaataacaacgctacaaggtttttataagt

SEQ ID NO: 24373 - DNA, 1934 bp, Arabidopsis thaliana landsberg
gaccctgataagtgtgttgtctatgtgtttattcatgttattgtagtttcatgcgttctacctaaagttcagggaattgctgggaaaccttaaagtttgcagtttttttttcttccagttcttcacttgctagatcttagaatttcagaaaccataaaatatggagaacaaagaagttgatgtcacaaagaagaaagaataagtgaacgagcgaccgagtgaaggatctcgtgtagcagtagaagccgcgatctcgtttctctggtttttggtggcaaatcatcagtcgtggttctcccacttctttgataatcacagcggcgagagaaaattttgggcttctctaatcaaagttgtgttctcttatatagcacttttctcaattttcaattgatttttatttcctgagagtaaacgatttctcatttattctatattggtggtttcagattttagcttgagagagagaaagagagataaaaaaaacttgatcagtgatgcttttgcttcttgtggagtgtttgaagatttttcattgatggagcacctttgtatcaggttctttccacactgatttattcatattgagttttttttattgggtgtgaatgttatggtgaattgagtttaaacttgtttgagtagatattcgcttgttatgatgcatctgattccccaaacacttgcttttgtgttgatcttatattctctttgatttaattttgcagatgattctttgcattacattaatttatatcacaaactgacgtactgtgcatccatgaattcaacttaattcaaatgattggtgaccatagatgatagtacaaacatatttggtcagctggatgcttacttgttaatgtcatctaaggaaatctgtccattcagacgcaaacaccgatattatgctccttttatacactatataagtatatctgtttcttgttatatctaggattagtagacaattttggttataatgttgggagttttcatatacaagtgaataaatggtcaaagaaaaatggacgatgtactttgaattggtgtttgaattggtaattatcattcatgtataaacttgtgtattgaaatgaaacgacctcatgagtcactagattaccacatggactaaaccgcttggatagtcatcaatggacaactatgtctttgatttgctgcaaatgtgttttattggttggtaaaattatcattttttgtatggttgagagttttgttttatggttttagatttagtggagaaggatcatgggagggtttgggtttaattttagggtaagtaaattaggatttagtgtaaagcgttaagggtagagggtttacacactcgtatgaaccatttttgaatataatcatatgaatattaccataggaatgatcctatattttacagtttttacattaaaatgttttatctgcacaaacaaatacacgaaagatgaataacaccaaatctaaacattgttcaccaaaatcaaatgaaagaatacttcattagttggataacatatcttcgaagagtaatagacggattcctataggtgacaatcggcaagtacgtgttcatctatgatttttagaagtagagttgtatccatgaaacatcgaccaaatgaatatagtgcaagaaatgaaggtgtatccacctagcgccgaacaaatggatatacattttcgtgttttctcgtaaacttttcttgacatccatgagtcgacataagtataaagttgccagacaagacactagagctcacagcggccaccgcagcctcatggaccaaagtttcaaaaaaagctcataaacatcaaccaatcttcttgcataaccaccacatacccagccttatgcgtccaatcactttccgtctcgcaaaatgacatccaaacatttttcaattcaaaaacaaaga

SEQ ID NO: 24374 - DNA, 904 bp, Arabidopsis thaliana landsberg
ttatatttacccgagtatttttcattactattgatgtcgacggtaatatatacttatatagaggttgaaactagtttattttattttttatgtatacacggaaaaattattttatcacattttatttttcaacatgtctctttgttctacatgtagaggttgaaactttccaccgcggcatcaagactcgatgcagtttgtgattagcagtttagagacttccttttgatttggctcagtttcttttaccctccctattgtgttttccactttcttaggctttgttagtaatgaaaaaaaattaaaagattatgatcaatataagatcttctctcattagtttaaattagaagacaaacaaaattccggccaggtcctccgaagataaaactaacaaaaaaacaggagaatgaacattgacaaaatcaacatgagattaaggacaacgagagttccggccaggtcctccgaagtaaaagtggggctctgacatatatgttttccggtggagcagtgtagaataacagttgtactcatcagcatactcggatagatactgggggtatttgagctgcatggaatagtccttgatcctaaggttggtgtggaaacaagcttcggcccagatgtaagatgcccattgtccactccccattgcggttgtcgtgtgtggcttcttcaatactacgttagggctatgtacttctccaccccactgcacagctgtggcgctgtgttttaggtagctgaatagtgtaccggccaataacccaacacgttgttttcgcaagtcaaccaccagtgtccactgtttggatctacaaatacaatcgatcattaaacattaaaggacaatacaagcccgttccaaaacatattcaaaaaaatttaacaccggtttttg

SEQ ID NO: 24375 - DNA, 604 bp, Arabidopsis thaliana landsberg
tgtgggctggttgggcagcaaaggtggtgtgtgaccacttgggctttggggtcaagactggtctgccgtatctgtggcacagcaaagccagtaacccattcgtgaacctgaagaaagagcataagggactccactggcaagaagatatggttcctttcttccaaaaccttcgtctctcgaaagaatctgacactgcagctaaatgttatatggaaatttcaaatatgacaaaagaaaagctcactaaagtggatccttactttgagaagttggctgatgcaatggtggtttggattgaggcgtgggaggagcttaacccgccggttaagaagaagcagagcgatggcaaagatgtcaaggccaagtgatgaagataatgagtgatcctattgttgctaatgaataagtatgttgtgagtttatagattatatgatattgtatttattttctccattttggaagtgtgcgttattatgtaataatttggcatgtattaagcgtgattggaagaacaagagaatcttatatttctagtacatggatgacttcgttgatttagttttacactcgtaatgattcttcgttgatcacagcgttttgaaa

SEQ ID NO: 24376 - DNA, 501 bp, Arabidopsis thaliana landsberg
tctacttcgtgggtgtctaagacacttgtctctctaaagacatgaaagcaaccttttttttccttttaaactaacaacggttcttgagtgggttataattaacacatgggcattaccttttcaaaaacaaaacaatatcagtttcataatgtgaatgttaattctcaatgtgttttacaaaatcagccaatctaacaaatatataaacaaaaaaagctatgattatagtttgcgaagcctttgatgatgttattcatatggtatgtatggtatgctacttttaatggcttgattgccatgcactctaaaatcacatcgttctcatttcccttcactcccctgaggtcaaaatctacttaagagtttggaacagatcaaaaagcaaccttgtaaataattttctcagatagttagttaagtggttttccattgatccaataaataaacagaaaacaaccatgagatgtagtcttatattttgggtttagaataaaagtttca

SEQ ID NO: 24377 - DNA, 1496 bp, Arabidopsis thaliana landsberg
  unsure (1)..(1496): unsure at all n locations
aaatatatcatcaattctactcttaattgatttctccaaaataaaaataaaaaataaaattttgtaatttaattaagtactattttcattatactctttttattttattatttttttattatcaataatcatgactattttttttattgtgttgtacttgtttgctacctaacctcttcttagtttagtaatttaattttgagtctttgataaccttgacattcaagttttttcaaataataaaccttcaaaatattagacctaccaaataatgtaatacacgatcatttctcttatattgatatatgcaatgacagacgatctaaaagtattgactttaatgatactttaatttttgtattctttttattcttttcatatgaatactcttgaaatcttgttcagtttatatcaattatatatatttaattatgagcctgtaacatagttgttggagtattatatctagaaaataaataaaaccataaatagtttatttataatcaagttgaacaattttcaaattatccaagacacgatcatttctctaatattgatatatgcaatgacaaaagatccaaaagtgtcgacttcaatgacattcaatttttgctatctttttatttttttgtacgaatactcttcagatcttttttagttgatgtcaatcgaaactttaatcatgagtctgtcacaatgttgttgaagtacataaaacaaggaattgatttatttataatcaagttaggaaaattttaaaccacaaaaatagcatagttacacagaattgtatcaaaatatcattattgttgttatatgtattcatgaagtgaaaaaatattaaaatcttacaaataatcagctttatacacaaaaatatataaattgatatttcaagtcacaaatgaatctaaccataaaaattgtaactacatattatagatctaattttattaacaatacaagaataaacaaatagtaaatataaattagcataaagaataatcaatgtaatttttttttaacaattttcataacaactcacgcgtagcgtgggtaatcatctagttagaattgatttagttatgaattatgatgtgtgatttggtgagtgtaagtcactcacttctcatgtaaactataatatattgaatctcctctctcttctctctttcgcaactttcagagagaggtagtttttgatgtttgcnnnnnnnnnnnnnnnnnnnnnnntagccgtcccgagtggctcggacttctgcccggtatctttcagctttgatagtggagatagctggtttacgtctggcaaacccagtttccatgaatggttttggccggttttttatcttctctcgccgtcgatcggtttataccgattgcttttcacttttatttcaataatttctccagatctgagttgggaattgatttttaggtactagaacctaaaaattaataattctggcttgcgattctggaaacttcgatttgca

SEQ ID NO: 24378 - DNA, 608 bp, Arabidopsis thaliana landsberg
agcattgtcacttagggcagaatcgtatctgttcccgtttgtttggattaaaagcaaagtcaaattattacacttagtttgcaaacaacgaaaaaaccgggcaaaaagaaacagacgaaacaaacacctgtcgtcgaatgttgtacgaccaccacaactgataataacatcaatctcctcactgatcatgtttgctatttcagatttgatccctagattgtcttcctcaatgtctccaattactggaatcaactttctcttcatgaaagcttcgtaagagctcccatgcatttgcttcagaagcttgaacagatccgagcttatgatctgtttggaacaatatatataaaaggatataagaagggaaaaaggaattaaaaaaagaaggttgagaatggaaatgtttaaatcagacctcatcgtagagtctcttgtttgctgattcttgatccttggatctcatcagaaggaagatcttcccaatttcaagactttccctcaacagtttctcaatcaacactgcaaaaaacaatttttcatcaacccgaatatcagttacttggacaataagaaaactctagtttagggtatttcttacctttggcaag

SEQ ID NO: 24379 - DNA, 978 bp, Arabidopsis thaliana landsberg
cattatgaaaaagataaggagcacttctttcaccgctggctatgtaacgcattggaacatggtgtctccgagcttcatgtacgtcatatccaacaaaaccattaagaaactctcggttacctgtttgaactatcgttattatggtactgttcctagaaatatttcatttgacacaccgaatgttgttgatttcaactactctgattatcttcgtcgtgaatctccacaatgtcacttggattcacttgccaaagctacattggaccttcatttcttcgaagatgacaagagagcagatgtgacagatctcatcagtgggctacataatgtcaagacccttcacttaacttcttctactgtcgaggtcagtacttgtgtgtatggacaatcatctcatgttttggttaagaacaggacatcattcattgtctgtgtttcaggttatttcggtatgctgcaaaggtggactaccagtgttcaacaacctcgttgatttagtattttctagttaaaaagaaggttggaaagtgcttctgccacttctgatagagcgttctccaaacctcaaaaatctagttctctcggtatgaagcaaaccatctacaattcttactttatatatatatgattgtggcatgacattagagtagtctctcttctcgatgcttcagggtctggatggtttcacatgtagacgacatcggtttactcgaattcctcacatgtagacgacatcggttataaagatgctgagtataatgaaatgtcaaggatatccaagcgaaaggaaacacattagatatttattagtgaatatggagtgtcttgaagtggcgaaagttcatgctgcagctgaaatggatgacaccaaaaagatgcaactcacagaggatcttgcgaagtttcctgccgcttcatctaagctcaagatacaagtcatgtgatctcatcagttattatatgtctaatacaagtagg

SEQ ID NO: 24380 - DNA, 6870 bp, Arabidopsis thaliana landsberg
aggtatcacccaaagattgggagaggcactcggcgaagccaaggtggcgttgtagacgttctatctacgaggaaatacaataaataagagccatttattcttggtacgtaatttttaagaggtcaattatgtttctctgttaattattaatactcttgtttgatatatgtataacttgtgtttacaggatctcaagcagatcaggtttgttatattccgtatccatatacgaagaaaccaaagaacatttggctcaatgttttaaaagtcaatccgaggggaaacatttctggagaatatgaaaacaatgatccgactctttttcaaacagaaaatgatgatgctgttttactcactacaattgaagatcttgtactagaaaatccggtggaaagcttaaacccaataatccttgattacgatgtcggggatgctgaaccagaagacgaattccgatgtaatttatcgtcctcggacgaagatgaagtagaatatgaagagtaataaatgtgtgaagtatatgtttaattatttaataaaatatttgaataaattgtgttttataatatatcattgaacatttaattttttcatgaatatttcttatgcaaaattatttcaatttcaaaagtataaggttactattatgctactacttggagactaaactataatttggtgggcttccaaataactaagcccaaatccaatagagatgtgacaatatgactactcaacaacgaatctttgctttgttgggtttcttaatatcgaagcccaaaccaaataaaaacagtgacgcttatgcgattaattagcgactacagcttactatgtgacaattatgcgactattacatgacaacgttttaaattgttaggcttctaacaattgaagcccaaacccaaatcattttggtgacagatttgcgatgcattttgcgactacagcgaagttgttgggcttctaattctcgaagcccaaacctaataaaatcgacgacagatttgctactcttttgcgactacaggcgaagttattgggcttttgaaatttgaggcccaaacccaaatgatttagtgacaacaatacgactactatacgactaatacagtgttgaaaaccctaaatcgtgtcatttctcattcctaacacttagccaaaattttcttcgatctcgaactctcttcttcgtcttcttcctctcaaaccctaagatctctcgatctgttcatcttcttcttcaatcttcttcaaacttcttctatcttcttccatcttctccatctctcgatctctctatctctctcacttgtctcgatcactctatctctcaatctctcgatctctcgatctctcaatctctcgatctctctatctctctcacttgtctcgatctctcgatctctcaatctctcgatctctcgatctctcaatctctctctatctctctatctctcaatctctcgatctccgtcgatcttccatgccgaacgccggtcgaggaggctcccgaaagaggaagacgacgcctaatgttactcagagagtcggcggttcaacgacgcctagacctcgggatctgccggcgcagtacaacttcactctggcgccgacggttcatgttccaacgacgcagccgactcaagctggtgtccgttcaacgtcagccccccacgtacgcgactatccaccgcctctacaactcttccagaactccaccactccacctcagggtggtggtgctccgcctcgatctaaagaggtccacttcaatccaccgccggaagagcctgctcagcaagatcctgagtcgccggaagagccagctaacagcaacccttcgtctcaagggaacaactttcaagaggaagttcctacgacgttgccggagcttcaagaagactcggcggtggctctgcaagatattatgtcagtgccaaacagggagcagtggacttgtgtcttgtctccaattcccaggccaaaaaccgagtggtaagtctctcaatctttaatttgttgtgtaacatagtagccttgtgaatactcgtgtgtgctcttgtgaatacttgtgaatccttgtctttgcttcgatttgaacactcgtgtgtgctcttgtgaatacttgtgaatactcgtgtgtgctttagtgaatacttgtgaatacttgtgtgtactcttgtgaatactcgtgtttccttgtttagttctatacttgtgaatcgtgttctcttgttaatcgattctcttgttaatcgtgttctcttgatgctctattgtggaagttgactttgttctcttgttaattgtgttctgttgctactcatgctcttgttatgttctatagtatgttttgcattcttaattgtgttcttttgcaactcattatttattgttgaacatagttgacttttgaacttagttgtgttctattctattgtgtgcttttgacttttgaactcacactcattctcttcttaattgtgttctatactgttgtgtgctcttgttcagttctatagtgtgtgttatgttgtgaatctgcctcaattctgcctgtgtagtgtgtaacatagtagacttgtgaatctgcctcagttctatagtctgttctcatagctgttgttgcgttttgattatttaacatgtgtacttctttcattgttgcatgtgcttggaggtttactcgcgagagaggatgtaaattggttcgaaagatcacgcggatttttactcaaaagttcaatgctccctactataattggtcctgtgtgccattggataaaaaagaaagattgtttttagagtttgcggtaagcttcttgtatttctccaactttcattagactgtactatttaatctgtcatttgttcactaacttcacactttttttgtagaaaactcaccactgggatcccttaataacagggacagtccaatactacttcaatgagatcgttaagaggcgcttgaaggacatggttagcaccgcaaggagaactcgagagcagcctccatggattggagaaactctgtggggaaccatgtgcgactactgggacactgaagaggcacagaaaaggagtaagacatattccaaagctcgtctctctgaccgtaacggtctcggtcctcacgtccactactctgggccaaagtctttccaaaaaatccaagatgaattggtaagtgtttctgcaatcttcccatgtgttttagtgatgttcgtttaactgtgtgtgatgtttagtctgttgatagtaataaagcttgtgatctgtgtttgcaggaagaaaaaatgggaagacctgtccctcttggtgaggtgttcatctagacacacactaagtcgtatgggacttatgttgatcagaaggcagagaagattgctctggcgtatcagcagaatgtgagagagaagctgtctgaactagaggcggctgcttctgctgtgtctgatggctcttcacgtcctcgggatctcacactagatgagtatacagccatatttcttggggtaagatgttctttgtctttttcagagtgttagagacatttaggatctgtcactaattatcttcctctttatttcttgcagtccacagaaagggatgcaagaggcaatccttatggacttggctgtcttaaagaaactctaggcagtgccaactgccaactccccggagactcaacctttaaagccttagaagaacggctgcaggaagctccgcggcaaattgaagaacaggctgcatataacgagaagcgagatgctgagattgctgcccaagaagccgagacagcccgagtcataactgagcaaaaggacaagctcgagcacttgtcattagtcgagaagtatcatcgccaaaccgatccgcagttcttggacttcattgccacacacatcttccacatccacaaagcgtatcccaattactcccccatctaatgatccatagaatttaggtttccaaacactagttgtatcattcaataagttgtatgtttgaacaagataattttatgttttgaacttgattttcaatatatgagcagtgttttttcatattttatagcatatcaataacaaacaagaacaatcgatgaacaaacaagaacaacaagaaacccaacaattgatgaccaaatctttattcggaccaaactattagtcgcaaaaaagtagtaaataagtagcaatatagtcgcagaatagtcgtcaattagtcacataactttacggcaatcataagactaaacaaattagtcataaaagaatcgtaaaacagacgtccaatagtcgtatatacttatacgactatgttatgacaaaaagtttcaaatccttggtaaagtacttttaatcgtcaaagagtcgtcgaatagtcgtaaacatatttacgactattttatgacaactggaaacatacccagggtttagaatatttaatcgcaacatagtcgtaatatcgtcgtacacaattaacgactacgaaacgactacatgttctcacacgctctgtacagtacaattaatcgtaggatagtcgtcaattagtcgccgacatagtacgactacgtaacgacatagtcagttgtcgttaattagtcgttggtcaacgacaataatacgacaactgactaaacagtgaaaaatcgtcgttacgtagtcgtactatgtcggcgactaattgacgactatcctacgattatttgtactgtacagagcgtgtgagaacatgtagtcgtttcgtagtcgttaattgtgtacgacgacattacgactatgttgcgattaaatattctaaaccctgggtatgtttccagttgtcgtaaaatagtcgtaaatatgtttacgactattcgacgactctttgacgattaaaagtactttaccaaggatttgaaattttttgtcataacatagtcgtatatacttatacgactattggacgtctgttttacgattcttttatgactaatttgtttagtcttatgattgtcgtaaagttatgtgactaattgacgactattcagcgactatagtgctacttatttactacttttttgcgactaatagtttggtccgaataaagatttggtcatcaggtgatgggtttcttgtttgttcttgtttgttcatcgattgttcttgtttgttattgatatgctatacaatatgaaaacactgcttatatattgaaaatcaagttcaaaacataaaattatcttgttcaaacatacaacttattgaaagatacaactagtgtttggaaacctaaattctatggatcattagatgggggagtaattgggatacgctctgtggatgtggaagagtgtgtggcaatgaagtccaagaactgcggatcagtttggcggagatacttctcgactaaggacaagtgctcgagcttgtccttttgctcagctgtgactcgggctgtctcggcttctcgggcagcaatctcagcatctcgcttttcgttatatgcagcctgttcttcaatttgccgctgagcttcctgcagccgttcttctaaggctttaaaggttgagtctccggggagttggcggttggcacaacctagagtttctttaagacagccaagtccataaagatagcctcttgcatccttttctgtggactgcaagaaataaagaggaagataattagtgacagatcctatatgtctctaacactctgaaaaagacaaagaacatcttaccccaagaaatatggctgtatactcatctagtgtgagatcccgaggacgtgaagagccatcagacacagcagaagcagccgcctctagttcagacagcttctctctcacattctgctgatacgccagagcaatcttctctgccttctgatcaacataagtcccatacgacttagtgtgtgtctggatgaacacctcaccaagagggacaggtcttcccattttttcttcctgcaaacacagatcacaagcttcattactatcaacagactaaacatcacacacagttaaacgaacatcactaaaacacatgggaagattgcagaaacacttaccaattcatcttagatttcttggaaagactttggcccagagtagtggacgtgaggaccgagaccgttacggtcagagagacgagctttggaatatgtcttactccttttctgtgcctcttcagtgtcccagtagtcgcacatggttccccacagagtttctccaatccatggaggctgctctcgagttctccttgcggtgctaaccatgtccttcaagcgcctcttaacgatctcattgaagtagtattggactgtccctgttattaagggatcccagtggtgagttttctacaaaaaaagtgtgaagttagtgaactgaacttgagcagccaataaaacaaagactgaagaaagcaaagagtcaggaagcttaccgggaactctaaaaacagtctctctcttttagccaatggaacacaggaccaattatagtaaggagcattgaacttttgagtaaagatccttgtgatctttggaaccagtttagaccctctctcgcgagtaaacctccaagcacatgcaacaatgaaagaagtaaacatgttgcaaaagtgaacaaagttattttcccaaaagaaatacaagtcacacgcgactataaaccatgttccacaatagtactgtctcaacaatatagcatcattcacaatcaaagcatcatcatttgtgtaatataaaacaacataacaagagtttagaactgaactaaactaatgactaagaactaatgtaatcacaacacaacactcaactatgtttgaccgattaacaacagagcatcaaacaacaataaaacaggcat

SEQ ID NO: 24381 - DNA, 2758 bp, Arabidopsis thaliana landsberg
taacaataataataatgataatgggagaaagaaattccctaaaaatttaattgtaaatgggagaaagaaaaccaagaaggttttgtttcatctcctttcttcccataagcctttttcttgtattggtcccttctttttttctaaataaaaaaaaaaaaactgttttttgtgaaaattaattgaccaaaaacaaagaaatcttctttcttctcttctcttctttgttaatcttgttacccttctaccaccaccacctgtaaaaaagaggtttttatctaccacatagagagaccagacaagaacatgtgattctttggttaggtctctcaattctgctgagccacaagctgatcgagctgtatttgctcaatccaagcttttagcccagcatgatccattaccggttcaaccggatttggctgcttcatcacgtgttcccctgaggaagatgttgctgctttttctttggcttctgctggagtctccttaccagtgactggacccatgacacatcaggctcatcaccatcaaacgatacgaaagatctccccttaccaagggcttctgagctcattccccaatccggttgaccatttgaagatcccccttttgatgaccatgtgttgttgtttaccggtgaaccaacgattgggctagagtttgttctgagctctctggagctaaggctacggaactgatgttgctgctgctgctgctgctgctgctgctgttgctgttgttgttgcttcacgcactgagccaacatggaaacccgagcactcatgggtgatattggttcaacaacattccgaggagacattcttcctccacctgaaaacaatgagtggtcaacgctctttggtgaagaaaagcttgtgttgattggagacaacatgctctgctgctgctgttgctgttgctgttgttggaactggttgaagacagctgacttgtgtgtaggcgagaacaccgcgcaagcctaaagcggaatcagtgaaacggggagatgaagagcggtctgctgagaaaagatcttcaagattcgaaggaggcattgatttcatccgaccagaacggctcagagcattggaatactcgttgaggagttgctgctgctcgtaatccgctaacatattgaactcatccgtcgggatatcccttgcattgagagaagaccttagcctgcttgactgtagattgcttcctggtaagtgcaacgcagggacatttggttgtggccaagccatattcgaatgagacattccgttccccgctgctgatggggaaagcggggacatgacagagactcctgatggagaaccaggaaggagactcaaagcagctgcataatcagcattcgatctaggcgaaggaaccgctgaaccagttgatgcgtacaaaggtcgaagctcctcgggtgtatgcgcaaagaaacaaacccgccgagcacagccccctccatctttgcaaagacgggtcctgtactgagccggataaagccagcattcaaacacaccgtgcgcatactcacacatatctcctctcctacaagctcctttcctaaaatccgggcaaggaacgcagctgtaatggaacttcctcgggtctctcctcctcgcgttttcacccgggtgaacaaaaggacactcagtccaatcatgtgaataagcacgagagcaaggccggaccttgaaggaatacattctaaactcatcagtcgcgtagatactgttcttgatatctggcaaagacggatcaaccggatactctttcttgaattcagtagatttcagcttaaaaggagagccgagcggtgaaccagaccctgatccaccattctctccagtaggagaatgacacggagatgagcttctattcggaacatttgtcacaacccgtagattccgtccgcagtagatgatccatcagcagaaagaagctcctgaagcatcagcttcacgccttcaagcttaggaggaacaacaataacatcaccagctcgttgaccttcagcatccaacagattcaaatcagctccagctgcaagaagcagcttaacaacttggatagcattcacagctcctccagaagcagcgcagtgtaacgcagtggtctgatcattcccgcaagcacggttcacgtcagcatcagtcaaagaaacaataagcttgatcacatcaatgcttccgtaagtagcagcaaccatcaacggagtcctgtaatcgttgaccatagctttagaacctttttgacgaccgtaccagagaccagcttcgtctacacaagaagggtctctctcgatagatagccttacaccttcaacatcgttgttagctgcaagctcaagcaagctcgcaaacgtatcctctgtttcgactgttaagtgattcatgtctgtgttggtaacaagattgttatcttcctcgaaagaaattggcaacgaagatcttgatgacacgatctggtttaatcggtctgatccacagcacatagttccatctgtggaatcggattctgtaaacatcatcaaaagaatcaaaaattcaatcaaaaagatcacttacataaaagaactaataaatcgatcataaaaaaccaaaagagaatctttctaattctcttatccattgattttacagaaactagatccgaatagtactcccagttaaaataaatctcagctaaagtcacttttaaaccaagaagggaggggttttttgtctgaaaaaccagaccatgtcctaaacgatttcccaaa

SEQ ID NO: 24382 - DNA, 2517 bp, Arabidopsis thaliana landsberg
taaatcatatttttcaaaccacttaacaagaacttacaatattcaatgataaacgaatcacatttatacaatataccattcaaaaataatattgtaagatgatttgaaattaaacgattgtaatatataatgtgttaaaaataatgtattatagatatcttgtaattatttaaagggttttgtgcaaaaaaaaataaccactaactcatatatttttgcaatttactatgcagctctaataaatgcacattaatcctatgagtctaaaataatacgcattgtaaccctttttgaccattttttgctaccatcaattttgtaaaatattgatatataatatgttaaatcaaagccctcgcgacgaagagttcaactctacctttaaaatttttaaaatgtaatgtatgtaaccgtaaaaacgcttgtaatatgcatatgaaattcatattacatattatgttaaacttcataagattaatctgcatttgttggtagtgcatttgttagagatagaatataatgttgcaaaaatatatggaataagaggggtttttgcacaaaacctatatttaaactactaacaatataatatatgaatagtttaaaacttatatatctataattcatgaagtaataatgtggtaccctatccttatcaaggaataataaagaaatgatattaactctgattcaaaagctatatataagatattcttttctttttcctcgggagggatacgaatccggtaacatgaatcagtgtccaataagagccactggtcgtaaattccaaatgacagatggatgactcattttaattcgtaacttttgtcagctgcgatatatgctattgaaacctgaggtgctagattttgattttaatggctttagattcttactcaacactcaatggcccactcgttaatctcttaccttctaaagtgagatatgatccactgcttctttcttcttgtagatagatggacctgttttttttaggttgtgatttgtggacattaatcaacaacccatgtttatacgtgataatgtctggagctatatgtaaaggcgatatggaggacaacattcttctattctaactttaaaagccatgtagttagggccggacaccaatattctttttttttgctaaattgtaaatatcattttgatgaaaaatcaggttttacaacagttgaataacctaaaacatttgaactctttggtaaaaaagaataaaaaaacaaagagccaatcgagagctgcatagaactcggtagtttcatagcagccacaacgctattaacttgcgaaaaaggagtccgtttcttcttgaggtgataacatttttgattttgcggttgatgcacttgaatatagaatgcggagagagggaagtagcgttgtgcaggacattgttaggctgcttcaagatgtggaagaccttagactgaacgacaatatttttaagaactgatgaagccaatattcatcattttcgcagcttcaaacaaaaaatatcttttgtttgacaccaatatccttgacctgcttctaacaaaggatatacatcatttttaagtcgggtaaggcaaatgagtataaggattctcattacacatctggttgccaaaatttttagtcaaatactagttacaatctcaattttttaccccaaactttttgccacttaaaaaactaggggtgggcattcgggtaagcgggtcgggttcgggttcgggtaaaacccaatcaggtataggtccttcgggtaaagaagtttaggatctaatagggtaaatctaaaatatcggttcggtttcgattcgggtccaatcgggttcggatatagatttgtggtcttttttacccagatttttcgggtaaaattttggatttcggataaaatttagattttcgaataagatatttgggtattttcgggttcgagtttggttttttgggtagagaaatttaggatccagtaaggtacatcttcggatttggattcagtttcatctctaatttttcgagttagtttcggttcggataatcggttctggttttttggcccagctctttagaaaaccatcaataaatattttaatcctatttctgcctcattactcgagaaaatattcgacccgttttattacttgataaatttacaactatatatttatgtaatctattccatattagtaaaatatattaaatttgttattaaaaccaaatatcttttgagattagggcaatcaaaatttaaggtcaagcaaatgtattctttctaaatgtttttgtgtgtaacggtaaaggacaaatatacagcccatgcccagacctacaagtagcgactccattactacacagtaagatttttattaataaaaatgtgcatggtttcatttaaaagtcattgctaacacttcactttacagtaatattcaatttcatacctttaaacgttaatcagaatcgccaattggaagccagtcactggaatcaccttccgaatcc

SEQ ID NO: 24383 - DNA, 1887 bp, Arabidopsis thaliana landsberg
cacagtctcaaagctgtgagctatgctcgcgacattggattccctgcgtactctctttcaattttgtttcgtttttttctttttggggtagttttccatcactctcaaccatcgaatggagatcgaggtgaagctcacagcctctaacggtggtgtgtgtggttggactggaaggtttccaccctctgaaaagactactactaaatctcggctccacccgtgggcagatctattctcgggctcagcccaaagatccttgatgtcgtctcatgtttcagctccgctcatcgttctcctacatggcgttgctccatctcgcttaatgtaaagtcaaagattgctctgaatatattctgttgtgttattcatattgaaggtgacgatacaaatatatatgtgtacatgtcgagtttaaacctaatacacaaactaataaggcttcgtacaagcccattttctaatcatctttgttttcctctaagcccatctctaatactccccctcaagatggacagtggagatctcgaacacccatcttgccaagtagatactgcaactgttttcgaccaagggttttggtaagaaaatcgaccaattgctctttcgtacgaacatgtcgagtagacacaatgtcatcttttatcccatcgcgaacaaaatgacaatctctttcaatgtgtttcgtacgctcatggaacaccggattggttgcgatgtgtagtgcagccttattgtcacaatgaagaattattggttctggatggggaatctgaaagataagaagcaattccttgagccatatgagtttctgataagtataagccatagctctgtattcggcttcagcggaagaaagtgacatacgttcttgcttctttgtcttccaacatataggagattttccaagtaaaacaacataaccagacagtgaacgacgtgtttttggacacttttgaaaatccgaatcacaataggcattcaaatgaagatcatcatccttgcttagcaataagccttgaccacaagtcccctttagatatcgtaccagacgaacagccgcttcccaatgacgtgtacgtggttgtccgagaaattgctttagaagatgaactacatagcaatggtccggtcgagtaatagcaagataaaccaaccgaccaactaacctgcggtatttagttgggtcagaatagaattcaccatcttctttgcgagagtatgattctgtttaatgggagtataacaggtttagctcctagcagcccgcattcaaatataatatccaaagtatatttgcgttgcgagatataaatcccttgctttcctctggagacttcgatcccaagatagatttttagaggacctaaatctttcatgtgaaagcattcgctcatatatgccttaaactctgcagttagcttggaatcattaccacccacaatgaaatcatccacgtaaaccaaaacatacaaacacgagccccccttgaaatatgtgaataacgagtaatccgtgtaattattcgtaaatccaaactctatgagtgcattggagagttttgaaaaccagcatctcggagcttgtttaagtccgtaaagcgactttttaagtttgcaaacttttgaagaatccacattttcaacacccggtggaaccgtcatataaatttcttcctctagatctccatgtaaaaaggcgttatgaacgtccatttgaaataattcccaattacgagcggaagcaactttcaacagagtacgaatcgttgtcatcttcacaactggtgcaaacgtttcagtgtaatctgtcccttcctcttgtctattcccaagagctacaagacgagctttgaacctttcgatagatccatcagagttatacttaatg

SEQ ID NO: 24384 - DNA, 1173 bp, Arabidopsis thaliana landsberg
tttgtaaaagcagccgagtgtttaatgatataagacctagtctgagtcgctcaacactagaatatcatgatggttggcaagcctaagtggtgttcctagtgggaagagggtcgattataatttggttaagaaatcggattcatttggaacctttactaagttatggtcgatcatcttcactgtagcgtaactgggtcacccgtggcttgtccgaccatagggcgattcgtgggcgttacaagcatcgtctaaagagacaggttgcctaaaggtgagttcctcgcgaaaccttgaggaaaaccacaagctgttgcgaagggcggctatggctacctcctcgtttaggttcacaatctttgatttgattgctttgaattttttgatgtaagattgcaaggattcgttgtgacattgggtgagaccccagaggtcggcttcagatgtaatatttacgatgagtaccgagtattgttttaaaaaggcgacggcgagctggtcgaaggtatcaatagagtttcctttgagactagcaaaccattcgagggcgtgatctacgaggttttctgcgaagaaatgacaatgacttggttcgttttcttcgtccgtcaggaatgctcgtgttatagcaaaacagaaggatctgagatgagccattgggtcgctcgttccgtcgtactccgggaaacggagtctcccgacgtcttagatgcgataatgggcgatcctatccgtgaacaaggtgcccctgatttcttcgatcactcgatctatgtcgggagcatcgctcactgctagacgcattcgtgaatgcatttgagccatgttcgtatttgtttgagcttcgtaattgcgaaatgtttccatatccacgacgttacgcagatcgatcggtgttgggggatcggttggaccgttaaggaggtcgcttcctggtatccggcgaatggattgtggattagcgatagaggtctgttgttgtgttgagttctcggggacgagggagctggacgcggttgtttggtttctcgtgcacgtgtacctcgggggcgagtagcctagcgataacaaaggtgggagcggtagccttgggaaggtaggcgttgcacgtgtctcgttccctgttgatgggttttcgacgcgagttttcacgggtgcatgtaaaaaggcaacctg

SEQ ID NO: 24385 - DNA, 1153 bp, Arabidopsis thaliana landsberg
ctctcaaggatatgctagctttgggaatcaaggtaaagcttatcaaaattcaaagactttgtttgccgaaaagcttactatgagtggatccttaaaaattcatttttattatcaggttaagtagttacatgcatctagagttctttctatcctagatcaggcacttggtctaagctagccgtcttttgtcattccttcagttcacttgattgctacgtgtagggcagtgaccaagtcttcatgtccgagaagtaacgacgatccgaatcgattagtacccagcttgggatctctaaccacacgacatatgtagcacttaacccttgcatatgtcaacttgccaccaggtttctcaagaccagaatgggttcacgccaaccgagagcacagatacaccaccgtccagccccttgccacggagggtacacgctactctcgccatctctccactctcattgggtgttatcttattctggtattagtctgcccaaggcaaagcttacccatgacgaggcatgttaccagttaaagggtcctcggtcagcaagccgacatcgagatgatccttaattgactcagacggagacactacaccgagattctcttcccgtgcaagtcacccgcccggtctcagcttaatcatttaacccaaaacttggtacctggcagaggtacatcttttccgatgttgaacccatcagggccctgatggatccaccatcaaattttattttcgaaaacagcccacccacttttgccacaacatcttttgtaaaaacaaaactttttgtttttctaaagcaaagctaagcatcaaaaagcttttgtaaaacaggtgattaaggaaggtaatcagattcaaggaaggtaatgcaggaatggttttatcaagcaactcctatcacctaatgcagcaatcaagtgagaaagattttaaaatagcaaggaaggtggcaaatgcaccggggcttgcattcgtttacaggtgattcgggttcggatcccagatatcgaagtagaaactatcccggcctgggattccgaaggtggtggtgtctgtcttcggggacttctatctcttcttcacgttctaatcataaccatacataagtataagaatggatgccatgggatgctcatgaggatgcaagat

SEQ ID NO: 24386 - DNA, 1388 bp, Arabidopsis thaliana landsberg
tgaatgataatgcaagtataaattatattttgcagtcttggcatgtgataaacgaaaagagaattatcagaaactattgccagacaagaaaagcctagagcaagaatatattatgaaagtcagtggtccagagtacttagcatataacccttctacttacaccaaattagtagagtagaaatgaatttttagtagcttatttttctactcaaattaccaatcccagcagagtaccaatgagtctactacacaaacaatcttgaataaagacaagtagccaccaagattaaacattggtacgcaccatgtcctgtccctaaaagaatttctggcgctaagtagtcaggagtacccacagcagaccgtttcttgcgcctttcaagttgttcctcagatgccgctaatcgtgattcctcctcatcaagcagagacgtcccacttacagcaggaccagccagatcatctgtgctgttgatgagaccaactttagagagcccgcaatctgttaactgctcagataaagaaagaaaccataggtctttaaaagtctatcatacgtggaaaggctacatctcgcaagcctcatatgtcaacacagaataattcttacaatggaaaaatatacctttatatgaccatcatgcgcaatcaacaaattatccggcttcaaatcacggtgaacaacaccctcagaatgcaaatattccaaagcaaggacctggcatagatactcatcatgaaatcactttctagagctctgtgcactgaactattaataaaataaacatgcggaacttacaacttcagcaatatatacacgaacaatatcttcttctaagcaacctaaatttctcaacaacgaatacagatcccctccattcagatactccatcaccaaatacaggttgtcacgacacgtgaaagaatagaagaaacgaacctggtcaaaacaaagtcacgttaaaaaagtaaatctcttctgagaatatgcttaaaaggctagacctgctcaccacaaaaggattgcgaacgttgatcaatatatcacgttcagcaagtatactttcaacagcattcttacgaatcatatctgcctttttcagaacctgtggagcaaggccaacgttaaacacaatagttagagaaaacactaactaaagtttttgcataccacgttagccacttagcctaactacaaaaagaagaatattttgtaagaagcaaacgaacagaaaagagaacaaaagcacaatttaccttgattgcgaatagatctcctgttgtcctctttttcgctaaaaaaactcgcccaaaagctccccgacttattggttttatgatctcaaaatcatcaatggatgtgcgatctcgcggatgtactgggctgg

SEQ ID NO: 24387 - DNA, 567 bp, Arabidopsis thaliana landsberg
acaaccctcctttatcaactttttgaccatacctactaatgaaattttttatttcggtttaacaagttgttgttagagagcgtagagaccaaacaacgtactctctactcaacagaaataaacggatgaactaaggtaaatcaccatttcataggtcaaaacaaaattctgcctgtgaagcaaaaggaactaaaatctaaggatgatgtagagttttcaatcaaacctcagattttaacttaagcaagtgctgagtggttgaaatttcttgtagagcctcccaccttttcactttatcctccttcaattgctcattgcactgatgcaactgagacacaaaaaaaaaaaaaaaaatttcacataaccttatcttataaaccattctaatcaaacgaaatgaacaaaattaccttatcagagacttcaacattctcctttttcttcgcctccagggccgaagtaagattctgaaccttcccttcaagccgcttcacttctcctctcaacaaaaccggatcttcttcaatccaacgaccttacactacaagaaaacatgtaaacgacgac

SEQ ID NO: 24388 - DNA, 529 bp, Arabidopsis thaliana landsberg
tcatctccaaatcagaaacctttagagagattttacctctcttcacatcaaacctagcaccagctgtaggtaggaatgctcttccaaggataagaggatctttgggttccttctcatagtcaaggaccacaaaataagcagggataaaagagttactgttggagctggattcccctccaggaatccacctgcgaaaataccaagccaccccacaaaagcccaccaagcccactaagtagaggacctacgcagctgacgagcccacatatgcgaatgggaatttgggccagatatgcccagtcacctgatgcagggagataagcggaggagcatcgttgcggttgctaggttctgaccaaccccgctggatgcgggcggcggctgaccctgacatcgttggcgacgcggtgctggagaccctggggcaggtgacgtatttctccggccgggggttggcccacccatacctgcccgacgtccctgtggatcgtctcaagcgcgactagttcctcgtcgagcctgagctgcg

SEQ ID NO: 24389 - DNA, 2850 bp, Arabidopsis thaliana landsberg
cttcagagaaaatggccatttggaaaaggcattgttgcaaaaggttattagaaattggcacttttgcaaatctcccttttgattgttatatctaagatttcacctgtacaatatcatcccctattaatatcgacccaaatcattctgaccatataaccccgtcctatgaaattaaacatcattttgtcttagttttatataaacttcaaatatttataataagagaactaacgaatgttaccgtaaatgataaccaaaacatagaacaaatagtaaggaaatttaaattgtgttcacctaactcgcgaagactcgcaacttcatcggaaaatttgctagagaataagttatcgtcgcaagtgcgtcgcaatttgcgggggaactctgtttcccgctaagccctcgcaaatttgcgatgtttttgcgggaatcatgacttccacgcagtttcctcgcaattgtcttgcaaatttgcgaaggaaatatacgtcgtaaagtttgcgacggaatagcgagttggtcatgttccctcggagagatctattcgtcggcgaagaagaggtttgtcggagagatctattcgtcggcgaatttgagatttgtcggagagaacaattcgtcggcgaatttgagttttatcagagagaacaattcgtcggcgaatttaattagatttgtcaaaatgaaagtgaaatcctaattattcagtaagggtaagaccgttattttcgacattagaaggggcagttttaaaaaaggtcataaggaaagggcattgttgcaaaaggttattataaaaagggcacttatacaaatcttcattttgattgttatatctaagatttcacatgtagaatatcatcccgtattaatatcgacccaaatcattctgaccatataaccctgtcctatgaaattaaacatcattttgtcttagttttataaacttcaaatatttataataagactcgcaatcatagaccctaacccgcaaagactcgcaactccgtcgcaaaaattggtacagaataagttatcgtcgcaagtgcgtcgcaatttgcggggaaactcagtttcccgcaaaacccttgcaaatttgcgacgttttcgcggggaatcatgacttccacgcaatttcctcgcaattgtgtagcaaacgtgcgagggaaatattcgtctcaataattgcgacggaatagcgagttggtcatgttccctccgagagatctattcgtcggcaaagaagaggtttgtcgggaagatctattcgtcggcgaagaagaggtttgtcggagagatctattcgtcggcaaatttgagttttgcggagagaacaattcttcgtcgaatttgagttttatcagagagtataattcgtcggcgaatttgagtaggtttgtcaaaatgaaagtgaaaccctaattattcagtaagggtaagaccgttattttccacaatagaaggggcagttttaaaaatggccatcagaaaatggcattgttgcaaaaggttattagaaaaagggcacttttgcaaatctcccttttgattgttatatctaagattttacctgttgaatattatcccgtattaatatcaacccaaatcattctgaccatataactccgtcctatgaaattaaacattattatgtcttacttttatataatttcaaatatttataatatgtaaactaacgaatgttactgtaaatgataaccaaaacattaaacaaatagtaaggaaatttaaaacgtgttcacctaacctgcgaatactcgcaactccatcggaaaatttgctacaaaataagttatcgtcgcaagggcgtcgcaatttgcagggggtctcagtttcctcgcaattgtctttcaaatttgcgagggaaatattcgtcgcaaagtttacgacggaatagcgagttggtcctgttccctcggagagatctattcgttggcgaagaagatgtttgtcggagagatctattcgtcggcgaagaagaggtttgtcggatagatctattcgtcggcgaatttgaggtttgtcgcagagaacaattcgtcggcgaatttgagttttattggagagaacaattcgtcggcgaaatcaaagaggtttgtcaaaatgaaagtgaaaccctaattattcagtaggggtaagaccgttattttccatattcgaagggacagttttagaaagggccatcaggaaagggcattgttgcaaaaggttattacaaaaatggcatttttgcaaatctcccttttgattgttatatctatgatttcacctgtagaatatcatcccgtattaatatcgatccaaatcattctgaccatataaccccgtcctatgaaattaaacattattttgtcttagttttatataaacttcaaatatttataataagagaaccaacgaatgttactgtaaatgataaccataacatagaacaaatagtaaggaaatttataacgtgttcacctaacccgcgaagactcgcaactctgttgcaaaaattgctacagaataagttatcgtcgcaagtgcgttgcaatttacgggggaactcagtttcccgcaaagccctcgcaaatttgcgacgtttttgcggggaatcatgacttccatgcagtttcctcgcaattgtctcgcaaatttgcgagggaaatatttgtcgcaaagtttgcgacgcaataacgagttggtcctgttccctcggagagatctattcgtcggcgaagaaaaggtttgtcggagagatctattcgtcggtgaagaagaggtttgttagagagatctattcgtcaacgaatttgaggtttgtcggagagaacaattcgttggcga

SEQ ID NO: 24390 - DNA, 4608 bp, Arabidopsis thaliana landsberg
  unsure (1)..(4608): unsure at all n locations
tatggttcaatataaagtcaaaataaacgatgatgatgatatatgagaatagtacctgtaagagttgaatttaacgaattaataggcgtaatgtgtgaggaactcccattattatttgccgggtatagcggtaaggagacgggagtatgaggagtttgacttctgttggtaagatcgacattggtaatgtcactaagaactctaccaaaaacagaaccgacggaaactaaattttttgacccaagtgtttgattatgcgaaggaaagttggtttcatcgaacaaacgtcttgttctttttttggttttctggtttttttgttgttgatgtatatcattttcatcattatcctttcttttcttcattgtaatcgatgaaaaaataacaaaaaatgtttatttgttttcagtataaagctaaatgtatgagaaacgaaataatatgataaacatagccatactaaaaaataggaaacaatatatatcaaaatatattgttaaccaaaatatctataatctaaatctattatggcacaatatacggaatgtatattctaatttagtttttctactatatttttgtgcaaattggaacacaaattaagggataattgatcaattatctcctcgttgaaataattgatgtgtaaaaaggaaagaaatcgtctacaaccaatccaagatcttatacgttttaacaataattatgccatttatttcttagcgtgttaaaaaaaattatcattattataatacgaatctatgaaaaaataggaatatgtatgtttagttagactgattatttagtgtacaaaatctttgctaattatgattttgtttaataattaatacaaaattagtaaaattatttgtggttagtatgactaacagtataatataaaatctttagattcgtaataaaaaaacaatattgttttctggaaagttgatgttttgagttttttaatatttccaaaaattgatgttctacatcaaaattattactattttaattgttaaataacaaaaagaagaaagaaatattaataatattatacttaaataccgaaataaaaatatttcattaaatttgttttcttaatttgtgaacatataacaaataaaatttagtggaacaaagagagtaaaatttaagtaataaaattgttaacaaaacgacatataattgaaataaatttattaatttccaaggaaaaaaataaaaaaaaataaagatagtttagatcttaaaaaaaaaataaaacaacatgcataactttaagcaaataaataagaaagaagaaaacgatccaagctggagtaattgagcatcattcgtcggagccttcctcagacatggtcatcttagaacattttttcctacttgtggaagcctgatcatttccatcaacatcatcttcttttggttttgatgatggagtagaggttgacgacaaatccacatcagaaaggtcaacaccattagtgagcataagggaaccttatatgaaaatacataaacattttaataagacaaccctaagaaataaatattaatgattggaattgtttaatgttattnnnnnnnnnnnnnnnnnnnnnnnnaaggatgatggatcaacgtatgcatcagagtcttcttgaacgatttcatcagcaatgttaccggtgtagactcgggcaacagtgaatgaatcatatccaccaaatatgttttccctttgaatgcacaatagaaactgaaaagtcttccctttcaaaccattgatcacatcatggaaaacagttggatcttcgatctacagaaaaatatagattattataatatgaacgtagacattttaatgaaagagtttatttttaaaaagacaatatacctcatcaaatgacccatcaagcaattcaggggcagtagtgccaagaatttcctttgcatgactatcgaataacatgcatctggcttcaccggtttggtccataatatggagatgtaaccaaaacctaaaggttaaataggattattaggttctaaacaccaaattataattaataatacattcaataaaaagatttcataaagactaacttggcaacaacagattttgcaaaaccattgcatatttcacaccaaaatcttggcttttgaggttgcttgacatcttcaagtttgatagcttcttctttgacaaccttcttgttgtgagcacgacaacaaaaatagtagcacggccaatctgtatcaattgccgaaacagtgcaaactgttttgcacttacccaccttcaaatgaatataaagaggaattaacaaactaatctaagaatataaaaatataataaaaatgttagtatgataaataaagtaataaatagtacatcagaagatgtgaggacttccttgattgtttgccttggataatcaccatcgtcatccccagttcttggtgcatagagcctcttgtgaaaagatccaaacttcccaaagttaacccatcagttggtatgctatatatcaagaaaatatagtttgcttaatattatgtataaacaaatatatttagtgacaaataaatacaattacctttgcttaaaaagacccaactcagccaacgtgggatccacgaagacttgtgaaacatcaaaagaattggaaacactcctagtatctgttttaaaaatataagatcgtgtttttaaaaaagtatagatatgtagtaatacataacaatataattacccgtgtagagattgatcttcgcaatcgggattaagcaaacaacaattccatcagtagattcctagcaagcttggtccacaatctcagcaaacttcccccaaagtgtacatgccaagcgagtgtcactaaaatggaaagaagaaatttattaataaaaagtaaaaaaaaacaacaaactttaaataagaatgaatatgaatatagattgtttgtactgctgatctttcaaatgaaaatcgatttttttggtgggcttgttgctagcgttaagattttggatttcagaccgatcgactacctgaccaataatatctgtatagacaaatacaataaatatatgaatataatttctacataaggaataatgcatgtatgttctaaactaatataaaaacttgaatctaaccgtgcaagatatttgagttagcggatctagagagcaccccatcgaacttagcaagtgagaggaaaaaagcatcagaaacgttatcacatggagagaccgtggttttgaaaacaaaatcaatcttgtatttcaagtcagaaatacgatactagacacttgtaggatttagagtgatggtcgtaatgatcttccaaacaccctcggttaagtacttttcaaacttcttgatttgctctcttctcacaacagcataaatcttatcaccctgtatgataaaaagaaaaaaaatgaaaaaaataaatagtgaatatgatgcttgccaaacaaacaatattatggaaaatatacacataaaatataatatgtattgcttcatcaaccaaaatcatttcgatggattcaccagcctttacagagtattgcctccaaacatgacgcaatttaatctgaatacgccaagtgttcttgtaaggatttagtgatctcaacggagaaaagggaagaggattaacgagcatcatttttgtagaaatttagaaatgaatgtataaggttaagttgagtgactagatttaaatgagacgtccggatttataagaataattttttaggtcaaaaaatatgagcacaagattttattcgtggaattcaagtttagtgaatatgatgaatcccataattataaaaaaatgtttagcatttaccgtaaaagtagttatgtatatatatggaatacttgtggaaaatttatgataattctaaatgaagatccaaacgaaatattagatgtataattatggagaagtgatatatttgaaagctggaaacgaatatacgcaatgaattaaatgaaattaatgcgattcgttgcctgaaatatagtcggaagattttttgcgtgaaactaaaaaatcgtatggctagtaataaatctattcaatggccaggattagacgcgagaatccgatttttttaaacgggataaaaagaaccgcgtgtttttatgtgaaatgtgaaatcaaaatgctaaaaacaattcaattcaatggccaagattaaacgcgagtacctaaattcttaaaaccgggtaaaataatctgcgtgtttttttaagtgaaactacgaaaccgaacggctaaaaacaattcaattgaatggccaagattagaagttattacccattattttaaaatccgggtcaaaaggatctgcgcgtttctaaacgggtttttcatgacataaaattttaacccaatggcaaacttgttattcctgaaaacttcatgcccacctcattaagtgtacgtctcaaataatatagtagatcacattaccccgcttcagaattgagttcccttccgaaaattgaaaaactcgtttatagcgggtaaatttcccatcgacacgaatataacctctangtaaactgcaaacttttttttttgcaaaaacaattcattagttgtg

SEQ ID NO: 24391 - DNA, 1280 bp, Arabidopsis thaliana landsberg
attctgcgggatagagatagctttctgtcatcgcataccatgaacattttgagcaaacttaagttataccgcaatctccaaagaagcgtacctcgaaagatggggggatgttttgagatcatttattggactgtgaatgtatttggttgatcggtaacaacaaaaaatacattgctaaataaaatctcacatctgtttcaaaaatagagcgtctgtgtcactgttatttttattttttgggacaatgtgttacttttattagatatagctttgagcaacactaacatgaaaagcacaaacattctttattagtgattgttttaacatatataaagcagacagagagagggtgattgccgcagaaagtatgaaaacagagaagaaacagagtacatgtaacacaagaagacaatggttttatgcatggtttccttagattctcataacatcaaggtaagcttttccatcgagctcacgggaaaacaagccatggaaatactcttcagtggtcagggttttgaaaagtgcacccttgtgcctttccacgagacttctcatcggaccaatttctttaccgaaccccgtattatggaatgacgccacagaaagcctctctttctcggagttcacaactccacgatgctctatacttcggtatgtgctattcgttatgatctacattagttaccaataccatcatcagaactatttacaatgatactatgaataagctctctcatccaaataacttacctctaagatgtctccaacattgacaactaaagcatttgggagaggtttgacagaaacccacttgccatttttcttgatttggagaccttcaacttcattagcctgcacagtatggtgagtcctgtagaatcagaatgcggagttagaccaataaccttatcgggctctggacaaggcgggtagtaattcagcctcatactttgaaccgaatcaacatcatcaaacaacctatccatttcctcgggtttgatcttcagtgctaccgctattttcccaagtaagatcttagcaatgcttttcacttcagtcgaatacatgtctagtgtatctctgaagaaacataaaccaagttttaaacagagaagacttgtggatttattaagaatggttttacacatttgaggcaaacctaaagggcagaggtaacttggggaacaagtgaggcttgcgtaatcgaacaggttgcattgtaaggaagaacatatctgcccaatcgagtttctgctcttctgaaaccacaaatactt

SEQ ID NO: 24392 - DNA, 2729 bp, Arabidopsis thaliana landsberg
tgcggtagccagacatgaagttctctgcaaccaaccaaatgaaaatgcattcagcctatgctcttttttttgtctgcgtcaattctatatattgaatatctacagtgtaaatctcagtattgtgatacttacgtccgataatgttaatcttgaaatccacgctcttcagaatacccaagcagtacatggcgctattgtcctgttattcaggttgaaaagaaaatagacaaaaaataaggcaaatgtaattatcaagacgctagttcacgaaactatgtgaaactggaagaaagaaaaacaaaacacccatgtcttgcctcattccacactatgaaaagcggatttctcagaaacatttgggatcctccttcaaaagtcatcgctactctggggaataaaatggttgttttgtttggactgcatgtgaagagaaagaacatcagaattcaaatgtgtatcagagacttctttgaaaatccaacacatctctagttaaatgagaagaagcatatgacaagagcgcacacatgaccttaagtcgtaacagaactcaaatggaagctcaggatcaatcggacgtcgcttgtcagtgacatgatcgtcaaactgcaaaagtataagtttgatggtcatgtgatgtaaaaaaacacaagcttggaggaatgacacaagcttttgatagcacaaagtttcttgaagaatgaaaacttcactcagatatggtattagtacaatgaattctgtcaggcagtattagaatagatgactagtctgatctatggcacttacagctttggtaataagaccatattttggtctctagtaaatgtgtaaatgatgttccagtgtcgaagagagctagcagctgaaccccacacagcatctccccctacagatacttcggtcacactcacagcatatgtcggactattttcatttggtataaagaagatcacaggagacagaaacagaatcagtatagataatacatcaaattgaaaacttttattcgctgtcagatcaaattggactttactatgtaccttggttcggtaggaagtagtggcgtctccatctggtctgtgtatcctttgtcaccgaagctgattcttccgacaacgtcaatgatattcccgaaacacattgagaaagagtttgcagtgatttttgcttttgccagtatgctcggaacagagtaatctttcaaacctagcccgagaagaccattaacagccgcactgctctggagaacacctgtctgattcttaccgcaactgcaacgcaaacacatgttagttaaaagagaggcaacttttttaacatttttagttttgaaactaagttcaatataatcgttactctgttttgctatgcatttcaacatatagaacacgaaatgaacataattttagaggtttaaatagcggcaacgtgatttttgttaagaaaaacaaagtcattacttacccaagcgtgatattagctttaacaggctctaaaccctcgtcctctgtgaccaaatgcaatacatcttcaaacaatgtcccggtggtaaaggtgtccttagaaaggtactggatctgataagggcaactacttgcaggagaagaacaccggctcgacccaaaacaacggtcatcactgcatctaatgcttgaacttgtagaagatgtgttggggctgtatagattgagtggtcgactctatgtcaaagaagaaaaagagttaaggaataaatagtttgaagaagatatatatctgaatgctttcgacaggagaaaaaggcacctgtgaaagtccaacttctttcaagtcacggatacaagtggaaccgcaattgcaaggcaaccaaaacaaatcgcttccggtgtccagagccaccaggaaccaagtggccggtgttcccacagagacattggcgtagtgcaagctgaagtcacatggatataccaatcagattcaataagcaataaagcatgaaacgaattgttatgtataaggatgagaagaggcattacaatcccagaaggtcgattgaaatcgtgcgatttccccgcatgaaagtgatcggggtttcatcgttgttagaggcaagacctcgacctctaatcaagcgatcgcgatgagccaaaaccttgaagtactccaaacttccctgttccggaactagatcgccaagaccaagactttgcttgacggaatcagagaaaatgtggtggacttcgaagccaaacttcccagtagcctcacatctctcaaatccccaacacaccactaacacagacaataacacaaacacttggcgtgcaacgtccatgactttactctcaaaggtttttctcgtagaaaagaaaaacacttccggagtaaaactccgtttactttctcagataacgatacacaccatgacgaatcccgtatatgtacagaaatttgaggaaagtaaaaaggtcaaaagcttgactcggtcgcattgtaccagacatgctgagagaagctgatttgattctcttcgaactaatactagtttaatcggagtagtagccattattttgtatcttcgtcttgtttccctgaaggagaaaggttgacgaagacagagttctcttttgcggtgggagactttttgaaattagccattcctttttataagtgtcttcgtcaactcttttatttttgttgaaatgcccctctacacttcgtattttgcacttcattcctgttatttt

SEQ ID NO: 24393 - DNA, 819 bp, Arabidopsis thaliana landsberg
aaaactatctgctcagtgctaagtgattttcaaatcaaacagagaaaggattatcttaatcatagaaatcatgtttgcagttgaaaacatttctatggaattcgaaccggcgatcaacgaatcgtcttcgtcactttcgtcatctcgtagtagctgcggtcactggtatgttcgttacggagtctgcatcgcttgtaaatcgacggtaaacaaacgccatggcagagcattcgattatctcgttcaaggtttgcagctaagccacgaagcagcagcgtttacgaagcgctttactacgcaattctattgtctcaacgagaagaagctaaaccttgtactcgacttggaccacacgcttctccactctattagggtttcacttctttccgaaacagagaagtgtctaatcgaagaagcgtgttcaactacaagggaagatctgtggaagttggacagcgattacttgacaaagctacggccttttgttcacgagtttttgaaggaagccaacgagttgttcacaatgtatgtttatacaatgggtactagagtgtacgtcgaatccttgttgaagctgattgatcccaagagaatctactttggtgatagagtgataacaagagacgagtctccttacgtgaagacgcttgatttggttttggctgaggagcgtggagtggttattgtggatgatacgagtgatgtttggacgcatcacaagagtaacctagttgagattaacgagtaccactattttagagtcaatggcccagaagagtcaaagttctacacggtggagaagagagacgagagtaaaac

SEQ ID NO: 24394 - DNA, 800 bp, Arabidopsis thaliana landsberg
ggattgccgcacggatcccaactaagaaaacatttgtcgattagggagcagctagtacctcgatgacactctacatagagcatcacggtatacgttcctatgaagcagaggatgctaagttggcaggaaagtcacaaccggcgaaagccaaggataaggcgtggaaagtctactaggagccgcgttagcattacgacccaaaggcgactaagcgattaacggttttcaccgcgacggatgaggatgatcgaaaaatttgtattgttgtttccatcggtttggacggcattccacagaagaatgcaaacaccttctgaacatcctcctcggaaagtataagtcgggagaagtagaagcgatcaattatctcaagaatgggaagaacaagcacaagggcgatatcagacaggctcagggcaaaccagcgaacgagggacaacaactgctggaacatcacccgaaccaggaggaggttcatacagaagaaatcagggttccgaaaaaggaacttccccccccccccccaaaaagaaggaggggataacaaccccagcgagctcctgatcaccctcgaggaagaatttccatgatcatggccagtctatccgacgatgaagattcggtttcggccctgaagaaaagagcgcgcaggtatgtagctgaaccattgagtcaggaacccatcatcttcacttgagaagacgtgaatggcattcagcatcctcacaacgatgcactagtcgtcgagctggtaatggaggacttcgacgtagaacaggtctgatcgacactggcagccc

SEQ ID NO: 24395 - DNA, 5551 bp, Arabidopsis thaliana landsberg
taagacggtgtcgatcgatacccctcctgtgtcgatcgacattggatccggactgcaccctgtaaggtgcaaatacctatgtagcccgagcttgtctacactcctcctgtcccgtatccgaaaaggcgtcgttctaagcaggagcttcatgctgccaagtgcaaagccataatggagaagatcttccatactcttcctaaggatgcttctgagacatctgcttcctcactcaacaggtatgtcaagcgacttgttgacaatggaattagcttagatgaagctaagctgcttaccagggacatcagtgcaatcatgctgcctaaggccaagaaggacaaggcatagagagtagacatagccgagtacatccgcaccattactcctggtcagaccactgagtagcttgtagatccatgtagctttgttcttgattgctctatctccagaagcagttttagccgctttttgtgtgatatgggatccatcatcaacctcatgcctaagtctgtctgctgaaagactaggcatgactcgctacagtcctactcgcatcactctcctcgtcgcggatcgttccaaatgaatccctgaaggaatccttaaagatgttcatgttaaggttggtaactccataatccctgctgatttcgtggtcctggactatgagaaggaacccaaggatccccttatccttggaagagcatccttagttacagctggtgctaggtttgatgtgaagagagggagcatctctctcaaggtttgtaattcagagatggagtttggcatggatggttcagagcttactaagcctatcagttgcattgcctccagcacagacacacctccctagattgatcagaatcccaccacagagccacacacaacgctccaaacccgttcagctcgccaatgagagttgcagaggaacggtgtcgatcgacaccactacccctgtcgatcgacaccctcgggtttcacagacagaggattctgcacattctcttcagcccacaccaattgaggacctatgtgataagttctcatctttctcttctcctgttttatctttgattaattctttagattattcaaagactgcttcactagataacaagcctagagttcctcgaaagcttgtttctcttgttgttcttgcaggtgacgagaagagtgtcgatcaacacaccactgagtgtcgatcgacaccagaagctgctacaaccagatccgtttacacaccaccttggaaggcgaggcggcagatgcaatcctccaccactccacccacatcctgaactccgccaagtcaagctattgactcaaaacaagcgcttagtgggaggcaacccactggtttgatttttcttttccctttcttttattttcttttatttttgatttatttttcccgctttctctggatttgaatgccactggggactgtgtcgtctaagtctgggggaggttcttactattgatgcttttatttttgtttcttattatttttcgttttacagttcatttggttacttcttttatttcccttcccaaaaaaaaaaaaaaacgttttctttagtttagttaggaatcatgatctatatttctcttgtttattgcctgatttatgagtgctgcaagttcgagccaatccgactattggaaaatctagatggcaaaccaacagactagaggatatcctagtttccaactcaaccactaaggctggagctaatctcactactcttccttttacctcttcaaacggttagtattcatagatcttgattcctcgttcatacctgatattgagaccaatgtgataaaacgaatgtgttcctctccccttataaaaataaaaagaaaatgagagattggcaagattttcatatagtgtataggggtaggaatgtttcctatgaccccaatactatacattatttggaatgatcaattacaaaggttagaaaaatgccaagggcgtcgatccagtatgccagttcccctttgtttactctctataaaaaataagtctgggagagaaagaacaccacacaaaaaaataatattataggatggtcgctttctcatggtataggccatgaaggagtcaagaaggatcttgaatgttatctagatttataagacctaccgatgaaagcatggtggatatagttgtggaacttaggtatggaatctagaatgttgtgcaagcttgcagagaagtacatgttggttaggaattgattagacttgttaggcatatggacttagtttgaatgatcatggcaataggctagagaatgttgggagttcctttgttttcaaaacctcttccactggttcggtttttgtgttttgcttgagggcaagcaaaaggtaagtctgggagagttgatataacccgattttcaccaattttatctatgttttaggtataagattttgagtctttatgttatttctcgagtctttttagtgtcttttcaggtattctatgcaatgggacaacaatgaagataaggagacatttaggagcaaaagctaaggaaaaggaagctaaggctgattttggttcagaaatcagcgaggagtgtcgatcaacacatttttggtgtcgatcgacaccaattttggcccagcaaaaaccctagacgcttttgagtttataaaagatcaaatttgccctagaagacttccctatttgcattattagtccctggacgtttttagggtctatatatattgttttagacctaagtttcgtaaataaagtcttttatcaagttctatgcaaaaccctattgtgagagacataagctattcatccattgttcttgagagattcattctagtttttaatccagtgaagagatcctttctttccccttctctgtttactgtgtttatgctttctatctcaattatgttgtttgtttcattcaatatgtctgaatagtctgcttgttaggaatatggtttctcattagggattcatatggtttagtagattgccccctttgctaggttatctgtagaattcttcatctttaattatgcttaatgctagatctagagtaattaactagatcttgaatctagacaatagatatgcccgccataggtatctatagttggatctattatttgatgagtctggtttataggtgtgtaataagaatcggcctatttactaagatgaaaaattgaactcgttaagaatgcatatttaggttgatagtttctcggcttctccggttattattggctatagatatagggagtttcgcggcacgccccccggttattccataattagagtttgagtttaagaatggttcgataacaacctagcttttattagatctactaactaatagtttcctgaggataccatgttcctagctcttttcctaatcgtttacaacccaatcaatctgctgtctttttactttgtttacttactatttcactcataccctgctagcttaatctcgacatttaactcattgtttgaacaaaagaactttgagaattcgatcctaaaatactgcaattgatctcttatttgagagagtagttctaggtaatttgaaccatatcacacgcgtgtaacacccccgaaccgtcctaaaactaaggacaaattcggaagcatcacgttagacccttgtagttagtcaaccaggtgtccggaacacgaccgttcacatagtcgaccaaccgtgagaaacttttcgtcgtgttcgtggcctaaggcttttcaacccgttccgagaacacgagttgtgttagtcttggactagactaataatattattgattcaaccatcaattccattataaaaagggttgaatcattacattatatatatacgaataaaacgttaccaaaactcgtatatagggcggatccttattaattttcataggaaatcatatataataaacattatcagtatttgcaagagctgtaaaatctaagctggttggcctaatgatcatcgcgccgtttatagattccccgctaaggtttcgtgtaaacaaaaaggtagcatcatgagtaacctagtattactcaattagaccgggatctctagggtttcacctataccgctatcggaacacctaactataccaagcaatttacaatcaacaagcaagactcaatcgacaatgttgtcagaacttgggcagcacaacgtttatactgtactttaacatcatgcaatcacatcaaaagacaatgcagctcacaataattatcactaagtacgatttactaacctcctaggcaatttataagtaaatcaaattaaacacctaaacacgtgctacttcacatgtctgagacttactggtgatccacgcatcctcgggaaacaggcgtacctacccctcgaatccattggttccttctcttactcggttatctagcaaaccacaatctaactctattaaggactaatcagcggttactaaaagcaactaaggtcagaaaacttaccaacttccgaatcgtgtctttccgcgagttctcctcgggtttactagctatgggcgagatttttgggtgaagtttcctaatgagggccgaagttatatatagtagttttgggtcggtttggctagtaggtgagtcaccggagcctcgccaataatcgcatcccgcttgacgacacatggcacagagtcaccacccaagacacccagcgcatcccgctggtcgacagctgtcctggggttgctcaaggggcgacagccggccccgagtcatcacccacctttcggccaaccggaacctgctcggcacaattttggcagctcgacatggccgattctcagccatagaacaccaagcagcttacccacctgctcgccgccttaagtaggtcgatgacgtggccgacttctggtcgcaccctcgccgttcgtgccggccatgggtcaagcacacgcccatctcggccaaacttatgccgccgcgggtcgctcccactgcctactgcgggcacactgcgggcgtaccacgggcatactgcgggttcactgcgggcacactgcgggatacattagtggacgactcttctatgttgtctgatggggcatttgttggggaatcaacctagaaatgaaatcataagtaattcaaatattcatggtaatgatatagaactgtactttgaggaagcaactaacctacataaaagagttttggtgtatgtgttcttcaggggttgagaaatcatttgacgtactttcattctatacaaaagtaggatttgtttaccatagggagacgctcgtgaagtttgagtggatgagggtgtaaggttatacctcattagatatatcttcagaagtggtataggaatggataaacaccttcttaaacggcttcatgcgccttgatctagaagagtaatcaacaaatgtgaagatagttttttcgatcgcttgaatttgtgagcttttactttgatctcaatctttaatacactctcttacagctttgccaccttattttgtagttcaaccaagacactcgact

SEQ ID NO: 24396 - DNA, 2557 bp, Arabidopsis thaliana landsberg
tagcgacttagctcaagtcatttggtcggtcccaaatgtggttaaacatcccgccaatggcttggttgaatagcttagctctagaacgagtcattgggacggccggtgtgacaagaacatcctccgctacaagcttctcctcagctacaagctcatcctcagctacaagcttagctccttcctcggctacaagctcacgttcatgctccggttcatgctccatatcgttaatgctatccatgatcatatcatcccctccctcttgaaaaggatttgacctcaaatccggttcatctgcaataaaaggtaccaagtcagaaacattgaagctataactcacattatacttaccttgcagatcgagttggtaggcattgtcgttgatccgtttgattatgttgaatggaccgtctattcttggcatgagtttggacttcctttgagctggaaacctctcctttcttaagtgaatccacaccatatctccaaatttgaaaatttgttcacgcttccctttattagcttgcttagcatagagtttggtcttttcttctatgtttctcctcgcattctcatggatctgttgcactagctcaaccttctttttaccatcaatacttactcttttactcaaaggcaaagggattagatccaaaggtgagatggggttgaacccataaacaatttgaaaaggagaatacttagaagcagaatgcacggcatgattatatgcagatgcaatatgtggtaagcattcttcccaagttttaaggttttttttcatcagatgcacgcaagagagtacctaagattctattaaccacttcagtttgaccatcagtttgcggatgacatgtagtagagaataacaacttagttcctaacttagaccacaatgttttccaaaagtgactaagaaacttagtatctctatccgaaactatgggcgtaggcatcccatgcaaacgaactatctctttaaagaatagattagctacatgcaatgcatcatcagtttaatgacaagcaatgaaatgagccatcttagaaaatctatcaaccacaacaaagatagaatcctttcctgtcctaggcaatcccatcacaaaatccattgaaatatcattccaggggtgttcaggaataggtaaaggagtatacaaaccgttgggttgaaccttagatttggcttgcttacaagtattacatctcccacaaattctttcaacatcgcatttcatgtgtggccaatggaaatgttctgtcatgacttccaacgttttagcaatgccaaagtgtcccattagtccacctccatgagcttccctgacaaatagatctcgtagagagcagttaggtacacacaaacggttctcatagaagagaaactcgtcttgtctaaaataacgaccagaagcaaacttctcacaagctttataaacctcttgaaaatcatggtcagtttcataaacttcttttatttgttcaaaacccagaagcttaacattaagagtagagagtagggtgtaccttcgggataatgcatcggcaactacgtcttttgcatcggatgtgtgcgcgttatttttccatttatagttgtatgttgtccatgacatttcatctttgccgcagttctttctgattggtataagcatctcaatctattagatagtggcaagtacaacatcctcttatatggtactcatgttcttccccaatatgttgatatcttggcttgtcacaaaatagacattcattcagattttcattatatccccaaaaaatcatgcaatagtcatggcatacatcaattattttttatggtaacccaagacttgaaaccaacttcagtacttgagcaaatatattatttgatggcaaatatttcataattagttattaccataaatccatacaatgttcatttaagttattatcatctcctgttatatccatgccaacttctttggtagggacagggcagaaccgtgtcattgatgcttcgttcattgtcatctgtgaaagggcaaaactcaaagtatatattgtcttattaaggcttatcatttaattaatgttttcttttctttctgttataggaaataaatagattatagaatatattgttttaaggagagttagtgctgacacctatgcaaaagctacaacagctcttcttggagtaccactaagtcacaactcttcttttcttgaaggcccaaccttggctcctcctcatgtaagggaagctatttggtgtggtagcacaaactccacctttgaagaaggtataacaaacttgtatttagaatgttggacaatttcatgttttgtatagcaacaatcataatattctaaacttcaaaaattatcgcatgattcaaattctcaaaccacattatgcaactcacatccgactatgaataatatgaatcaaagacagaaaataatacaaatcttaattaaacgagaactgcaataatacaactaatatgcccaagtttttgtggtctagtgatagaaaaatcttagtgaaaggtaaactgccagatca

SEQ ID NO: 24397 - DNA, 3982 bp, Arabidopsis thaliana landsberg
  unsure (1)..(3982): unsure at all n locations
aaagttggaacaatttatctaaaagtgagagctttacgattgtgcttattggtagagcagcaacaagagaagagaagactatgatagtcgatgtgatgcctcacaaacttaatttaatgagtattgtcatcgacgacgttactccatctgcagagtttaaaggtcagtttagtttacttcacaagaactaccgtataaatcaagtcttacactatgagggtttgttgttatgcattatgaaagatcctactaggattgtggtttggaatccgtatttgggacaaacaaggtggatccaactcaggtattttcaccgtccacatggaatagaccatttcagatatgctctcggatacgcggataaggaatcttgtagtagccttaaattcttaaggtttttagattatttctacaaagcacccgaagaggaatttttttgggtatgaaatctacgattttgactctggtttatggacaactcttaatgtcactccacattggcgaatagcgttttgtaacagtggcgtttctcgttaagggaagcacgtactggtgtgctgcaaaaaggaacgtagatgtaaatgaagtctttgctaatcgcttaatctgttttgattttacaagtgagagatttggtcctcttctgcctctgccgtttagtggtgggcatattgactgtatgacgttatcttgtgttagagaagagaagcgtgcggttttacttcagcacgatgaatcaaatccatatgagcttgacttatggattacgaccaagattgagactggagaggtgttgtggagcaagttcttgagagtggaaacagctggatttgatagttatgttcctattataaatggcagtttcttcattgacgaggagaagaaactcgctgttgtttttgaatatgggaatcgccacacaattaacatcattggagaggctggacacttgagggcattggatctcgttggagattatggagaccaaagatgtaagacagatctgtgctcttatgttccaagtttagtgcatatcaagcaacctgaaggaggggaaagggaagaagaaagcgaattggagaagcttcgatatgatgaaaacatgtcgagacttgtcttacttgaaacgaatccatgagagcaacatgcatgaggagataacaagatgattaagactccaatttacaattccttatgtaatgtctttcatttacttattcttttctttgaacaagattactctactatcataaaatttgaagaagatttgctaagatgtttaatgacaaaacatagtaacaaagaaatctatttctgtttcttatatgtacaacaaatgatatattggctgcgatcacttaagggattcagaagttcaatatagaatggattgtagaagtagtcacatatctgaagaatctaggaaacagaacaatgaaaggaaaaataaagggaccttagtcttagcttgtattggtcttggcttttttctaagcaaaactctactctttaagtcctttcttcagatcccgtgattcgatgattggatcatgcgtattctctagttcgtctatagtattttcatacgaatgnnnnnnnnnnnnnnnnnnnnnnnngttaagaacaaatcaaactgtaaaatgagttagtagcacttaatataagaaatacatctttcagattccttatctctatttatgtgatcaatcaaagtctcttacaggaatctaataaagacatctttgaaatgagagatggacaaatacgaattatgtatgaattgtaaagtgagtttgtaacgcaaaaggagaaaacgagatgattaagactcaatttacaatgcctaacgtatgtctttcatttactcattcttctctttgaacattattactcttctttcataaacctgttttctttccagcttaatgtgcatcatgatgaagatttgctaagatgttttaaaataaaaattagtaacaatgaaatctatttcttttctcatatgtacaacatatgatgtacagtgttcaatagttatatgatttacagagttgattgtgcaagtagtcacattgatgccaacgagttattcgcatagattgcgtataatgttcagagaaggttttactcattatgatggtgacggtgacgatcgaggagagttgttgccgtgagaacaatcaaactgtaaaatgagtttgtgcaacataacataagaaacacatcttccagattctttatctctactaatctctacaggggaatcaaacaaagacctctttcagatgagagatggacgagtacaaaaaaatgtttaattgtaacacattagaaatccaatgaaaagagtacaagcttcagatatatctcacagaatcggatcagaccccaacatgtcttttttttcctattacacattacagaaaaataatgttgtggaaacgaaattatatgttgcatcggtcataccccgagaaccaagagggttcagcgagctttgacaactcttcgtctttcttgtaaaatggttggaattcttctctccattggttatcaccatcactagctgatggttcatcatatttggccatagcatcgtcattacaagaagcttgcaaagattctatgggattttgtggctctgcattatgttgttggtttacagtgctgatttcggtttcgtatttcctcttcaacttgtccccctttttatatgcttctgatgcttcatactctgcatccattgctcgtttctgtgaatacacaagccagaaagtttaagtaagagtcacatgataggatatgggtgagattttagaaatataactataacagtacctgtgcaaatgtcaatccttcttcagcttctttaaatcgaacaagtaactctcctgctgcttgaacagcttcagcagtatctcttagttgtgactggagactcttgttttcatacctgaaggatcggacctccttctctctttgcaccttcaaagctgaaatttctgctgcaagtgcgtttatgaatctagactcagctcccttgactccggctcttgctgctgcttttttgacatcatctattccttctcgaatcctcctatgccttgcaagcaattggatatgcttctcttccaggtctgcatattgttcaatcatccgtgcatgaccctgcattgccatttgcattgcctctgtcaactcttcagcacatcttttctctgtatccaattcacgtttctgcttttccattagcaatctattggtatcaagctcagttcttaattcctcagcaagagagatccagttgctctctgcttcagtccaacgaagtctttcctgttctagtgtcttctcaggaccctcgtccactgactcaggaatggtattaagtgttggagcttggttaggatcacaagcgtatgtcagcttaagcaaggaacctcttctccgagcagatgtaagagaagagtcagtgtaacattgtagctgtgcctttaaatcgtgaatctcttctaataatacttccctttctcccatgtcaccatagaagttcttgaaactttcgagctcttcttgcactcgtttcaactcaatcctcgtctgcaatacttcggggtggttctcatacatgtccttcagaagctgcacaattatatgtaagaaaacatatctgcattgattcaataaacttctaaataatggtaacccaaaaatttaccttatgctcatgcatgagtgatgcaaattcttcatccagaaaatcatctttagataacacgccatccatgagactttcaaggcgaacaatcttgtcctcccttgtttgtcctatgatagcattgcactctctgtcacgcttgtactgttgcacctgtttaattttccagagataattagaaaggtttcctatatatgtaaaaagtagagaagctgcccaacagaacataagcaagaatcataccagccgattaagctgtgatat

SEQ ID NO: 24398 - DNA, 683 bp, Arabidopsis thaliana landsberg
  unsure (1)..(683): unsure at all n locations
actaataatctcctctataaatagtactctataacgaactaactcttctcactataacttaaacacacacttcatcgtctctgaaaccctaaaatttaaacacaagatgggtttggttagatcattgtgcttattaataaccttccttaattgtctcatcnnnnnnnnnnnnnnnnnnnnnnncgcaaggcctggtcctgtttccggcactaggattgggttttacttaactacgtgtcctagagctgagactattgtccgaaacgccgtgaatgctggtttcagttctgaccccagaatcgcacccggaatactgagaatgcatttccacgactgttttgtccaaggttgtgacggttcgatccttatatccggagctaacaccgagnnnnnnnnnnnnnnnnnnnnnnnnnnnnnnnnnnnngaagtcatagacaacgccaaaacgcagctcgaagccgcgtgtcctggagttgtctcttgtgctgatattttagcattagccgctcgtgacacagtcattctcgtaagccttaattatttcataaacgttatacgtaattaatgcattatcattacttttataagtttacatgtatataacgttatacatgcatgggttattgtgcatgcagactcaaggaacaggctggcaagtccaacgggacgtagagatggtagag

SEQ ID NO: 24399 - DNA, 797 bp, Arabidopsis thaliana landsberg
tgccttataaaacgcattttattgaataaaacgtgtttgggggaatagttgatttatatgatcaatatatatagccagataattctggtataatgcccgtaccaaacttaaacaaagcgtaccaagacaatcacctaacatatataatcggcatgtaatcattatagtatcccatattttaattttaactatcttaactaacaaaaatattcttaaatttttatttggacatttaatactcaaaattttttggttggaataaaaatacataatttaattatttgtgctcttaaaatctctttgtatataaattattaaactatttgtgaaaatcgaactcgcaacttaagaaacattagaaagatgtctatatgaaatgagctaatcaagaatatctcaacaatgaaatatatctcgacgttccattcacaacatttcacccttcaacctcatcaaggtaaaaatcaacaaaattagttgtaagaataaaaagaatccatagaaaggcttcatatatacaagcacgaggggttcatgatgactattgggcaaaacaaacatccaagcactcgagctcatccatcacactcccgtaagcattgttgttttgtgtaatgaagttgttgtgttcagtatcatgatattataactagaaccttgttatcaacctcattgatgtgtatatgatgatgtatgtagttctttgaaacaagaaacggaataagtcccaaactctggattatccatagaaatgaaagcgaatctcatgaatcaatgattttagcgtatgatacata

SEQ ID NO: 24400 - DNA, 925 bp, Arabidopsis thaliana landsberg
ctgagttttttttcaattttaggaaaaatacattaaaaccccaaaacttcgtaactattgcataatcaacccattttattttgcatttgggttttccttcatttcattttgttagttaacaagacatctcagtcattgttcatgattcattacttatttcaaactgcataaatccaaataaaattatttgataagatgaatattttgtagtttacatgagcaaacagattttcttcaccacattaaaatctgaaaaaataaaaacaaatctatgatgaaaaatggagtttgacaagtaaatatacatctgtaaacactgattatcagagatatttttatgacccttctccaatgttattcttcatatcttgaacagttgaacttacaccatcactcaattgagacctgaaaaacatatttttgattatttgtcttgaatcagtgatcatgtttgtttgctactttttatattttacatagaaaatcaatttttaataagaaaaaactttggtttttatttacattctattattaccatgactatcaatcaggtccatttagcttattggttgatatctacatctccaagacaatatctgtaaccatcaaagaaatttaaattaatttaccctatccattattcttgtttacatttttctatttgtttatttatctatttttaaattcttacttttcatctttctgcattttaattcagtccttatgatgtttattatatgcttttgacctaactaaatactgcaataaagccagtcatgatattcacttggttaattacaccatctgtatgtttaaaataaaactttttttttttgctgacctgaaaaaccaaatttattttattttagaaaatctcacatttttaatcagtcttggcccatttgttggcgttaacatttgaacg

SEQ ID NO: 24401 - DNA, 465 bp, Arabidopsis thaliana landsberg
tgggatcactactccattcacgcatgtataagaatatctagctgaagtgtggaaaaagaatggatctagaaaaacactatgaaaggatgtaaaaaagattgtacaccttgcgaccctagaaaagtcatgctagttcttcaagcacctgccagaagaaggaacactattatgaagagcgtgcgatcgcccacaactctctataaaagtgcaaagagaggaagtgtggatgttcaacaagttatcggaaagaaaaaagattcaagaaaaaatggcagaagaagtatcctcatgtgtccggcaaaaagaagtggaaattcttcaggaaaaagtcacaaagagtttcaagtaatcagacagatgttacatctgcaagaagaaaggccactatgcaaaacaatgcccgaataagaagaaaagagataatcttcttagatacttagcccagatcaaagatattgatgactc

SEQ ID NO: 24402 - DNA, 615 bp, Arabidopsis thaliana landsberg
gaggtatactaagtacacaaatctcaaagcttttataagaacatcagcagtaacatgattaccaaacagttccagtgataatgatctacaaacagagcaagtggaaggaaatacgtgaaactggtaaaaacaattgattcaaacatgaaatttaacagatgagtaaagtccaggcaatcatggtttgtgaaatatcgaaatagaggaataagtgaaacttgaaatcaaacagagcaagcggaagcccaattaacaacgcaaacagaaatccaccaaaaggaaactttgaactaagaaatccccaaaaggagaacagaatcagtagaagcagaagagatgagtaaaagtcggtatctacctcgttccaagccccaaatttggtgatttcagtgaatgcgtccagcgagaagggagaagggagaaagtgagagttgggagtgcttaaatcgctggttcgcgaagatgcccagcgagaggtaaagggaataaagtctcaatttttaaagaggaagacggcagtaaaccaaattgagggttaaagttgaaaatgtcaattttgattcaatgttacccggttccttgaaatccaccggtttaacagaaaagtgaaattga

SEQ ID NO: 24403 - DNA, 986 bp, Arabidopsis thaliana landsberg
tgcaggtcgactctagaggatccccgctctcatacgtgtgataattaatgatttaatcctttccgcagatttgatagagacttgaggtggcggacaggtgtcgagataatcccggttccttgttcaagctccgacaatttcaaattaaccgttgacgccgcggaatgggcttataaaaaagcccaagagtccaataaaaaagtcaaaggtctgattttgaccaacccatcaaatccactcggtacaatgttggataaggacacactcacgaacttggtccggtttgtcacgaggaagaacattcacctagtcgtcgacgagatctacgccgccacagtcttcgccggaggagatttcgtgagcgttgctgaggtggtcaatgatgtggacatctccgaagtcaacgttgacttgattcacattgtctatagtctttctaaagatatgggacttcctggttttagagtcgggatagtctattctttcaatgactcggtcgtgtcttgcgcaagaaaaatgtcaagtttcggacttgtttcgtctcagacacaactcatgcttgcttcgatgttgtccgatgatcagtttacggagaagtacattaggataaaccgggaaagacttagaagacggtacgataccattgtggaagggcttaagaaggcagggattgagtgtttgaaagggaacgcagggctattttgttggatgaatttgggtttcttgctcgaaaagaaaactaaagacggcgagctccagctttgggatgtgatcttaaaggagctgaagctgaatatatctccgggatcttcgtgccactgctcggaggtcggatggtttagggtttgttttgctaatatgagtgagaacactttggagattgcgttgaagagaatacatgagttcatggaccgacgaaggaggttttgaaatgttaaaaaaaaaagtaaagtaaatccgtttttttggtggttaaatatatgggg

SEQ ID NO: 24404 - DNA, 1236 bp, Arabidopsis thaliana landsberg
tcttatgctggatcataaacatgacattgtatattgcagatatgacttctctaactaattatagtcagacagtcaatgaccaaagaagaaggagggacttaaaaacataatcaagaacttatggtacctcaaagacatcatcgggtgaagccggactcataaaaaaccctgttcagatgatgcttgccgggcgaaagatattttgttgttacacctttggatgacagagttcaatattactctaaaactctaattagttcttctcccatcaagacacaaaacaaatatttccttttctctttttgctcacatagctgatgaaaactgtgtatctcatggagattctacgtgacatccgaagagaacaacacttacgatgaaaacaatggcgttacaagcaagtctcatctccaaaatgtcacgggagtcttaacataatttaaaaaaaaaaaaaaaaaatcaccagtcttattttattagtcttatccgaaacatattcttattttttatgcctttttaacaaaaccaatacaaacaaacaaaaaaaacaaattctcatacttatctcgacgtgtttttagaatccaactaaattctgttaaactaaattcttttaattcaatcattgaataccctcccaaaagtgtggaaccctaggacatgtccataaaggaacaacaccttaaaccttctttcctgttgggtctttgtttaaaaatgataaaattattttggttgtgggccttaggttgaaaaaataagatgggctttcgttattttaggcccataatgaaactaaaactaattgtaaattcaaatacttctctccgcaccttttcatcaattaggaaagagagagagaagaaggagcgttgttgtctctcacactcgcatcgagaaagtacaaactcttcgccgaagatgacgaagaagccaaatctccgatcaaaggattcatctctcggagacgatgctgagaaactctacgagaagaagattctggatctggagtccgtgaacgaagctctcaaggtttccccccatttttcattttgaattttttctccgattatcaaatttagaatcgcttcttttgcttcgatttcgtacttgtggaagataatctctcgaaaatatttcgcttaagatcttaatttatgaatgattttcgtcccttcaagttcccaatttgcagaaaaatatcttagagaactgtgaaattgatcaattcgcatt

SEQ ID NO: 24405 - DNA, 1308 bp, Arabidopsis thaliana landsberg
gctggctttttcacggttcccagcggagtctgtgaagaagtgaatgtgatttagggattgcctagcagtttccattttgtggaaataagaggagctcatggctccctccctcagccatatcactctggacctctgatagaagaaactagtttcagcctcagaaagtatgagccatttgcgatgagactcagcttccaactccgcattagaggcaacaggattatctagtaaggctcgatgggcaagcagtaaagcatcatgggcctcctgggttcttttctcaatgtcagaatagttgtcacggctaaaagttctgatggctttcttcagggtcttcagcttaacagaaacacgaaacattgcagagccagtgatactggtagaataccactcatgccaaatgagggggaggaaatcttcgttcttcagcaggaagttattgaaccggaagggcttctttgacctaggagaggcagacatcagtcttagctcgcagcaagcgtggtctgagaaatcaggttcaccaaaatgtcccagcgaagaaggaaacttggtggaccacttatcgtttacaagaatacggtccagcttttttgccacaggcgctcttctctgcttattccaccaggtgaaagagctgcctctgaaggtaagatcagttagggaagcttgaaggagagtgtctatgagaattctggttgggcgatccacattgtatccatcagaggcagagtgctcagctggatgcaggatctggttaaaatcaccaagcactgcccaaggtttgtcaacaactcttgaatctgtggagaagtccatcaactcattccaaagaacctgcctagtcataacatcatttgaggcatcaacaaaagagattaccatgacttcagggcaatcagggagctgcacctcacagctgatcaactgcagcgacttggagatcacagtaaccttaacacttgggtgccaaaaaacccaaatctttcccaattcagagaagccgtaattattatcaaaagaccaaccgggcatcaaagcattcaaaaacttctgttgctttggctgttttacatgagtctccagcaaactcccgataagaggtttatttcttcgaaaccacttcttaaatccgatacggtgtgaggatgaattaaaaccgcggacattccaacaaaagatgtctattgacataaaaactaatgggatttggggcctttgcccctagcactttgttgttgtcgcttcgacaacacttccgtgaatctcgtctcatcttccaaatcagtatcctcgcagtcagattgc

SEQ ID NO: 24406 - DNA, 1125 bp, Arabidopsis thaliana landsberg
tcatgttttcatatgattcaagctcaataaatcacaaatcctaatatcaaaatcgattagtcactacctttgaactgtgagaggtccaagaaccgagagcagcaatggtgagccatgatacatagatcctgctcaaatatgtacaacttcagcttctaatagcctaagaatccaaatttacagaggatcaaatcttaagatagacctgcatatggtgacatcgatgcctgcttcaaccaataaccttcagcaactgaaaatgttcatacaaaacgaagaaatgtgagctgaattcgagatcttagagagctaatgagggagtgagaaagagagaggagatacggcggcgaatgctggtgagaggggtagagacctccggacgggaagagagattgagatttcccgggaaggagatcaagatcaatcggaaagcaatggaagataaagcccaaatccagaatcggcttagctgcttcattttctgctcctccgccatttctccgtcgtcttttcttcttcactctctccggcgagtgaatgtttggttaaggtttggttccggtttgattttttcggtttatgatccatttataattcggtttgattaatgtaactctatatctgtacggtacggttcggtttttgtttgatgcatatccgtttagtgtttgtgtgattatcattttccaatgtaatatatcatataaagaatattcataattagtttttttttatcttgttttaattttgaagatagcactgaatacatatatgatgcttcgttaaatacttatgtgcttatcaactttttatgtttacttaataacgttggtacgttgtgtgaagtgctctctcctgcttcgttatttgctttattctttagttcctctttccgtgcttattcttcttcctttattgcttcatctcaagctttcttcctttcctttgcatcaacaaccgcttttcgcattatgtctagggcagtttttgatttatcaaagacatcatcccccatcttgtgtacctggtcaagatctagaagaacccccggccctgaatttgttcttggtataactaaaacgcaatatgcaacatgtttagctgtgttgatgatttcctccgttt

SEQ ID NO: 24407 - DNA, 978 bp, Arabidopsis thaliana landsberg
attaggatacaaatttgtttagataccctttgtagatctctattttgaggagaaaaaatctatagagagaagaagatttaccttgagagatggagctaattgcatgaaatcaccagtgacaaaatctatacgattagcaactccataaacctttgcattgttcattgctaatgcaatcttcattggatcaatatcgatagctataacagaagaacatctaaaacaaaggtataaagattaaaaaaacatattttacaaccattaatcacatacttgttatagagagaaagataaagttaatattacactttagcaaattgaatagtgttaccaccaacacctgagaagcaatcaattactactttcccacgacatctctcggcttgtttgatttcgatttcttcgggagtcacagagtaccatgggtcttcagtgcatttcgataccttggtcgtattttgagaagagatcgtaacgttgaatccagtacctactgatcttaggattcgtaccatgttctttctctatcaatgattctgcttctgtagagtaaagaaaaactagagatatataagaaagcaagaaagtcacataagattggaacattgagcagtgtttatttacctttcttcatcgatctcgtgttgtgtagtgtgattcttcactaaaaaaaagtcaactttgtgttcaatgccaaaaagagagtgaagaatggtccgacaagagagagtattggttcgaatctcccgggaatcgaaatattcgttcttttaatatttaaagagctaatttgatctccaccggtttggattaaaccggaccggctaaaagaaatagatcaattttgaaaatcttaaggcttgatttcatgatggtgtttttgatgaatttaaattgtgtttcctgaaaaaaacaaaggtcattttttctggtttcttgtgatgttttagtctaaatgctaatgatatataatataaa

SEQ ID NO: 24408 - DNA, 978 bp, Arabidopsis thaliana landsberg
tccaccccctatgcgttgtatacttgtattattagtaagttgtcccgttattagatcaaagaacatatccgagtatttgtctccacaatttaacaatggtaaaatcacattcgcgaaagtaattcaagatatactacgtagtacgtactcaactcttcaaaatttagtggaattttagcattgtttttcagaatcaactacggatttaccattttttttagatggcattggtggattttgacttttattaatagtttgtgaattttgtctttttttcaagctattaaaatatgatttaatatgtgttttatccattatatttgggtttagtcggttatagttgtttttatggtttaatattttatataaaatacatatttttaccaaaaaaaatcctaaatatatacatttttaagtattaaaaaatagtaatccgtaaaattatagtaaaaatgataatttaaaataattttttttcaaaaatgacaaaatcaacaataatctcttgttctcatattttaaaataaactttgttttggatatgtaatgtaaaatatttttatggaactatcaattaatttataaacaaaatagaaaatacccaattatttttgtgcgtatattaactttagaaggaaaacgtgtgaaaatgatatttattattaaaccaaaggacttgaaaaatataacaaattaacagagtgtaaagtagtattatacgtgtaaaatcattaatcaaatgaacaataattacgttactctgttcattaatgacgatccaaaacagttcttcacttgattggattgggtgaatttcttttctgtcttgaattgaatcagatatttttgatgtatttcccattatgtgtattttaaaaagtaatgaagaataaagaaaattaaagttttggagattaaacattactataaacaaataataaatgtgaaaaggagaagaagaaagatggaaagtgggaa

SEQ ID NO: 24409 - DNA, 591 bp, Arabidopsis thaliana landsberg
taatccacagtttcatatatttgctcagaattgtttagcttaccgatgcttccccttgagcccaataataggaggcaacagagccagcaatcactgtcgcagaagatgcaatgaagaactgtgtagcccaatagcaaccaaacaggtggaagaatatagcaatggtgatgtgaggggtgtaatgtatgctataaccgcaacaacggtcacaattaactttctttaacacgagatcatacgcacagcagttagtgttgttgcagttgttctgaacaacttgaccagaactgaagagatggagagccgctgatatccagaacatatagaatattgctagcatcgcgaacggtatagccgggaatataataagcgcttgaacttctccaattactttagcagctacctggatttcacaagtatacagcaaaatgacctttctagcataaaccaaactggtcaccaagtgactaagaaagtaatactcgccttgaggactgatgttgccatgagaattcggcggataatggcaattgaagtgagaatagcaacaacagagataaaagtcatcagaatggcaactccacgaacatg

SEQ ID NO: 24410 - DNA, 965 bp, Arabidopsis thaliana landsberg
  unsure (1)..(965): unsure at all n locations
aatggacaatgacggagcttattagacatccggaatgcatgaagaaactccaagacgagattcgcggtgatgcgacaaagcttactatatatagatcacatgaagaagttgaagatatgaagtacttaaaagcggttattaaggagggtcttcggttgcatcccccttttccattactagttccaagactattgactcaagatgtcaaattaaaaggatatgacatagctgcaggcacacaggtattggattttttttaaaattatgaatcataaatacgcatatctaaaagtctattttaggtaataaccaatgcttgggctattcaaagagacattgtgacatgggggatagatgcagaagaatttaggccagagaggctcttagattcacctctggactttcgaggaacaaatttcgaatacattccatttggatctggaagaagcatttgtcctggaattggatttgctatggctttggttgaggtgacactagccaaccttgtgaaccgatttaactggagaatggatgctcggctttcgggggatgaatatgatctagctgaagcaacgggaatcgatgtttgccgcaaatttcctcttattgtatttccatctaatgcctaatctagtccacatattgtcatgatatgcatatctttaataggtttatgtttgaagtttgaataagtgttgttaatttggttgattagctattgattatggaagaaaatattccaacttgttattaacttatattggagcctcgtaatagaatagtcatatatgtaacggaagatttgattgtgcaatattatagcgccttcatatcttcctcatttatttacgattattctcctttccaattttttagtacatagcctctgtataaatgtataccttctctatcaaaaataacaatcatcacttacaaaagcttnaatgatatgagagcaataatcg

SEQ ID NO: 24411 - DNA, 1715 bp, Arabidopsis thaliana landsberg
tccaatctatcatgttcatcattcttggttctctattccggtagattgcagagagttgaatccttacattagaaagttttccaaatagctataacacagtaatttccatcatctttcagtcatggtgatgcatatttccatcatctgtcaaagccatgatgcagaaatccatagcaaaatgttctagccggtttcagtaacagattgtcccacatgttttctatatcctttgatccccattttccgtctcacacaattcaccatctcccacatcccagcatcagcgtatatgttagaaagcaaaacgtagacacttgatttctcgggttccatggataagagcttctctgcaatttctcctgctaagtcgacttctttatggattctacaagcactcagaagagctccccaagcactggccattggtttcacaggcatgttgtcaatgaaagacttagcttctccaatctcaccagctcgacctagcaaatccaccatacacgcgtaatgttcttcctctggcactaccccatagtctcttgtcatcgattcaaattgcttccatccttctttgacgtttccggaatggctacaggccgacaaaagcgaaacaaatgtcacagaattgggaactacgttttgtgacttcattttatgaaaacaatccagagcttcctcgaacagaccatttatcccaaaagcattgatcatcgagctccaagatatcacatttctctctggcatcatatcaaaaaccgtccgagccatctgtatatttccgcatctagcatacatatcgatgaacgatgtaaaatttacaggatccatttcaatcccataccttatcatgtagccatgaacacttttactgtgccttagagatcccaagctcgagcaagaaacaagaatggccgccaagtacattgatttggaagtatcgtttctcgtagcatctgcctgaacagatcaggggctggaacagctctctcacactttgcaaacccagaaatcagcgtagtccacattaccacattcctatcaacacttgtttcaaatagttttcgagcattgtccaacaatctacatttcacatacatatctataatggaggcttgtaagtaatcactctgatctataaagctccttctaatggatactccatgcacacacttccctactttaccagcaaaaacatttccacaagcctttaccaaacatatcaaggtaagcgcatcgagggctaaaccagtatctctcatgagacaaaacaaacgaaacacttctgggtctttcgagtatttcaaatatcctttcatcagaactccccaaagaactgagtttctgacaggaatttcgtcgaacactttccgcgcactttccatagtacctaattgtgcatacatctcaaccaacgacggagcaacgtaatcatccttatccaacccattcttcatagccaagccatgaatcagaatcccattttctaaaagccctaaaccaacacaagctttgatcgcaaataccaaattgaaactatcaacgccatcacaatgccttctcatgcgaacgacaagaaacaatacctcactataacaacgagacttggatttgaagtaaccaaatagaatcgtgcttcaccaatggcgagtcctcttccaacaaaggactcgattgaaagaacaggtaacgaaatccagactattcgattggatata

SEQ ID NO: 24412 - DNA, 952 bp, Arabidopsis thaliana landsberg
gtatggacctttttccttactcttttgggaattccccataaactaagcatatatgtatagatagtaataagaaaaaaattgataatcactagaattttaatcataaaaaaaaaatatacaaaaccaaaacactcaaacacaaagaagacaatagtatatgaacacacaaattaagaagatgaattaggaaaatttgaaaacttacgtattaacaaaatcgtagtggaatattttgggagagtacactttttgacaatcaatacttacgttttttataaagaaagcctaaaataataatatcattttggtgaaaatagtatttatagaagatgagaaaatattatccaatattttagagatatgttctaataataattgttgcaaaagctttaacaccacttaaagtctcaattacatggctttagataaaaatgaagttacaagagtaaaaaaaaatctgacttttaagactgtataagagcaaaaacaaataacagtctgattgtatgaaaaaatgctgtaaggactgtcaaatgcttttaaagtcttgacagtgcgatgtcaatcaccctctaagagataaaaataattaatgacaaagtttgtaattatatttagacagattttacaagattatatgaagattttacaaaattatagaaaagctaatcatagagaatatataaaattctctaattagtgttgttgggtaaaagacaaaaaaaaatatgacctctttctaagtcatacgacgacgtatcgatacaaaagcccaaaaaaagaaaaaaggttcgataccttgcggttcacgtttcccatcattacctgtccgtcgtttactccccggagacgtcacgcaatacttagcttctacgctactcacattttcccacagtcctcggaaaactgacaactaaaagctagactttctctaaatatgaattactaaatt

SEQ ID NO: 24413 - DNA, 1687 bp, Arabidopsis thaliana landsberg
  unsure (1)..(1687): unsure at all n locations
ggaccgaaaccaaaaaaaaaaggcagtggaacatacaacgttattcgacaatcttgcactttatattacagtacaatccgattcaagacaaactcaaacttcgaaaagaacattgcatagcttaatttaggaacttaattattacaacacgtgaacacatttcaaatcgaaggcaaaccagcaactattttctgtttacaaatcacaactacaagttattgacaattttatcctggaatgataaaacaaaaaggagaatcgtactcattatttgtcacatgcacaaaaatatacatttcacaacaaaaagtagttaaaacaaaaacttaaaaatagataccacaattgtacatataatctcttgaaatttttaacaatacgaattacaagaatcgaacattcatttaagtggaatatttaaagacgagaaaatggcagcaaatgggcgagtgatcataatagcaatgctaatggtggctatggtaatgaacatgacatggtgtgtcaacagcaaaggctttgttaacttaggaattagtcctgaagaactacagagttgcatcaagacttgtattccggaacaatgcatgcccgaggctaataatctgaccgtgtgtgagaaagcatgtcacaaatattgcaaccgacctgctatgtcgttcaagcccaactatgtcgttcctgtagatggaaatgatgttgggtttataaaagctgctttttgcaagctatggtgtgaagaaaactaattctttctttttaatggtgctaaaatttaattaaacctcttcttatcaatgagctcaacatctattattttctttaattggatttggtgagttttaatatgtgacacaatactgacttgtatatcctaatgttgagtgtgttttgtcatcatcgtattattgatgattttgtttagtttatgccaatatatatttatgttattggtcgtatccccagtgagaaggggtctaaaagtaatttggggatagttggggtaaatatgataagactaaacatataaagggtgtgaatgaaaataaactcttaaaaaaagaaagagtagctcaatggccgtccgatgaaggtttcagttacacgtgtaatacgatgaacgcaaccgactcaatattgaaaaaggaaaaaggaaaaggcaaacacatcagtcggcggatagcgccgaccaataatcatcaacatcgttttctttcttcgccaaccaattttagctttttaattaattttttcatcttcttcttcttattcctctgataataagatccaagatcttgttttcttcttcgtatcgtcgcgaaactcgcgatttcttttttgtttttcttcttcgattttgagtttcttccgtttctgttttttatctgatcggaagattctagctttcttcttttttttgttctttagatagtttttttcttactcagaaaaaccattggagctctcgttaagagttttatagtgttataagccatgnaagagtgcgtcgtcggaacaatcagttgaaagaatcgaaaacggtcacaagaagaagaggaacaggcctcagaaacaaaatcgtcgatctaagcaaagctcaggttcaaaaatcttttcttttcttcttttgcgaattgatttcgttttttaaaccttgaaagtgatagttaggggttaaagtatgact

SEQ ID NO: 24414 - DNA, 950 bp, Arabidopsis thaliana landsberg
actgtaaaaacaggtttctttattgattaatgagagtaatgatccttttggaggttttttttttttttttggtcaaaccagggtggagggggtttactatatgttttacacatatataaagtttttaacacttttaattttatattctaatataatggtaaaaattggcatttataccactaattttaagtttttcaatttttaagtcttgttttatattttaaaatatatataatatttttgtttcaaaatgttaatatttatatatgtgtaacttgttggacataacatcccgtccttaatatgaaaatcttaaaagatgttttaggttcaatatgttttacatatatataatatatttttaaacacttttaaaataaaaaaacattgtaaagtgagtttgagttaatttttttatgtagttttgagttaattttatttaataaattagggggtctcccgaccaaaaaataataattgtaaggtgagttttgagagtaacaataatattcgggtatatttcgttggtaagagttctatattagcacttttaaaaagctttgtatatgatatagaaaacaatgggcctaagcccatataaaataggtgtcggcgagtgacgtatggctctcttgaataatccccacatttacacctccacgtgtacgaaataataaaaatgaataaaactgaattaaaacaattatcctacgctgtaccaacttacaaagtcgtattaacaacacagtgactaattctcaatcttcaaaaggacagtttataatcattttcttttgtcaacaggctactatatataaaggtagagagaattaatagaggatcgtcgacaaaacaaaaaaaatagttcacatcacaaaaatgatgatcaaagatgttcaaaacacaaacaaaatgggaatgaatgcaaatgacgttccttttcatcacca

SEQ ID NO: 24415 - DNA, 636 bp, Arabidopsis thaliana landsberg
gaggcgattcagcgaagaactcctcgaactgttgagggttgcacgatgaggaatgaagggcagctaaccgatttcgcttctcttccaggacggccttcaactcgtccctctctcgttccttggagaagtcatcttcatgggttttgtccaaaaggagagagattgctctggtactccttgatgtctgattgcatctccatcccgtgacctttcacttcctttctggctttcgatgccgacctcgcttactcagcatccagaagtttggcgattgccttgtacttgagctgcaattcagatagctggttggacaagtcgtaggcactggattcagattccgagagtctgtcccgagcgtttgagagttcctcctggatcttgtcatacctctggtattgatcctgcagctcgtcgttcgacttcatgagttcagaggaaagattgtccaattgatcttctagtttttgccttgcatcagttgaggagcggagctcggactcgagggaagaaaacatgtctttccaggccaatacctcttgttccctgtcgagcaacaacctctcatagtatttcaatcatgtcgttgagttcgctgtttgcctgaacaagggttacaaagggtagttagcatatgag

SEQ ID NO: 24416 - DNA, 943 bp, Arabidopsis thaliana landsberg
gaaagtttgttttggtgttctttgacgatatcttaatatacagtacttcaatggaagaacacaagaagcatttggaagctgtgtttgaggttatgagagtgcatcacttgtttgccaagatgagtaaatgcgcatttgcagttccaagagtggagtacttaggccatttcataaggggggagggaattgccacggatcctgctaagatcaaggcagttcacgattggccggttcctgttaatctcaagcaggtttgtggttttttgggattgactggttattataggcggatggtaaggaactatggaactattgcaagtcctctccatgcgttaactaaaacagattccttcgtgtggactactgaagctcagcttgcttttcaaaaccttaaggacacatgtgcaacactccggcgttagctctacctcaatttgataagcagttcgtagtagaaatggatgcgtgtggtcatttcattgttgcagcgttaatgcaagaaggacacccattggctttcatcagtaggcagttgaaagggaaacaattgcatctgtccatttatgaaaaagagttattggcagtgatctttgatgcgaggaagtggaggcattacttgatttctagccactttatcattaagacagatcaaagaagcctgaagtatttgctggaacaaaggctcaacactcccatccaacagcaatggttacctaaactgttggaatttgattatgaaatacagtacaagcaaggcaaagagaatctggcggccgatgctttgtcacgtgtagaggggtctgaagttctgcacatggctctatctgtgggcgagggtgatttactaaaagagattcaagctggttatgtgacagatggggatattcaaggaattatcacaattctacaacagcaggctgacagctagaacactatacttgga

SEQ ID NO: 24417 - DNA, 1124 bp, Arabidopsis thaliana landsberg
aacaagtaaagtctgtgaggtgcatctcatcttctcaagcctgcctttctttgaaagaccagctagaaaaatccaaagaagcagttttccagtatatggctttacttgagaaactgcaggttatatctggtttgcgattttcattttgtatctatgtttataaaatttacgttgtatatttagttgtgaagctttcctccattcgaaaatttcaggttgaaaaagatagtatagtctggaaggaaagggagataaatataaaaaatgaactaggtgatgtttctcgaaagacgtctgctgttactgattctagaatggcttctttggattcggagatacagaaacaactggatgaaaaaatgcgaatcaagactaggctgggaaatatatcaagagagcgaggtcacaaattgattactttgacttccaattctgtatctcccacccacacctgtttcactttggagtctgattaagttattcgtatgtcaggtagaaaagaaatctttgcagatatgaatgcgttaattatttcgctccccgaggaaatgagttccatgcgtagtcaattaaacaattataaagagactgctggaggtattcattctctgcgggctgatgtccagtccctctctggggttctatgtaggaaggtgggaaataatgtgaacagtgattgatgcttattgttacagtttatgttatgcttacttaataagcttaattggtgaacagacaaaagagtatgaagcattgcaattgagatcagctgattatgcttctcagttaggtgacctgaatgctacggtatgatgcaatgtatctacctttttcagtgtactgcccatgacttatatatgttgacagtgttcatattggttattgttactttgcattatttcttggaaaaagtatagtgaaaaggcggattagcaatttaaatcttgttaaatgtctttggttggcaaagtggtagttgttatgttctttactttcaattgattggagtctgtcatgcaggtttgtgatttgaagaacagtcatgaggagttaaagttgtttctggacatgtataaacgtgagtccactgatgcgaggtaagcacaactatatataacgatatc

SEQ ID NO: 24418 - DNA, 712 bp, Arabidopsis thaliana landsberg
gatgtacgcaaaagagcttcctcacccgctgatggttgtagattactaatgatgtccaacaaagaacaagaaaacagaggttaccacatgttttactaatccaaaatactattgattacctaactagttcttacctatgttgttccaagcgctttgtttacttcttgaagttgaaaatctgtcattccattatcttcaaatttctttttcatatcaatggacatccatcctttgcgcctattacatttttttgaaattgtttagacatctcaggaatgcattcaaacgccaaaacctatacacattttacacagtaatatatcttaaatcattcaaaacagatatactaattattgaagaagaaaaacaaaattttaccttcagaggaatgatgaaccctggaaacaaatactcaattcccactttcccatctaatcgcttcttcatcaagtgaacgatcttttccatagtgtcttcaaaagtatttcgcccgctaggaaacttttttacctattccaagtcattcactatcttcagaataaatgaatgtatgctaccaaaccttctcctccctcttactatcgcgcataaaaagagtaagacagccacccgcaactgatgtccatcacactcatcttccattgacttcagcatatcttccacatccttcacatttacaacttgtgttccatagaccttctccacaaagtca

SEQ ID NO: 24419 - DNA, 1221 bp, Arabidopsis thaliana landsberg
gtattaaatacgtgcaattatactgactttctctatataatcaagatgtttaatacactgatagcttgacgcatttattggaaacacaattaatggtgtcacatgaaacctttcgggaaaaaactaacattttggcctagagagagatgtgaattaacaacaatttaaaaaaccatttcgagcattttatttcttgtaattttgtagcaaaattttcttatccccaaacaccaaaaactttctcaccaataaaactcacaaatctcctcacggttcccttctcctcctccaccttctcacaagcgtctccggcacaaaaaaactccattggttccaaaccgccgctgcaaccacctacatcttgagtcaactcgcttgaactcgtacacggacacgaattcacaactgactcaccgagtcgactcggaatctctgagtcatccgtactaaagctagaactagcaagaagtgaagaagacttccctgaacgctttcttctatctttcttaccagtaacgttctttttcttgttcttgttcttctcgaagctatcttcgaaggcatcgatgatttcatgaataagctgccgactcggtgacgagtcccatctaacccagtaactcgtgtagcacctaaagcagtcacagtggaaaagaggcgagtgattgtcgaaaaagggcttttttgtgggctttggtcttattcaggcaagaggtagggtttcgctcgccggagtaagatgcggttgatatgagataggctaaaacttcacggtcttccggtgagagaaccgccgctagtgagaaaatagcgacggcaagaagagtaagaaggtggtcgttggattttatctgcggcggcgacgggtgtacggttccttttctgtagagcttcttcatattttctatgcaagagagagagagagacttgtggaagaagatgttatcgagactttaaataccgaaagttttattaggttttgtttgttttggtattgttttttagttattgtctctcgtcttaaaaatccaccgcctaaacctttgtttaatggcataagtaggtttaagcaaaaatcattcgaccactttggttttcatcaaattggttaaaaaaaagtcagtaaaatgttaaaaaatttcttttgtatgaacaattaatcagcttagacggctgacttatatatgaaattaagctatctttattactaaacaatgtgcg

SEQ ID NO: 24420 - DNA, 1142 bp, Arabidopsis thaliana landsberg
acaaacatattcctctctatataactatattttgtaatttgttttcaattatacatacattacatccaacatagacactaaataaattcgcgatccttcattttttttttgttcacttaaagattaactttcttaaaataagattgcaaaatattgagatgaacgacgtttctggtacatgaagccggcatgacctaattctccggaaattaagttgacgtaaagatatatgaaaacaaagccttaacaaggaaagcaaagaagatgaaatgagagagtcagagaaattcacaagactcacacatgagaacgggtgacatgggagatctagtgataaatgtattttggacgttttgtggatattttcaacccactttttttttttttttttttttttctccaatatttgcaacccacttaatactacagttttgctacaagccatatctttttttaactatttttaaaaactctggtatattctgtgattactctacagtttttagttacctaatattttttttttgaagtaaaagcagaacccaaaaacaccatcacaaagcacaaatctttgaaaacttctgagatagagacaaaacaaaagttgggtcctataaattttcattcatttttcatctttaaaattcatttatttcttcttttaaattattaattaaaactttaaaagttggaaaattcttcaaaaccgtacaactatatttgtgtggacctgaagccaaatgtctctctcaattggccattttaccttctacacattcccactggccaaattcgaagttcattctctctcaaatcactttgcccaaatcttcctttttcccatatttgatttcttctttaaataaagcaaaaaagatttcatctttctatttattctctttataaattggaacctactttgcttcttcttcagtctccacacttatcttatttttgccagtcttctctgtggatgaagcagagtttttagtcaatcaaaagtttgaagctttccttcatgggtttctgatttgtctactaaagttttgatttttttaatttgggtattaataaaaaaagtggggagtgacacaagaagcagtatagtcattagttttccactaagcaaagcacccaaaagt

SEQ ID NO: 24421 - DNA, 1752 bp, Arabidopsis thaliana landsberg
cttattcaaacaaaagacatgaattgatggaggaagatgaatgtgcaattccatttcaatttaatggttgttctgctactgcttcctttagcagctccggtatcggcatcggcaacattcccagttgagctgattctatcactctcacttgcagcctagtctgtaacaagaaccatggcattcgatgcttcctgtactgctcctgtctagcagatcgtagcgtgtctactattgctagtgatttaaccccttcctcatataaagtaagaagtgccacagcttcctttcctaattccaatcgtgacattggtaatcccgcatctgagatgagtaagactaggaattttcactaagccaaatctctttcaagcgcactaattctatcctatctattcaaggggctattgcgcttagggaagaaagacggaaaagctgtagtacgcttgagtgagttcgcttgatctttgctaattggctgacattgttattgctgtataccggtatagagtatatctgtatatttaattttcatactttttttattttagtaagatcttatatcatctgttccaagagcgatggaatcccataaaaaagggagcccgagcggcattaagaatagcttctaaaaggagaactggctaacgaagcctagctcgtttaggtcctgccattcctacctatctatcattggtcaactcgggaatcagctagacccgactttctctttcaaatgaattgattcgccagtttatgagctcactaagcctacagccaacgctatatctcttgctatggctcttagctcagggtgggggtatctggtcagcacactaagaatgaagtagtacgatcggcgggcgtttgaaagagagcttcagtacaattctcgctgcttagcgaaatgaggtacaaagcacctttccgctctttgctttgcgtatgctggtttggaatctttctcttggtatgaggtttgaaaccccgcaatcaagggaccaagctgctacctttccaggagcaactccttagccagcctacctataatccctaccataagctacttcttctggagtggaactctacgctttccctctcgcaataaatgctcgagttccctcttttataagagtaataaatacctgcagacctttcctttctccattccgcctcattcattgttttattccgcaaagcaaaagtggttcgtatgcctactttacctacttgacgaaagggaacgcactttgttgagtttccgggtttttttatagattggattcagtcagcgtcacgacataatcaaaaggaaggagtgaggctttggttactggcgaacgcttccaaaggcgaccttctcgagtttccggctgtttcctagattgaaggaagtagccctttcgtcgccctaccaaacgcaagaagtcactatcaaacagctcgccctactgtgacaaaggtgcgctccgcccggtgactaagaaagaggtttgcgcaacaattgaagtgatgaggtcgagggaagtagggctcctattgactaaagattggttcttcgctttcctttagaatgaaagtagctatgaagcccctacctacaacttactttgtttgattcaaaaggcgaacagcccccccaactagttgtatggggtggggttcttgtggtaagctgccttggatatgagaaattcctaaaaaaaggcaaagtccgctattagacgaagatcttcctatcaatagataggaatt

SEQ ID NO: 24422 - DNA, 736 bp, Arabidopsis thaliana landsberg
  unsure (1)..(736): unsure at all n locations
tgtcttgtttgttttttcctaatcaacgatacacgaagctattttggggatcgaaattaagttttttttaaacatataccaatctttcaattctattttttttttctattgttttctcctttcgtaaaatagatttggacatgaaccttatccggagagaggtgaaaaccacgaacagagtgctgtttggtttcctaggtcagtggcaaataaaagcactggtttctctttgacacgtggagctgtcacagaccactaaaaacagatacgacacttcagctcgataactcagatttttgccacgcttatctgaaagtcaaagatctcttggtgccacatcattatgtccnnnnnnnnnnnnnnnnnnnnngatacaccatagaaaataaagtaaaacacacgtaagccaaaaggatcgatcacttgtctatgtttttcgacatacatgtcttctcatatccactagtgtccacgtggagggaatgctaatagttggattatcatatagagcgactcaagaataatattgcttagttcctaatagaatcttattacatatataaaaaggttaaacgcacatcttacctaaataaatcatgaaactgattgcttatagataaaatagtttaaattaaaataatgatatataaatattatacaataacacaactttttagttataaataaaaatatctctctccggattgggcctaccatcatagaatgatttttcata

SEQ ID NO: 24423 - DNA, 1085 bp, Arabidopsis thaliana landsberg
attgcccatcaattataggtcgcttccgatggatgaatcgagtcaaagaacaaattcttttagtgatttctacacgttggagaaaaagcattacacatgaagctcgtctccaaatgccctgttccacaacatcctctcttcgtctctttaaatcctgttttagtttccacatcaatgaacacatataatcactggtcaatatttatctcataggatgacttgccaaacaagaaagagattgtatcatctataccgtatttgctagggttttgcatcatgtccatcatagggtcatagacattggagtaaaggatcttgcttcctgtaagcgatgcttcgatttgaggtaatagattctgaagtttctgattgtataagacagagtctcggttctcttgttccaagcagaaccttagagcgtttcggaattagcagtcatttgaatcgggtaacaacccatcggcggtaaacctcctaccataattttccggcaacctaaactgtaaagctcctgcaaaaaataccggaaaaatgatccgagagattaacaaaactaatacataaaaaaacaaaaaaaaactaacatccgttccaaaccctaatttcttgtagtgaggaaatatcttaagacttaccttcacgaaattgttaagcctattaagaacaaaatcttggtaatcagaaatgctaggatacatgcgacgccatgagggaacctcgtaataattcaagatgaaatcattaggccctgcactcacaaccaccaaagcattgtttatgatcttcatggctttcttgtctcctacgatactcttaagacgagcaatgtaactcttgaacatatttggttgttccgagacacgaatcgcttgtgtcgtgagactggtttggtcatcgtaaccggcacctgctgatgcgaaacagactccggttacaatttcttggtcggtgagatttggttgtaagaaaggaggaacaaactgtttgatgttgagtttgggtgcgattatgtcggagaaaaattttccgtttgagaatcttccgttaggtgagtggtttgggagaacaattccgaaggacatgtt

SEQ ID NO: 24424 - DNA, 646 bp, Arabidopsis thaliana landsberg
tcaggtcgactctagaggatccctacattttccttcttccagaaccataacacgtctcctcccatttcttcgtaaatacgtttctcctctctgacccatcacgatcacaatctaacaaaaagagttttcaacaaaaatcagcaatcgtggcgaagctatataagaaagaggaggagagacacaaagcgatggaagcagaagtagaagaggaagaagaagacatgttcgaagacgccgtgtgtaccacgcaagcaagagtcaacacgccattgtccgtaatcacagaggccttcgaagatctcgcaggatctggtgaaaccgcaacgatctgatgagatcggtgaagacgaattaaggcttgatgatttctgcagtgcgtgtactcacgtctctgttctcttcaactgtcttggattcgctttcaaatttgcggaaatggagtacatcgccaaggcttaaggatttggtggaagcgtcgaaaacgttcgaaacgttacacaacattcttgaccatagacgtggagacagaaacggttaaaacatcggggagccattcgcgtacctaagacgtgtgagacaaggtttagatgtgatccgagcgatctatgaacaatttctgatcgcagatgactattcgttgaaagac

SEQ ID NO: 24425 - DNA, 1375 bp, Arabidopsis thaliana landsberg
gaaaacaaaaaaatgttaagcaaaagattatatccaaactatattatttaatcgttttatttttaagaagtattagtgagaaaggtcccggaaacagaaagcataaattgcctcaccgtcgttgtcaattttgtcgtcactgagactgcgtctactagacgtctccatcacacgtcgtgttcattttcctcgtgatataccacgaggtacgtcatgacttatatcaagggtattaagtgtgagtggtttggaaggctgattatgattaagtagtatttaaaatttgatggtgaagcttacatagctagagagttttgatgaatacaacgaggtagagcgcaagtaagagtttgactactaatgatggttttgatggatcaagtatcttgaacttgaaaaaaggaccaagaacacactacatttttatcttcttcgatagtatgtatcaaattgtttgaaattataaagatgtatacatatacatgcaattcaagacaattgcataaaccaatgttggaaaataaataatttggccaaaattgagaaactaaagaaaaacaagtcaatagaaactagagtcatgagagactgatggaaacagaaagattgcgtgatgatcaattgacaatcatttcttaacagttaaagtccaaataatcatctttggctctttgataagacatacattcgatccgagctttctatcactttgaactattttgggagtcaaaactcaaaacttcctataatttaatactgctaccaaacctgacaaatttaatttaatatcgcatctgtaaagcccaaaaggcctcgttaggctttatttcgattaagcataatggcgggccttaatcaattttattatttaaaatttttcacatcagtaaagtccaaaagcctcgttgggccttggttcgattaagctaacttaatggtgggccttaaaatacttttgtctttttaagtagtcttctctcagattatagacattttctaaagcatgatcatctaatctggtgactgatatgttaatataaaatatatacagtattgaatttttatcaatcactttcaacttgattcaacacttactattttcgatgtcagataatctttataactacacgctaatacatacaaatcctctctaactttatcattttatgttcaaactaacaaaaaccccagatctaccaaacttatcaagtacgtaatttcgtggaaatgaatgggttttttctcctaattttaaattataaccaaaatatagtggaaagtggaaaaaaggtgagctattacccgtcataacagactaggcgttatgaataaaatttgggggaaaattcaatgaaacataagggtataatagtaa

SEQ ID NO: 24426 - DNA, 1171 bp, Arabidopsis thaliana landsberg
ggccgatcaagagaaaagttggtgcagaagcaatatcaaaatgcaaagcagacaactttattgttctaaaagctgagatttcacattttgtccaacgtacgaggaccccattcatactcaaaaggaagcatcataaagctttgaaaaggagaaacatatgaagagcgtgacctaacaccaaacagatttctatggaatgcatggctctcagagcaaatgacctaagagagaatatctgaaagaagttgatttgccgacgtctatactgcatcttaagctctaaaacctgcaaaaaatagttaaaaaacttagtggagaccagaggtgactaagtgaaggaaaaggcactttctaagttaagaatctccagtatcttctgattcagagtcgcctatttttttatgattcatctctttcttcttaccttttcttttgatctatctctctgttctccaactgctgcagattctcagtgtaagagcttggaagagcttgagttatggtaagcctccccattaacctcctgttgcatatactatcttttcttcttactgtgactattgaaaagctttctttgataaataatgttaggggactcctgtaaatatcacactcggatcacatgtctgggtcgaggatccagaactcgcatggatcagtggagaagtgactgaaatcaaaggcaccaatgccaaaatagtcactgcaaacgggaaaacagtaagaaactaatattcattacatataaaaccacaataaatggaaaagattatgatatttttaccatggacctttgcagtaagattcacagatttttctagaagaattttgagaatagattatattattacaggttgttgctagtatttctagtatctatccaaaggatacagaggctccgcctgcaggagttgacgacatgactaaactggcttacctccatgagccaggggtactccacaatctcgattgccgttttgcactaaacgagatatatgtcagttatttaagacttttgataactaaaacatttcatttatcaaacttttgaaagtccaagttgtgattagtctaattgcaaactcttggatagagcagacttacaccggaaacatcttgattgcggtgaatccattccaaagacttccgcatttgtatagtgtccatatga

SEQ ID NO: 24427 - DNA, 538 bp, Arabidopsis thaliana landsberg
gacgagcaagcgtgatatccaagaaaccaccattcttagccattgaaaacaataaaaaaaccagcacctcatgatttgagatgagacgcatcttttgttgccaaaaaaattattgcatataagttttaaaattttcaaagttcaaactaaattaaggattttttttttactattcacgtaacaataatcacatcacatgatccaaaattcgattattgttcaaattattttgtaaatttagccatagtttcattttttcacttatatgtttgtgaaataacgatttgtgtttggaattaaaattaggggtgttttataaatatagtaaaactaggatagtgataatgtaatatattgaacgttaaaggacaaagatgggaaatagaaaataaagttaggaggcagagaagaaatgggggccataagaaaatggcagcattgactcttcatcatcatcatcatcatcgtcatcactcgtgtcttcaagcgtctggacatctgtcacgtcgtctatatcaccgaatattctcgagctttc

SEQ ID NO: 24428 - DNA, 5276 bp, Arabidopsis thaliana landsberg
  unsure (1)..(5276): unsure at all n locations
gctttgtgtggaagtccggcaatacacagatgtgatctcagatgtggccttgcttgcttcggatcgacttattttttcatttgcctctaaaactgtccaacatgaggctgcaaaggatatggagattgattctgaccagcctgatcggttatgggtggatcctgcttcgtgctgctatgcactttactccaaattggatgctgagaaggtccttctgcaaccatcccctatatccctctcaaaagccttgaaggtaataaagaatgatttttgaaacgagtgatctctttcgacgtgttttagtttattcatacatgcttattctcacttatgttagaacccggttgagctcgaagggatcaagaatgcacatgttcgtgatggtgctgctgttgtccagtaccttgtttggctcgataatcaggtactgaataaatgaaaattttgtttcttgaacactactactatattgatgattgattatgtcactcaacattgtgaaaccatagatgcaggagctctatggagcatctggatacttcttggaagcagaggcaagcaaaaagaaaccatcgtaagcttcttctttcttctttgttttgtttttcccgattttgcaaaacatttttccatgattcatgacgcaatgagtttttcttctgcaaaaaacaaaacaatacagagaaacctctaagcttactgaagtgactgtgagcgataagctggaaagtcttcgagcttcaaaagaggtaatgtttacatataacatattaaacttttgtcgttccatgaaagagatgaatcacatttctcgtgtggttgcagcattttagaggtttaagctttcctactatatcatcggttggttcaaacgctgctgttattcattattcaccagagccagaagcttgtgccgagatggaccccgacaaaatttacttatgtgattcaggagcacaggtaaatatcacatgattgagtgtatactataagcttaccttgtatttatcaaagtctttgctctataatacaatttcgttgttgttgtctttctgcaaagtatctcgatggaacaactgatataacccgaacggttcactttggaaaaccttcagctcatgaaaaggaatgctatactgcggtatgtacttattgatgataaccttttgaatattacattcttatttatttggaataagcatatttgctgatatatgttcaatgtgccgcatccttaggtcttcaagggtcatgttgcactaggaaatgctcggtttccaaagggaacaaacggtaagttatgatctccttgaattttgtttctgtaccaacttgagatttggctattgatcttttatatgttgcattggctacatctgaatttacaggctatacacttgatattcttgctcgagctcctttgtggaagtatgggttggattatcgacatggtactggccatggagttggttcttacctttgtgttcatgaaggcaagttatgagatacctctttttattctctctttcttataaatatcgagtcattgataataatgtttttgaaattctagatgtcatcaactaactttctgcgatgattatgtatggtttaatatgtaggacctcaccaagttagtttcagaccgagtgccaggaatgtacctcttcaagctaccatgactgtaacagatggtccgtctgcaacaaaaactcggtagttctcctgttcgggttaaccttgatcatattctaaaagctgtctatattcatttatttgcagaacctggttactatgaagacgggaactttggtattaggttggagaatgttcttgttgtcaatgacgctgagactgaattcaattttggcgacaagggctacttgcaattcgagcatatcacttgggtacttactcgttgtctgttaactaataccgtagttctcatatcaacatgcacatctgagtaactctcgatctctctctctctccaggcaccatattaagtgaaacttatcgatctagacgagttgacacgggaagagattgactggttaaacacatatcattcgaagtgcaaagacatcttagccccatttatgaaccagactgaaatggaatggctcaagaaagctaccgaacctgtaagtgtatccgcttgatcccctcccagatttctcttaaatagatgtttatcaatggctccttcacttctctcactagtaaaccaaaaacattcaagtcatacacagattattttctttagttttgcattcaaagttcatgtttctggaccacatgtctttattcatagcagattctcagttgttgaactataaagagaacattatgtttatcgttttgatattattaaattgtcaactttttgctaattagttttaggtgaagtaagcagatggaatgtgagtcatgttgagagcttcttctgctgtcttcttcagttccttaacattctttctcatctcttttccttcttcttcatccatcactctcttcaccatttcagctatcacctccttctttacaatcccatctgcaacattaatctgcaacgcaatctttagctccccagaaaccatcctcgcgttcatcttctgctctgagtacaacggccaagctaccattggcacaccattcacaatactctccaaaactgagttccatccgcagtgagtcacaaaccctcctgttgacttgtgtgccagaatctcttcttgtggtgcccatgtacggaccaccaaaccgatgtctttggttcggtctagaaacccgttgggtaagaaatcgagaggttctgtctcattcttggtcttgtcgaacattgatgccgatgggtcgtcttcagccggtggtctgactacccaaacaaatctgtggccagtcagctccaaaccgtaagccagctcgtttgtctgctcgaaggttagtgccccaccactcccaaaagaaacataaaccactgactctttgggttgtaagtcaagccagtccagcacgccatgtttcaaacctggttctgctggtctaaccagcggtccaacaggataaaccggcactcctctcataacccgaccgagattctctggatccaagaaagacccgatcgtcacttgctccaggctgtgccacgtattcacaaacactccatctgcggttatcacctcagccccaattcgctgagactcagcgagttcccgaatatattttctcggatcttgagcccgctcaaacttaaccgggctgcatccgggtataagcaatgctcctatgctactcaactgcttaaacaacgtctgcttgtcaagactcgccatataaaccgtaaaagctagaaaccaagcactggtagtaaccagaacatgttttctcatgatcccaagctccttagccacctctaaagcttccgtgcccaacaagtcaactacgaaaaccctaggccgcggttctaactccatgactgaagacttgatctctggtaatgccttcctcatcatctctgctagtttagtcaatagtgaaccactcagatcttgacccgaaacatcgagtggaataaacctgatcacaaattttggatcttcttccatcaacgtttttccaattagggatttcgaacgtgagacatcgtctgtgactaggaagacagtgacacggtcgaacccgtggtggttcaggagatgtttaccgagttctaagatgggtacggcatgtcccatgcccggactagccactagagctccgtgaagttccatggtcctcagagtttttttagtgatatgctttctttaattggtggaatgagaatgtgtttggtgattggacgcagttggggttgaatatatagagaagaattacgagattattaagattgcagttatcgaaatggacgaacatctcacagcaataaatcattataacggagtggatatagtaacatatttaccattagttaaaccccaaactaaacattcaaatacattaattgaactgtaatatgattaaatactagtaataagtggtaagatgtttttttgttcactaatgtaacgttgtacaaagacctaacatatagtagttgtgtttgagccgtcgtttgttttgcgtgttacaatgatgtttggatgagatgagccacgcatagaatgatagaaacatgaattaagatgtgtttgtttgttttaccttgttttggacaaagctacaaaatgcgatcatgtgacttgttgaaacttactagttatatatatgtattttaaaatgaaaacgaatccaaactaaatagctatatgaaaagaagcaactcaccactctcacctatcacgtggacccaacgtgggtcatctcatagttccctcatcaaatgggcaatgaaaatattgtcttgtgccgtgaattccgacaaatgagaatttaagtacgacatgcggagataacaataatagtatcaacaatagtataaaaagaaagaaaattagaaagcaatttgcaaatggttggaagaagttgttgttgtttaggtcccaacaaaagtgaacaaaaaagacaggccacatggtgggggtccattatcctccccgctcgtggaggtttcctttttatatcacctaactcaacacaacaaactcttaaactaatcacaataattaagaaaccaaactaaaattaaactctggtctatggaaagctaagtggatatcatattactacatccgcaaagatattaactctttacaaaccgattttttcctgtgatcaattaagatattatatatctctaagaacattatcatcatcagagtgataaattaagtataaacggagaatgtaacggtatgtttaaggttcgacccttttcgaccttcctcgaccatgcgagctccggctccaatgtactgtacaatgctgaagattttctctgttatggtccacaaggagactgatctgatcttttaccaccattttcaaactgatttcatgtttcgatttaccggtttttcagcatctggctttagtgccaccgagagtgagttcgagatcttctacgccaacttcatgaatcatttcgccttcccacggcttaactgttccattctcaaactcaaactctgcccctctcccattcattccggacattccccagtctgaccttttcatatcaatgnnnnnnnnnnnnnnnnnaacaaggttaaatgttggtgaagtaggagcagtagattggaaattgatccaccttccttgatcctcgatcgaatcct

SEQ ID NO: 24429 - DNA, 736 bp, Arabidopsis thaliana landsberg
  unsure (1)..(736): unsure at all n locations
tattattaataaatgaaaatatcacatgctatttctatttaaaccaagcacttatgttatatttcacgctatagttttttttattcttcatattctttccatcgccttcttttcagatctccatatatcctttgtaaaatttataactttacaaggttatttagtctgttcttcacctctactccaccaaaaaaaagaagttatttacttaaaaaaaactgagtcatggttagtttcttttttctttgtagaatttggctagttactaatattaccctttattatatagtagttctttagcatggtttgtaaacaataaaaacaaaagttttttaaaacataatattttgctcaattttaaacaagtaattttagttttgtttatgaactcaagagcgactaaaaattacaaagtataaacaattataaaaaaaatatttccataactctccaaaaaaatagttgtaagctgtgttatatttacatagcatgtagtgttttctttaaatagttgcccgtacccactaaaaaatatgtctggtccagacaagtctggatttgctttcactaagagcaatgttttgtttctggttaatcaaaaattcaattaacatatataaaacatatgactacctgttgtatacacatacaagtcaagatagattgtctattgtctgaagataccgaccaaaacattgcataatgtaccacaaaagcntatgaaagggctctaaat

SEQ ID NO: 24430 - DNA, 1292 bp, Arabidopsis thaliana landsberg
tatggttttacttttatgtcttaaatatcaataattaaagttgtttggttttaagaatttacaaccgactttagcattcaaatattcaataagaaagttttgttttttattttttggtgaaccacacattaactaaaaaatcattcataattgatatctcggaaaagagtttacaaatgaatattcagaaaatataaaagcttttgttttagagaaataccctataataacactaaactattttatttttttccaaaagtatcattattagttttttttttcctttcaaactttaagggtttataattttaaaagcttaggtttggttttataggatttaggatttagttttagtttcgtggtatttttgtcaaaatatatttaactcttatttttgagaaaaataatagtgatggctatgttttattaacagattttcataattaaacaccatatgccttacaagttgaactcttatccatttgtccatctcctttctttttccctttccttaattttcagtgtaggaaaagttcaaagagtcgttttcgcatggcctattgaaagactttgattgccaaaaagcaaagtttagtgttttgagtgccctgcttctctacttggatatgaatgatgagctaaattgacataagaaaacaaaactgacgttaagtatctacaagagtttattttcattgcagcaataatttacagaacgcataaaagcattaccgaaaaaacgagattacatataaaaacaaacacacaacaagactcatacacgcatacataagagacactgacacctctttgcctacaaaagcaaaaagaccaccacttcatgcagtctaaacgacatcgtttaagggtgggtactctgttttcttcttctcttctctttttcaagacttgtgttgtgtgttagagatcacatgccgtaagtaggaggagagctccttggtccagtctctgatcctcctgctgccttctcgaacgcatccgacgtcgaccgtctcctaaaccgaaagggttcctttccccctgcgtttgctccgttcacatcccaaaatgatcccttttcgttagtaaagcatcattcattcgcataaatttgactcttcaaccatataattaaaatctataagacttcaatgaaatgttaccatccacatactagtcaaatcttatcatgatcttaggtacgtataacatttgattagacaacacacctaatgacctaattcaaccaatataatcaataatgtcacatataatcaaatcataatggtcac

SEQ ID NO: 24431 - DNA, 779 bp, Arabidopsis thaliana landsberg
catagataaaggtggcatagaaaatttttccttctgccttgaaacgcgtttcaatgaagttagggctctaagtaatcacttctagttccacattctgattccaaagaagagctaggcctcctcctcgtccttgaggtggtactagtttaatggaattgaagtgtaaagcatggagtttttgtagtacaaactcttctgtgttttttgtctccatgaagaacattagatcaggtgagaaagatttcttaatctccaccagacgtcgaattgtcaaggggttcccaagaccacaatagttccagctgaccacttttaaggaagaggatggtgtggattgtgaaaatccactgctggtttcacaatagcttggataatgagagtctagtttggtgctctagaggtggagggtcccgcctcttcatcgactagggtaagtctctgtttaggtggtttcctctttgttaaagtctgagtttcaatgcgtgagggagctgatcgtcttcttggtgaattttgaatcaggagtttgtttcttttgctagatttggcactcgttagctggatagggctcttattatccggttagtaagtgggggtctacctctcttctttttcagaactataggttccagtggtgaacctttatacttgttggcatacaggaaacccttcctctatttgtcctgatgcaggtgcaggatgatgatccagagataggttttcagcagataggatctgtctggatgatgtggcgatgatctactcatcagtttctgcca

SEQ ID NO: 24432 - DNA, 1102 bp, Arabidopsis thaliana landsberg
cgaagtagagaatgataaaattaaatctgtttggttttaactaacaaagttcgtacatggatggatcaagatttgcagtttagtggtttgtagtattagtattgtagatgccatttcaaattcgcataatgcatattgtttggcaaaataatttgtatgcaaaccaaaggaaaatgatataccgacttttaccatgtaggtttaaggagaatctatgtatgataattttacattcatttacatcacaatgtctttcttaataactcaggaagtaccaattttcttacattaccgagaatgcaaaaggtaattatccatctgaaccattgaaaacaaacagattgggagtaacattcccaagaaccacaattttaacaagaaaacttacaagcttgggtagctgttgcatatgcaccaaagtttttctatcgatttctagaagataaggatggtctaagatggtttctttgattacttaggatctcatttgtgtacgttcgcaatctttgccattgggttggctcaccaaaagcttgaaccagtgaagacaatgtcttgttgagataatttgggttttgagctagttcactttgatagtgattctatacatcacagtgtccttgctcaagttagtgtatacaacgtcttgtttggataatttgggttttgagcttgttcacttagatagtgattctatctatctaatttaatgcatgacttagccagttctccacggctggctaccaccgtcatccatcatttatctcaaactagttaattcaaaacagaaatcaaattcaaatgaaaccaaaacccaaactggtccagcccaaaactaattgaacaagtttggggttatggatattgcaaccaaagattttgaattcatatgattccagttctaacaactagactaggtatcaaatcaacaatcccacaatacaaaaactcatctttaattcagagagacagagagaaaacatttaggatgctgaggatgaagttgtctgaaaagtcatgtcatactggtattttcaagttccatttggggcaacagttgtgtaatagcatctataatctccatcttctccgcacccatagc

SEQ ID NO: 24433 - DNA, 788 bp, Arabidopsis thaliana landsberg
  unsure (1)..(788): unsure at all n locations
tatttaaagttctcttcaaatgggggaagaatggtaatgctttgttggtactttaatcgaaacgcgggttttattagttttctacattgagggatataagcaagattgccaaaaagttgaatacaacactgatatgggtcgtacactcggtggttgctgttatgttcctagcttgctttggcttccgggcttttcagaggtgggtataggtagaagaagaagctggttccagtatttggaatggctagatatgatgcttttatttttttgttttggagaagaatgtaaatatcattataatgaagagttttggtcttacataannnnnnnnnnnnnnnnnntttcatgaagctaacatggtcccatgccaacaaaagacattcgagattcaattcatcagcaaggccatgaagcgattaggctcatcgtttccgatatattgaaaaatgttacattccatttatatacaacatgttcaaaaaaattcagtaagaaaattgataattcaccagcaccaatccttagagagatagcttcttaatctcaacgacaagattctcttcaaactatatcccctttcatttcaattttgacagatgatttcagctaaactaaccaatctcaaaaacttcaaatcctcatgtcaaatcgaagatgaatgacttcttctatgtgtacctttgttcactgaggcacaggcaatgcagcttcgacttcattccacaagtccacatttttggtaacttctttttactaccgaatgagctcctttgcttatcgaccttgac

SEQ ID NO: 24434 - DNA, 2813 bp, Arabidopsis thaliana landsberg
  unsure (1)..(2813): unsure at all n locations
gtaatattcgttatcaagcaagttgtctgaataccaaccttaattgttacttcgcatgcgactgtaatggtcccttctcatttaacattgataatagatatggctttttgacaaccaaaaaaagatatgacttagctttttcgtcagcttaatgcatggaaacttacatggttatgtttctaaacatgttcttgcagatattaacgtagaaaaccttgtggaccttagaaaatcacaactatcattcaagctctctgatgaggtactctatttctttgtggcattgacttcctgctatctctggttgtacttcttctgacagtttcttctccctcacagcttgctgaagacctgtttagagagcatacgcgaaaagtagtcgtagagaacatttcatcggcactcagcatactcaaatcccgcacacgagcagcgtaaatcattttaacatattgcttacagaatcatgcatagaaaaatcgtatagaataatcattatccatgtgaacagtttggttacacatttaacttttttatttcttataccaatgagttatgactttagctgggtatatgtattcctttgcttgaacattgagtttggtcgggttgaaaaaagagattgaagttttggctttagttttgagttttggttattgcaaaaactgattggtcatatgatctcttttgcttttgtgaattgtcttatagtataagtatttaaaaaaaagtcatgagattttaattttataggcgtttttgtatcttgtgataattaatagtggaaacaaattggatcatatagtatgtctagtttatagtagtttacaatgcatgtcattttaacgacctgattttttccaggaagagtttggcatctgtcgtggaagagcttgaaaaagtactggagtttaacaacctgctagtttccttgaaaagtcattcagaggcagatcaatttgcacgcggggttggccctatttctttgataggtgaagatgcttttgaccttctcttttctgaagaaaaattattggctctcaaccttggatctatgtggcttaggtgatgagtctgattttgagaggagaatggatgatttaaagctcctttatagagcatatgttacagatgctttatctggtgggcgcttagaagaaaataaggtatactcagttttgtataagatattatgtattaaagcttagttgcaagtttttttgagagcaagtgttttcagatgctgtgtcctctatcccagtcgcatgttttttttccatttctaattgtctttctactgtatggtagctcgtggcaatgagccaacttagaaacatactcggtctgggaaaacgagaggctgaagctattagtgttgatgttacgtccaagtcttaccgtaaaagacttgctaacgctgtttctagtggtgaccttgaagcacaagaaagtaaagcaaaataccttcaaaagctctgcgaagagctgcactttgatgcacagaaggcaggcgcaatccatgaaggtataagcctaaccttttgttcacaatgaaaccttatgtttttatgttatgcatgaggtatacagttggaattgccacataatcgcccaaatgtaagatgtgtccatgggtatcaatttagttgatggcttgtaaacttgcggcttccttatccttttaagctagcttttagtgttgtagatttggttcttaacagacttccaacaagtctggtgtttcagtgggttacatgctgttattttacagtttgagtatctatttggtctttttttcccaatcatctgacaagcaccttctcttcctcagaaatctatcggcagaagcttcaacagtgtgttactgatggagagctgagcgatgacaatgttgctgctttattaaggttaagagttatgttgtgtattccccagcaaactgttgatacagctcatgcagagatctgtggaaccatatttgaaaaggtaatccagttatcacctcccttttccctttatcaagggttttttcatggtcttgggtcttggcactgcaatttccctctgcttccctctctgccttcgcattttgttaccaaaaggttttacctctaattacctttttgtttaatctttccaggttgtcagggatgccatttcttctggagtggatggttatgatgctgaaactcgcaaatcagttagaaagcctgcacatggtcttcggttatccagagagactgccatatctattgctagcaaagctgtgagtatcacactgtttactttctccatgcttggtattaggatttgttaaatatttttgacttctcatagcaagacatgaaaatcaaatcccttcattgatgcaggtccgtagggttttcacaaactatatcagacgagcaagagcagcagagaaccgtactgattcagcaaaggagctcaagaagatgattgctttcaacacgttggttgtgactgaaatggtggctgatatcaagggagaatcttctgataaggcacctgaggaggaccctgttcaagagaaagaagaagatgatgaagatgaggaaggggatcccttgaatcgctcagaaagacaagacccgacaaggaactcgctgagaaaatgggaaagcctggccagactgagataactctcaaagatgaccttcccgacagggacagaattagatctctacaaaacatacttgctctacntgtgtaacttggagaggtaacanagaaatcccttttggcgccccagatcacaacaaagagagacgattccagagtacttgcttctaaat

SEQ ID NO: 24435 - DNA, 1617 bp, Arabidopsis thaliana landsberg
aagcgtaggttgatatgctctcacatctcacatattctttactaacgacatgacgaatgacaaagtttatgctttggtggtgctggaagagtttgctttttgagatcctaaaaaataaataagggcgaacataaacaaatttagtagctatttgataacaaaaaatattttatgtacaagtaattaggatgctaaataattaatcttaaacttaatgtaacacacacaaactaatgttgcaagcaatccaatatctttttggttttagctgaaatttaactaccaacttcaaaaactgagtaaaaactctgaaacggaggacgatctatgaaagtgcttcccaaccagccttccttaagaagcaaatgtccttatcaacattgagttgtgttatatactacaagaaaacacggtattagcgacttattcggcgacggattaagtagtcgttaactttggcaactaaatagtgacgtattagcgactaagtagtttatattatacattagtctctaatcagtcttgaatgtgagactgattaccttagtcgctgataggtcgtcagtggcagctaccatttagcgactcatttattctaattggtcaattaattgggcttttaccggcttgatctagtaatgagagtccactacctagactatataaaccattttgtcgcgtaaccctaaccctaatcccttttagcgatttgatcccaattcttcatcaatccatcttcaatcttctcagtctctcgtttcttagcttctagtgatgaagactcgtggtggaaaaaggcaagagaggaaaaggaaggggatcgaagattcccccaaatcgaatcgaagacccaggagttgaatcgaacgcccaggggtcttcccagccagtatgatttcaggccgccggatcgtcaaccaccacttcaagaccctgatagaaatccgattgcacaggctccgacgggtgctactgtcagagactatcctcctccgacgcaacttttccaatcaggcgaaggatctccttgcggatctggatcgattccatttcgagcatccggatcgactcaacctagatttggaggatctgttcatcgtctaccttgtagatcgaatcaaactacagcgccggttaaatcttcagcgccaattcaacgggaggcaccgattcagactccagtcgtggatcaacaacgaccacttcctcatcctcgaccctctgtatcgtcgcatcatagctctcaaggccaatattcacacgatgaagaagatgaggaagaagaagacgaatgtgaggatgatttgtcaagagagccaactctctcggtaggtcagctcgctactttagattagctgctaaggacgcctggccgtgaggcatataccactgtcatctctcccacattggagcctgatactttttggtaagtttgtgattcagcctcattagtttattaagtgtatgattaggttagttttagttattgtttgtagtttgatttaatggtaagaactgatttattggggtttgatcagtaagaactaatttatgaactggtttactgtggtttaataagcactagtttgattctaggtttggtaaggacaaaggtag

SEQ ID NO: 24436 - DNA, 1240 bp, Arabidopsis thaliana landsberg
acgacaccgagtgaatccaatactctccggccacgtttcatgacatagcggtgtggcttgattttcaactctgtcaacttctccattttcaaaggactctacagagcctcagttcagatttttagtatctttggggttcatggtttcaaagcagcacttctcttttctttctctaattttcaagatagttagatcgttgtgaagttctgtaaataccactaattggattagaagctgtttacttttcacatgggtctgctctgaaatcaacggaacaaaagggtagttactagttaggcaactaaacccatttgaactctttttttcttctttacaatcaaaccctcttgtttgactcttcgacgtctatgcttttactcatgtattaggaaggagctagtgaccattatgattgacttatacggcttttaaaatccatatgccaaaaattggacgattgtttttctttcgtttgactgacaaagagtcgcattgaaagatacttaggacgctttcttaaatgattttttctcaatttttataaagtttcgccgataatgtttttttatatgttagtcttacactgaaagtaaagcggcagaggggaataattgttctagtacacgagcatgcccttgtataattataacatctatatacataaaatacattatcaatattaactttatataaacatcttcatgaatcgtgatcatgtcctcctgacgagatctaccgtagttgaagtttcaaaatttggctttctatgtaaaattcgtatcatatcaattcaacatctttattcccacattgtttcatcaattgtccatcttgtttaaatctggagttgatttttcaatatccgttagtccgaataattacgaataaatagaacgtgatttcaagaaaatcgttgattagtagcaatcttagaagcaaagctagaacgtgatttggtgatttgttttacaagttacctaattttagccatatggaccgcacatgaatgatgggcggtctcaaagcaatatttccaaaatggtcttttaataattggtctttttttccatttctgcgtaacacttttcgttgacgttttgtttaaatttatttttcagataattagtatacacttgctgttacattagctagctagccttcgactatatgcttttaggttggactcaccatacccgttaatatagtttcaaatcaatatatatatatatatatatatatc

SEQ ID NO: 24437 - DNA, 727 bp, Arabidopsis thaliana landsberg
gtactgctgcttacaatgtcctatttcttagacttccatgtgattagtgaatgtccaagaaaaacatacatactagaagtagatcgtcttgtatcaaggcaagtactccaatctgcatcagcaaaaccattcaagcatattcctggttgagcagaatagaataacccctgacccggattgttcttcaggtacttcaggatttgataagctgcttgaagatgaacatcagtagggcatgatagaaattggcttaatcggttccctgcataagtaatatcaggtcgagtaatacacaaatacagcaacctttcaattatctctcgatagggtcttgcattgtccaaaagagtacatgtttcctttgttaaaggaactttaggatccaaacagccctgaatcagctagcatatccaaacaatacttcctttgactaactgaaataccatctgcatttctagcaatctcaagtcctaagaagaattttgcctcacctaaatccttggttttaaagtgtttccctagaacagctttaacggatctcacagcctcatcatcattgctcactatcaaaatgtcatctacataaacaagtagagcaacaatagacgtaccagctttgacgaatagcgtattatcagcataggactgaatgaatccatcatcaagaagaacagctgataaacatttataccactggcgtgaagcttgttttaatccataaatggat

SEQ ID NO: 24438 - DNA, 1438 bp, Arabidopsis thaliana landsberg
  unsure (1)..(1438): unsure at all n locations
gagccagataatcgattccattaaacctattatcaaccatacatatagagatcttttaagacaagaaaaaactaaatactcatcatagtaatagtttttttgttttttttttgttttttttgtactcatcatagtaatagttgaaacttataaatattaatgaatgacccaaaagtcttattcattgttcattttttaataaagaaaaacgtccaaactcttttaatttggctataatttatttattaagttgtatatatagttcagctaaacaaatttatatcttgtttatagacatgaaacaattaatcttatttcaataaagttacaataaaaagaatttagttaaaaaaaatatctaaacaaatatttatataataggaacaattgaaaaagtgaagaaagaaagaaagaaagaatgaggtgaatggaaggcacgttagtttgcctgctagaagagaaggaggagggagacaatagattcgctgcttcagttcttgtattagctgtctttgtactatttcatgttcttgtatcaactctttttctttcttttaaagatcttttactgtctcttcttatcttacttctaaaatatacatcatattcagactcagaattataaataaaaaatgatgactgtgtttgaagtttgaacacatctacaacaaacatatttgatcattattaatactgtatgacttgtgttgtttgcgacagatctcagtggaaacaaacaattgttagtaatagtattatggtttttttaatataacaattgttagtattagataataaatagataaattagcattccatctatttataaacatttccattctattatttttataaaaacatttttttgtcagttattacaaacaaactgattttctaaacattaaaatataacaaaagtgattggatgtgatcttcttgcatttttttcctaattagtttttcaatgttgaaaattttgtgttacaaatattttagatgtatgagtaaagtccgcaccaacatacatcgtgtgtcaatacaggcaaagtgtacggtctgacatatacggataataaaatatgtttgtataaattgttagaaagagacgatccattataaaaggtaattaaaataattttattcctgtgggaaaggaaaagaataaggccgtgtggtccaagtcagtcctcatgaccaatcattatttaacatagtatgatttattcatatttaatataaaaattattagagctcagatttgttttaaaattagtagtagcttaaaatttaggggttttcagaattagtctgaacaccaaaaaaaaaaaaaaaaattggttataatgtggaattggttgtattgaataaagttgattgagaaaaccgcgccgtatatgctaattatggcctngctggttgaaaaaaatgatngagtgat

SEQ ID NO: 24439 - DNA, 843 bp, Arabidopsis thaliana landsberg
  unsure (1)..(843): unsure at all n locations
ggctcccaatctgtattgttaatttcagcctgtcattacttctgcgaaatcaacatatgaaaaatctgaaattttgataaaattgtgtaatccccttgtaaccattaccactttcttagaacttaactcctagatctggcgaaatcacaaagaattctcaatttcttcttccaaactccaaaatttctctccattactgaacgtaatgatgcatgacatcgataatttctatcttatttcttggaggtggtttagaaaaaaattgcgacatatgatacctcacaattccacccccttgatgatccgtaaggagcccaaactccatgtatgtttggatagctagaatcaacgacgtggtactcttctggcggaggcaaggtaaaatcataatcacttcgttgtgaaaaacaaataatttatattcatgttaaatgctagattaaatttctcaaccatatactctcgaccaagaggcgtaggatctttaggagtgtaattattcatggaaattgcatgatcaaacaactcaatcaaagtttcttcttcttcataagtccatctatgcttcagtgttgtctacaatattttcaaaaatttgcagatttagtttaatatattttcaaaaactatacttaataaccagattttcccttgctgtcggatcggtgggaacatttatgttttcttgcatggaagaatttgtgtttaatcggcctctagacaacatacctacatttaaaaacacaatacaatataacattaacgtatttaaataatntatcatcagattattcatgttattgattttttcattgtacggtatatattatatcgatggttaag

SEQ ID NO: 24440 - DNA, 1449 bp, Arabidopsis thaliana landsberg
agttacacgataatgatatagttgaagctctcataaactttttaagagtttaagtctgattagaagacatctttagaagataatacaatattgaaattcttgtgattgattcttctacattgcaaattcacttccaacaactatttcatcaaaaaatctatagaatagttatggtttcggagtatataacattaacatatttaactaatttgaaatgtacataaataataataaattggatttatttcaaaaataagtcaataacaccagaccattttatgtttgacgtaagtaacatggatgatggaacattggaagtttgatgtacaatgtactgcgtttttctcttctttttgaaatatctatgtaagttaatcttctccattttagatattttcttcacaaaaaaacgaatatttctggcatttatgtttcaacttgtatttagctaagattaggaaaatgacgttttatctaactttttttctttcatactactaacaaatcatttctaagttctaactaagaatgaaaattgtcgtgtgccatataggataaaacctcactctataaaaatcattatgataaattaattaataaaattaaaaaattaaaaaacaatttgccttgagggaaaaagaaaatgtagtatttaaataacagccatttattattgctcactcgtcgcagaaaacagagattcctcgctgtctgaactgaaaaataagatcgcattaactcaaaactctcacaaagacaaagatcttctcctccttctcttctctttttcacttttctctcttcccctctctcgaagcttgaaaggtaacaacaatggagaaccctccggatcaaacagagtcaaaggagactcttcaacaacccattacaagaagaagaacaaagggtggtcttctcactatgcccttcatcattggtaacaaacgatctctctcacttttttagacaaaaacccaaatcttgttactaattttatctcatcttgtttgttactcggtgaagcaaacgaggggttcgagaaagtggcgagctatggattattacagaacatgattctttatctgatgagtgattacagattgggacttgttaaaggacaaactgtcttgttcatgtgggttgctgctactaatttcatgcctctcgttggagcttttctctcagattcatatttgggtcgctttctcaccattgtcattgcttctctctccagtctcctggtaatttccgtcccctatttaaccggtttacgcttcttctttctcccggtttactccggttcaattttttaaccacttctttgactcaacatttttcaccaactagttagcctttggtttggaaaagctttgtttatgtttactggcagcaaagggtgagttttattaaaattgggaatctaaaccgaaaggttcggtttaagttgat

SEQ ID NO: 24441 - DNA, 1040 bp, Arabidopsis thaliana landsberg
cctttctttttcgatttgaagaactgaatgattgaagagaactttgaccaacatttacttcattgtcttgcatatgaagatcaacaacaattatttgcttcagtttctcttcggtttcttccaatgattttctcatcgaatgttgaaccttggaagaaaccttttgaccattataaaactaatgcaattttcataccgttctataaatcatctcttgataattgctatacataattgatcatgtaatgcatattgtgtttaatctttctaaagtacaaatgtaagtcgatactaacctttctttttcgacttgaagaactgcaagattgatgagaactttgaccaacatttacttcatcgtcttgcatatcaagatccacaacgattattttcttcggtttctctttgttttcttcccatgattttctcatcgaatgttgaacctcggaagaaacctttttgcatgcacttctattattcaatccagccaagtgatgtttcattctgtttatttcacttccaacgtattgttttccgcagaggccccaagttataacttttctccgtcttgagtaatagcttctctaacgtagttccaagcccaatcttgtttgtgatgactggatcggttcgatgatttctcttgctttatattgcttgtatttggtgaaaaagccttctccattgatgagtaaactacaaaaaaaagaaagcaaaaacctctacacaattaaaatatgtatactctttaccaataaaaatgtatataactcttacaaggattaaactaaacgaacaaaacaaagtattcgaatcactcaaagttatattttgatttgtatatattaattagcgataagaagactaggccaaacgaacaaacacataaggattggaagaaactcgacataattaagatatgaatttggaagatgtcaatgagagttattttccatttccaaaaagaaaagcatatgaaattgacggataacgaatggtgataactaattaattatggcatacccataaactcgtgacga

SEQ ID NO: 24442 - DNA, 1661 bp, Arabidopsis thaliana landsberg
  unsure (1)..(1661): unsure at all n locations
tcaaggtatctttatatatatccaattattattttgtattttttctaaatatttgtgtatgtatcccaaaactattatgtcctattttatagaggattggcgagccacaacggtgcacgattgtacgagagttttattgaaccctcgatgtgccgaagttagtcggatcgagtctgtttttgccgaggctgaagacgagtttccgtggtgataacacgtgtttttccttaggaattaggattactataacataatgcttggttttctaatatttgcctttacgtctacgaaatctatatcctatgttacgttagcattcatgaactcttaattaataaaatgttttgttaaggtttatttctatgtctataagagtatcgcattcttaattaacaaactatgaacaaacagacctattgaatacaatcgataggactgccccatgcagaattcatattctgttagatatatatttttattaactttttagatatattcgtaattatatttttattacattgttggatttagaagttttctaaatttctttcgatagcttcttctctccaattaaaatgccgaaaatctaaagtaataagttaaaattccttttgaccaaaaaaaaaagaagttaaaattccatgatgatttgcgctatgataatattaaatctctcaaacgaatgtgatacagttaattacgttattatctaccatatattttacgttattatcttccatatcttttcaaaaatttagaattttttttgtttttttttgggaaattatctatatttacatgaattatattagcaaaaaaaaaatgttaattgtcgatatagttttccttttatcgtttgatttttaaaatatataaatattgagatatagatcccacccaattttaataaatgcaaatcttaatataatattatataatcggttagttcaatactatatatagagatagtttcattcattatcgatatactcacgcattcttaaaatcttccatacttattggtagattattatattgatcatggcgtctactccttcgaattcttttgtttatctgagggagatttatcctgctctagatcaatacaagattaaagtactcgtggttaggttttggagatcgtttaaatctatagagatggttctggtggatggagaggtattgttgtattttttcttttaaattatttgtcgttataatgttcatggtgtttttttattgtaatttattcaatatttgtatcattagggaacaagaattcatgcgtccatcgaagagggattgnnnnnnnnnnnnnnnnnnnnnnnnnnnnnnnnnnnnngcaaaattatcgacactttcagttttgttgattatgacggtgactataggacgagtagtttaggtttcaaaatagtcttctatagaactactannnnnnnnnnnnnnnnnnnnnnnnnntcttaattttgctgaaattttgctgaaattttgtctgggacattagacaggcagatattgattggtttgtattaaaaaaatttatttttctaatttcgctaaactatagttattttctaaagtttttctttatttgtgttgcgagatgtacttggacaaatcgttgatgtgtgggaaagtctcgatagcgttaaagcgaa

SEQ ID NO: 24443 - DNA, 1165 bp, Arabidopsis thaliana landsberg
  unsure (1)..(1165): unsure at all n locations
atccctccaaatcaaagcttcgttgatcttccttagtgcagctttcgtttccaaaggtaagcatatttcgatctctcttagtagagattaacaaaacctaatcttagattagttagggtttaatctttgaaattttcgtttaggaatcgaattataccgattttggaatggaacttgtggagtagaaaccctaattttggttcagtttctgagaatacttttgattttgttttgtaaagattactctgcgatggactcaaaatctctagctaaatcgaagagagctcatactctacaccacagcaagaaatcgcattctgttcataaaccgaaagttcctggagtctcagagaagaatccggagaagctacaaggaaaccaaaccaagagtccggttcaatctcgacgagtctctgcacttccgtcgaattgggatcggtatgatgatgaacttgatgcagctgaggattcatcgataagcctacattctgatgttattgtgccaaaaagcaaaggagcagattatctgcatttgatatctgaagctcaagctgagtctaattcaaagattgagaaccatttagattgtttatcgtcgttagacgatcttttgcacggtatgaatcgattttgtttgtctgtctttgttcntgttgttcgggcaaggtattcaaatttatgagttgttgcagatgagtttagtcgcgtagttggatctatgatctcggctagaggggaaggtatactttcatggatggaagatgataacttcgtttggaagaagatggatcaggttcatatcaagaggtaatactactcttgtttttggttaaaatggaggttttaacttgctaatcgtcttacgattttgctaactttcttaagtgaagcctggattcctctccttaaatttgaatgttttggcaaagacgctagagaatgtggacttgcatgagcgactctacattgatcctgatcttttgccgctgcccgagctggtacttacttgatctaaacgactcattaacaacagtaggatatacgtttgacatatcttgatattgtggaatatgcagaatacatcccaaacaaaagttagccgaaatgaagaaccgagtcattcacacatagctcaaaacgaccctagttgtcgtccaggagaatc

SEQ ID NO: 24444 - DNA, 1373 bp, Arabidopsis thaliana landsberg
aaccatagcgaaagatacgagtcaggagatggagttgttgaagtgaagatgacgtcttgatccaaaccagcaaggcttcatcggattaggagttgaattccccatttaacttgagttagtattctgattgaaaataacaatatatattagtgttacataagtttggatcagacaaattttatattgttgtatcgaaagctataccaaatttcctaaatattaccctcaaacatcaacacatccgattaatttaccgaaacctccgatcaacagcactacgaatgtttagactttgatcttgtaggggaccgaacgtgtatatatattttaatgttttctgacgtcaacgtctctctcttttctagatgtcagaaaaggaaaataataagtactaatggtccatttagcagggttttatttaaagttatattttaaatagttgcataaatacttcgaaaatataggtttaatagtataagagaattttgaaatataataatattgtaagtatatgactatagggagaatcaacgtcgaaaatgtccataacatttttattcattttaaagatgtgattgcaaaaattaagattgtgtctgtacgtattgggggaactcctcgaggccaaacattaatttcgagtctttttttgtgtctcccaattttagtcaagactgtacttatattatctctttcctcctcaattaatctattattgtgcttgcgactattatttagattcatagcgattagcttcgttttgaccccaattaaaaagctgatgattttacttttattatatatgttaatcatatactctgatttgagacattatacttttggtcgttttgtgtacttttggaaaattcataaaacgatgttactcaccgacaataatatatttcgatcactcaaatagtaaaaagactgattagattatacaaaatgaaagaaatcatacgatgctggttagattggacttggatcacatgctaatggtattctagtcaacattgcttcaaagatctaatagtcaaggaaacaaattttttttttttggtatcagtggggatattaagtgagggaaacattttttttcaagaatagatgggtgaaaagttcagccttgacgtgataacattttaactttaaaatcagtgttggaagagacacacaatgattcaatattcccaaaaaaagagatctctagaaccacaaagagactgaatagagaatttattgaagacaagaccacaacaatggacattgtagttcattgtcttaaaaaaaggttgttcttcccaaatgaggaactaatcatcaacttcaagataaaagaggaacaatcaatcaacatcagcgttttgcttttt

SEQ ID NO: 24445 - DNA, 1554 bp, Arabidopsis thaliana landsberg
tacggccctatttcgtcgaaacctttcaagattgtttactaaacacaattttgttatcaatggtataggtgaattatttcgtaaaaccattgctagattcagattgatgttttagcacaccccaatatcctctcaactgcgcgcggagtgcttatggaatatcctgttgagtgggtttaagacgtctgtaatcatttcctatgtaagttctaactatagtaatatttacagtaaaacctaagaaattgattgatctaaaaaggtattaatttatcgataaattaataaaattgtacaacttttgtaaattcttacaaaaattcgatataaaatgtatttttttctttataacaatagtaattaaaagtagaaagcaaatattaagtttaaaaaacaataaaactttttttacatgttgttaaatattagaattgaacactacaacaaattaataaaaattgaagaaaaaaattactacagatattttacatatgatatttataatatatattagtaaatttataaaattattaatttacactattgatgagaccatatattatcgatttgtatcaatttttacactggtcccaactcgggaccggaagaatttattaatttatagaggttattaatttatcgagtattaatttatggaggttatactgtacttagatatataagggttttatatgtaattattttactaataccctaattacttcatcgcttctgcatatatatgtgtaatttcacactctatcaaatataagaaatattcagcctctatatggtatcagagcaacatttctaaaaacctaaaacaaattgacgataggtggagaggctcatatttatatatactacttaagatcctattcaacttccgatgtgagacaatatctttaatacgccccttcgagatgatggttcttctagccattgatctcgatatgttcgggcatggatcaacgggcctaatattgagcctgaccgatgtggattaggttgagtatgtgcggatcgggctctgatatcatattagattgttggcttccaacctaaaatcaattggcgataggtggagatgtccaaaacttatatataccacttaagatcctattcaacttccgatgtgcaacaatatacctaatagaccatacacttaaattgtaaaattaattaattttcgttgcagaaataatttatgcctaaactagaattccaaatttctttgaaaatttaatagattagctagacaagcattaacaatcaagtttgattgttcaaaaaattcctaaaccatatctctttgcgattagttatttttcttacctaagattatttgaggaatcaattacactctcgtatcaactaattatcatataggcaatattctggatgatcaatctagaacaaataattaaatcaaatcttggtgaagataacaggttgttcagtttaaccattcattcaaaaccttggaaaattcataaacctaacaagtagataaatcagacataatcaatgaaacacgaatcagaatctgaataa

SEQ ID NO: 24446 - DNA, 1024 bp, Arabidopsis thaliana landsberg
  unsure (1)..(1024): unsure at all n locations
ggcttcctccctccaattattagatataccaaaccagagaaaacaaatacataatttgataaatacagattacagagagcgagagagatcgacggcgaagctctttacccggaaaccattgaaatcggacggtttagtgaaaatggaggatcaagttgggtttgggttccgtccgaacgacgaggagctcgttggtcactatctccgtaacaaaatcgaaggaaacactagccgcgacgttgaagtagccannnnnnnnnnnnnnnnnnnnnnctacgatccttggaacttgcgctgtaagttccgaattttctgaatttcatttgcaagtaatcgatttaggtttttgattttagggtttttttttgttttgaacagtccagtcaaagtacaaatcgagagatgctatgtggtacttcttctctcgtagagaaaacaacaaagggaatcgtcagagcaggccaacggtttctggtaaatggaagcttaccggagaatctgttgaggtcaaggaccagtggggattttgtagtgagggctttcgtggtaagattggtcataaaagggttttggtgttcctcgatggaagataccctgacaaaaccaaatctgattgggttatccacgagttccactacgacctcttaccagaacatcaggttttcttctattcatatatatatatatatatatatgtggatatatatatatgtggtttctgctgattcatagttagaatttgagttatgcaaattagaaactatgtaatgtaactctatttaggttcagcagctattttaggcttagcttactctcaccaatgttttatactgatgaacttatgtgcttacctccggaaattttacagaggacatatgtcatctgcagacttgagtacaagggtgatgatgcggacattctatctgcttatgcaatagatcccactcccgcttttgtccccaatatgactagtagtgcaagttctgtggtgagtctttctccatatacacttagctntgagtag

SEQ ID NO: 24447 - DNA, 1236 bp, Arabidopsis thaliana landsberg
gatgtaaaacctttttgtgttttaagattcgagtagatacctaactatagatttgatttaaataaataaaacattcgttatgtgccttggatcctctggcctaacgggtgaccataaagtagtgttgcattctttaattttgtttcgccttttgcgtaatgagagaccatattataaattcaggactaaaataaagcctaactttacaatatctgtattttttcctcgacactcttttttaagagaccaatagtttgaattcattataatgcatcttccaatctcataactaatttggtatgcatgtataagtgctacaatcattattatatggggtttctgattttttgaagtacaagaatcaaaatgaatccaacctgattggtgtagttttgggtcgagttcggtcgaaacaaaaatttgattcggtattatttatttgattttggttcggtttattatggttggcacttggcatattggttttgaaaaaaaaaaatgttatcatgtacgattttttttgggtgcaaaaaagcatcatgtacgatagttttctacttttcttcaaagattgaaagtaaccgttgcaatctcattgcattattaggcctacgagaggtatcttctttcaagtgggctttaccattacactattgaacaagtttgggccacatttggtttgtatagcccataagaatgtggttttttttttttaactagtcgcaacttattatcgtgtatggtgtgaacttgattgattttgacaagccaaaaaaatcgattgataattaattgatctcgacaaaataaaaatctgatatcaacacataagctcaccaagcatgttttattctttattgatcacacaatgtatgtctgctgttattattcgggttgcaaataatttatgtgaatatcagaacttcagaagtaactcctaccaaaaaaagaacttgagaagtaatcacatatgaatatcgaagttactctcatctcaaattatgcaatgatggcattccattaaatgattactattgaattgtacacaaatcctccatcacatcaaccaacaaacaaagaataatacaaattaagaatatattccaaagaaattgataaatagtgattgttagttgtaactgtaaacacaaaaccagaattcttaattattaatagaaacacaaaggtttagaatggtaaccaaaatgcaccgtgcaatcagacatacaacattag

SEQ ID NO: 24448 - DNA, 833 bp, Arabidopsis thaliana landsberg
tccctggctttgaagaatgattttgccccgagttttcaaagaagcttgaagggcagttgcctgggacatatattgagttcgatgacttgcggaagcaaatggggtctccgtaagcatgggttatagcttccgtaaatggtgtgagttttggagttgaatgaagctaaaggtttattcgaggaacttgtggaagaagagaagtctttgcaagagttagtggaatctcttatagcagcattaaagaatgtgaagatggagcatgatgaagttgaagcgaaggttgctgaaattgaatctgtggctggagatcttcatctgaagcttagcagaagtaagagtgagctagaacaatgtgttgcagaggaatctaaagcaaaggctgctttggaagatatgatgttaaccatcaatcagatatcttctgagactgaagctgctcgacgagaagctgagggaatgagaaacaaagctaaggagttaatgaaggaagcagaatctgcgcatctggctcttgaagactcagagctacatctaagggtcgcgttagatgaagccgaagaagcgaaagctgccgagacaaaggcgcttgaacagataaagtcaatgtctgaaaaaaccaacgctgcacgtaattcgacttcatctgagtctggatctcagagcatcacactgtctcaagaggagttcaaatcactgagcaagagagctgaggtattcgataagctagcagaaatgaaagtggctgctgcattggatcaggtggaagcagtgagagctagcgaaaacgagacactgaagaagttagagacaacacaagaagagattaagaagct

SEQ ID NO: 24449 - DNA, 998 bp, Arabidopsis thaliana landsberg
aattaaaagggattttttggggagaaaggtgtggataacaaagggacttgtgtcgcatcatatcaatgttgcttttttatcgatcttatactattcattacttattataggggaaaatgattatttattgtcctaatcatgcttatcatattaatacagtgtcgatattattattttatttcaccatcggtgggtggattcaatcaaacaggactcaaattttgcaaagttttactttttggtagttcaataaaaacataatctcggttataaaaatattgtctaggcactaaacctctctatatactatagccacaaaaatgcttgttcatatactccaaatttgtttgtagcttggttttacaaatattcacaacaaataagctaaaatacgaacatattctattctattttcattatgacgaagaatttaaatgaaataaaaaataaaaaatacatagtgctctaagaaaacgatttgatagctgggaacacgtaacacgtggagacgaataatcttatcttaataaaaccgaagagaatttaacattacccaattacataacgccacgtaatcacatgagagacccaaagttccaaacacgtgattcttgaccgacggcgtatcaaaaaaccatccgacgtggactcaacaagagaaaagttgttgacttttaaactgaacaaatagtatcaggttcggtaaaccgaaaacattgaaccgggtttggttactgaaaaatatttagtcgtaatctaaggaacattcaccaccatcttctacatgaagtccatcgtttcctgatggccaagatttaccgtccgattttggatcggcttgtaagtatttgagttcacttctgtcatgttgcacccttcctgtgatctctagacacaaaccgtttcggtttttcttgttgtctttcttggtggtggtgctgtttggcttcttctcggttggtcctgggtctaagaagattggaacgagtcttgcagtc

SEQ ID NO: 24450 - DNA, 887 bp, Arabidopsis thaliana landsberg
agtccaacttctacctacctatctaagtaggtcttaatgcatctttcaaattgcaatattttgttatactttaatagttttggaaaacaattaatgacaatatgcaagtgggtgtctagcttgaaccttaatagagtctattttttaccttttatctaatgtcatcaatttttattttatttttgtgtgtgcaaaatttcattaaactaagattgaataaactcaactttccatttcatcaagaatcttccttaatcataataattagtttttactaaagtacaacgttttgattcaaaataaaacctgtaaatagagcaaagcatcaattagtttcaaatatttctatctttctttaggaaaatatttttgtgagttatctctatgaaatttataagtctatacgcctttttaggtgatttattttttaattttaatttatgtgcaatctctatacaattatgagtttgctttactaattttagtgcatctacttaatttaggtagcaaaataattcttaaaaatgagatcgataattgaagaatgattattagctctcacgagcatatatcaacctttggatttagctgacaagctatatatattgactaatttatatataaataaatgaaaagaataccgttggagatttcagctagccgttgaaaatatgtaagatatgtaagtagcattaaaatagtttttgtaagtttgtgtatatgttatcagaaccaatttaatatttctcattgtatatgtttagatggactatgagtctatgaatgaacattcaatacggtagcagaaccaaaacatgagatgtgttttagtccgttaaagtatgttgccgcaatcaccacttactaatggccaatgaggctcgaca

SEQ ID NO: 24451 - DNA, 1233 bp, Arabidopsis thaliana landsberg
gattgcgtgttgttttgggaattctttgaaacatcgcgatgaagtttctcgagattgcgtggtttagataactgttggatcatctttagtaatagcaaatgctgtgttagttttttagttctttagcagactgtttcatcttccgatcagtttgaccgactaatcaagttgttgtgttgtttcaggaatgccgatttgtgaagcatttgctcaaatagagcagcagcctaacatatatgatgttgttcatgttaaatactacgacgaggtttgtactaggtcacggattgtattagatacttcttttatccaacttatcttcattgtttgttgagttttctatgattccgttgcctcatgcaggatcctttgaaactggatgttgttattagctttccagatcatgggtttcatcttcgatttgatccctggtctcaggtacaattctttcctagatgatactgtggacctatggcttttgcatgtgtatgattaaaccaacttcactgctttacaaacttttgttttcaactattcaagagtggaaagcaatggagggtatctttatataactagttttaactggaataaacttagcttttgttcttccaatttgtttgcagaggttacggcttgttgaaatatttgatgtcaagcggcttcagatgcgctacgccacttctatgattgggtgagtcgaatgggatcaatttttttggctttggtgtgtagtttactgttgtaacaactgtcttttgcttttacttcaggggtccatcaactctggcaacgtttgtggctgtttatgcactttttggaccaacctttcctgggatttatgataaagaaagagggatttattctctgttctacccggtgagcaagaaatagacagatggtcacattgttttaccattaatgtttgaatttgttctatcaatgtttaatctttttaactattgcaggggctatccttcgagtttccaattccaaaccagtacacggactgctgccatgatggagaaggtttgctcttctccggactccagtgaaatcttgctcatattttgtgtcttgaccgatatctaacttctcagatttttttttctcctttacaaagcggcactaccgatagagtttccagatggcaccacaccagtaacatgccgggtctctatatatgacaactcaagtgacaaaaaagttggtgtcggaaaattgatggatagagct

SEQ ID NO: 24452 - DNA, 954 bp, Arabidopsis thaliana landsberg
agtctacaaacaaataagtctgtcatgtttattgttatcattcaaaattgtatgaatgatttgtttgtatagtaatctaattacaaaattatggagaaatgttcgtttacatgggtccatactgattaaaaatgaaaatcatgaacttaatctgataaaatcattacaatctgatgtgatctaccgacctttcactttctattattttctttttattgtagtccattttaattggactgttcaccaaaccgccaacataaaacatgtatagtgtactataaaattatggccgcacacaccaattctctccattggtcacttggaagattagtcacataatattatattacacttgaggaaatcaacaagactgtaaaatgtatcacgttatcaactctcttatttgtgacatcacagtacaaagatgtggtcgttgagggaaacaaaatggttatcaaactatggctaatatatcaacaaatgtttgggtgtttgtattgtgcccaactgcagtaattagcagtgtttaggagatcgattgaaaggtcaaataagacaagattaaatcaatgaaatgagaaaagaaagtttcccgaaaaagaaagtaatagatttgctttggctgaaagagttagcttaggatcttgtcttagattctatcctaactgaactttgacaacgactggtatctagaaacaagcttcaatgtcgtcattctcttatttaccagttttataataaagaaaacaaaaaaacatgacttcacttttttttttgtttcaagatttagaggaactttaattaatccagagctatgtatatatatatgaaatctaaatcattaaacaaaaaaactgaagtcatatttctttctatagtaatattcactccttgtaaccaatttgtgcttatggaacaatgtgtattcatatggaattcgcttggaattctatc

SEQ ID NO: 24453 - DNA, 1137 bp, Arabidopsis thaliana landsberg
  unsure (1)..(1137): unsure at all n locations
tccattaacatctctctctctctctctctcaagctcctttttcttttaagagaagtttatgttgattttcgtggttaccattcatcttcagggatcaaggattagacttaatgcgattaagcaaatgggtttttcccgatgactctccttgttgttggggagattcaataaatggactcacaagatcacaaagcacctggctttgttgacatagtcaaatcttggatccctagaaagagtgagtcctcaaatatgtcgagggatttttggatgcctgaccaaagctgtcctgtgtgttatgagtgtgatgctcagttcactgtgtttaatcgaagacatcattgccgcctttgtggtcgagttttttgtgccaaatgcgctgcaaattccattccatctccatcagatgaaacaaaggatagtcatgaggaaccagaaaggattagggtgtgtaattactgctacaaacagtgggaacaggggatagttccccctgataatggggcttctattattagccttcattttagttcatcgccttctgctagaagcgtcgcaagtactacctctaatagtagcaactgcaccattgattcaactgctggaccttcccctagacccaaaatgaatccccgagctagccgtcgtgtctcgtcaaacatggattctgaaaagtctgagcagcagaatgcaaaatcgcgtaggagctcagatcattatgggcatgtgttagattcttctgataatcaagttnnnnnnnnnnnnnnnnnnnnnnnnntttctttttgtgtgtgtatatataaacgaccgggtagcttctattgcttaagagatttgcatgatgtccatcaccaactgtttgtgttatactgggtcttttcaaatgattcactattgtctcaatttgaatttattagttgagttgctcattttcgtgattagtagtggcaggagtgatggtgaagctgatgacgatgacgattatcaatctgattttgcacaatcttacgctcaaggaaatgactactatggtgccatcaacctcgatgaagtagaccatatctatgggtcacatgaagctcatgacgttggtgtaaaaatagaaccaaacataagtggctttccccctgatcaact

SEQ ID NO: 24454 - DNA, 1378 bp, Arabidopsis thaliana landsberg
tgatcgatctaggaagtgatcatatgatcttcttctcctcctcctccatctcgctccgccgctgcttctgctaatctcttccatgtatattgccgttgttcttctacttctttggatttcgcttgtttctcttcatactgtctctgacattcttcaaacagttcaggatccatttccatgaacattttcttgatatttgtggttagaccatgaactgcttggttccagtgagactggatgttcttctccagtgtgggatatatgattggaaggatcacgcttcggttttgcgcgattagacccacaatgtgctcgttgttccacaagaacagtgctcgttctgcaacctgtatcggatttatgagatatacatatgagcataaggcaaaccccacatagaattctaggaaagtttgagctgttgcacaaagacataacgggaaacttgtgtgattcctagaaatcagtaagcacagtaacaatacattcagagagttaattcactccataaattttgaaacaactgaatcatggaaaatgaagatgatctaggaatccaaggatttaatcagagtagaagctatcaaaagcatgagatataacgcatacttatgagagttagtaccaacaagatcattttatgaatgaaaatcaacatgtggcaaaaatgaagagaaagaggcaaagcaaaaagaaaaacagaacaaaaaaaaacaatttgcactaaacttgatgaagcactagtttttttcagggaagaaatcagaccagagtcaaaagagctaaataacaaaatctccatatttaaggtaatatgcataataagccttccatgtggggattaaaaaaaaacaccattgcaaacacgacgactaacctgaaaattagagctactgaggcatcgagcaatctgttggaacagagggaccatacagcgttggaactcaacagtttgtgttgcctcaagaacctcttcaagttcaccaagaaagagaacctcttttgtacaatttgtcacaggccaaaactttaacaagcccctgatcaccgtatccgcaagcttataatctttctccacaaactgaacgatgcagtaagacaattgttggtgatacatagcgattggttttggcttatgcagcggtatcaacgccctaatcaaaaagagcttgtgctcctccttcattggcaaggcaaacccattaataatactaccgagaatctccaaaagctccccaatcccactatgtctctctgtctcataaataaacctatagaaaatatggttcattgctttcctaataaagggcctgtgaaccataaacttgccataaatcctatgaagaatcgtttcaagtactccctttctctaggatct

SEQ ID NO: 24455 - DNA, 1036 bp, Arabidopsis thaliana landsberg
agtatcatctctggcttggtacgattgacttctcattcaccttcttcttcttcaagtgtgctcagaaggcaagagttcttggtacgaacgctttgtgggtcaccaatcatcagagcaatgagttccacatcagaggctgacgctgagagtgttcttagaaccgtgacgccatcgctcgatctcaaacgacacaaaggccaagctggttagtgcttgctctattcaattgtgtcatcagaaatttatcaaattcgaaactttaggattttaaagtttgagttttttcaggttactttgatgttttagctcatgtgttggaattgatcttgtgtcagggaagatagctgtgattggaggatgtcgtgaatacacaggagctccatacttcgctgccatttcagctttgaaaatcgttagtagtttcgttttctattagccatcactgcttctgtctacataaaagtgaagagtggtttcatatctgtaaaactgtagggtgctgatttgtctcatgtattctgcacgaaagatgcagctcctgttataaagagctatagtcctgagcttatagttcaccctgttcttgaggaatcatatagcatcaggtgaatactccattccacagtgtgtgctacttctaactatgtggttttgttccgtatgtttttattacaatacccggtttcatatctgtatatagtcaactcagtgaagaagataaaagagaagttcaagataaagtgcttggagaagtcggtaaatggatggaaagatttgattgtcttgttattggtcctggtttgggaagagatccatttctcctggtaaagattcagctacccttgcttaatcacattacacaatttgatttgtcattactttggtggcggacttaccagttatgtgactctgtatttccaggaatgtgtgagtattatcatgctccttgcccaaaagtccaatgcccccttttgctatagatgggggtaagcaatgataccatagccttcaagtaaggatttttgatcaggctctt

SEQ ID NO: 24456 - DNA, 890 bp, Arabidopsis thaliana landsberg
attttaacatttttgcatcttttcacttgtctcagtaaaaaaacaaaattatactgtagctcaccgtaagataacgtacactcgtcacaggtgatcctgtcctcacaattctctctgatttcgcttactctttcactgaaaccctaatttggggtttctcagatttccttcaatctctcgtcgtcatttcttcgtctcaccgttgaatctgaaaatgatcgccggagtattgcgccgatcttcactcccgtcgaggcagactctctccgccgcgttagcctccttcaattcgtgtatttcgcacaatctcactccagccaccaccggagcttccgtcagctctcgattcactctcgcgtcgtctcctaactcttttggcatcagagcgaggaacatccacattagatctgagccgtcgatgattgttcccgcaggaatcgcgtcacaaggttacgccactgtcacaaaggatcgcaaaaacgagattaagaaagctaagattaaaatttctccagacaatgtcagaccattgagtaggaaggagatcgctctccaggtatatgcatttttgttcaaattcatagaatattattcaaagtgcttcatcagattcaaattcgaataggaatcggaatgtgaaattcattgaaatgatttagaactgttgtttatgttgttgttgctgtgtgtttggggttgaatagttttttgttgtggacaacaaagcacatcaaacataataggaacaaagattggtataacgataccgcctatcgcacaccctgaaaatcaagctatccatgccgctcctcacactcttaaagtggccgagcccgatacacaaactgtctacacggtgctatcagctcatcacagtagatacataagtc

SEQ ID NO: 24457 - DNA, 1416 bp, Arabidopsis thaliana landsberg
gaggatgactatcccatgtcgccggtaacttctatttcttacttgtaggatacgtaatcaatcctctagacgtctctgcttgcataaggaattggacattagtgttttaagtgaatcctagaaatccggaattgtaaccataacaggaaattaggctcatgtaggttggttttttggtctcccctgaagaggctggattgtatatggttttgtgaagctgatatcttgatttctgctgaaacagcgattgagacaacattgtggtctatcgagtggggaattgcagatctagtgaagcatcctgaaatccagagtaagcttaggaccgagctcgacacggttcatggaccgggtgtgcaagtcaccgatcctgatctgtcacattcttccataccttcaagctgtggttaaggagactcttcgtctgagaatggcgattcctctcctcgtgcctcacatgaacctccatgatgcgaagctcgctggctacgatatcccagcataaagcaaaatccttgttaatgcttggtggctagcaaacaaccccaacagctggaagaagcctgaagagtttagaccagagaggttctttgaagaagaatcgcacgtggaagctaacggaaatgacttcaggtatgtgccgtttggtgttggacgtagaagctgtcccgggattatattggcattacctattttggggatcaccattggtaggatggtccagaacttcgagcttcttcctcctccaggacagtctaaagtggatactagtgagaaaggtggacaattcagcttgcacatccttaaccactccataatcgttatgaaaccaaggaactgttaaactttctgcacaaaaaaaaggatgaagatgactttataaatgtttgtgaaatctgttgaaatattcccttgttttgcttttgtgagatgtttttgtgtaaaatgtctttaaatggttcgttctacgattgcaataataattagtggtgctcattcttttggatggatcgatgttatacttatatcatttgaaaatctcatgattgttggacttggaccatagttgttaatttgaaggtttctaggttctaacgttaataatcttgttcacaccaaataaatctcattacacaatttggggaggtattaaaagattaccaaaataggttaattacaaattcgactatttccagtaatatgggctaatataggctccaatttacatactaataatgggctttataaagcccatttgcttttctccttaatatcatcactcgcagagattacgcagcgggaatataaaaacaccaatgcttacaagacattttcgaaatttgaaagaccgctcgtttcgttgtctttgatttcccctgctgcaaatttgatcaaagatcatcggattcatcattc

SEQ ID NO: 24458 - DNA, 1307 bp, Arabidopsis thaliana landsberg
gtatgtaaaatgagtgtatttaattaagagagaaaaaaaaacatatctaatcgcatggaaaatgagtgtaattaattaatcctcttctttaaatcatattctttttcttttacaaaatctttttccatttaatttaccgaatatcatatcttaaattacttctatttttttagaagaaatcaatatttctaatcgcatgaaaaatgagtgtatttaattaataaaagaaaacaaaaacatatctaatcgtatggaaaatgagtgtattaattaatctccttctttaagtcatattctttttcttttacaaaatctttttttatttaaatgaaagttgaagttcctaacaaaattaaactataatttaaatctatttttctctttctagtttatgatttcttaaatatgaaacaaaaaaaaaaagataaaaagcaacgaaaagaaattcaaatacagacttataagtaaaattatactatactagataaggcccgccgatttaggcggggttagatacaaaaaaataaatttttattgatagtatttgaatttgtatagtaatcaatgtacacactcaatcttatcaatgatatttgaattttaaacagtaaccaacccttattctatatttaatttagtatctaaaaagaaaagaaaaacaaatttctatcttacacaatcaattttgtaacacagtttaactatctatgtcatcataataaactcgatttaaattctacacacttcattttaagtgataacattttcatatcaaaataatatttatgacatatcaaatctatatcctagatatatgaaagtaattgaataataaataaaaatattctcagtaaagtaattgaaaagttaaatcctataagctattttctcaaaatattctatttttcacttatgattacatgagttaaaattgttagaatacaacataggtatagtaactcatcaaaggatgcaaggcgctccatcgtacgatgcgttaaaattcataggttaaaccataagtattcaaaaatttattcttataagttcattaatattttgtgttttgatttaacgaatgaaaacattatattacattgacaaatataattttatccaactaacctagtgttaaataaattatattactattttaaacttcaatggtctttttaattagtattattatccatactccattattataaaaaaaattaatatgtgctacatttaaatgaccaataacacaagtaaaaacatatttgttaattttccttttgttgaataaaagtaaaatttatatatat

SEQ ID NO: 24459 - DNA, 2712 bp, Arabidopsis thaliana landsberg
cgtaagcaagaacattggaagaggatgagattaggttggtttacctgaaacttaaaagcgaaggagttgatgggtcaacgccgaaaggcagaaggagaagttacatttatacgccgtatgtttttatatattagttttatttacatgttgaggtatgtgtatatatttacaagtattgattctcttggaaatacgtctctatttgagtctctcttgttgtaataagatcttttggtatctcgggtacacgtttttacaagccgaaacctgaaaaatggatcaatcaaaacacattagttttcccattggtgataataactataacgaagaaagaggtttgatggttttgcctccatgaaaacaatcatgaagcatgcatgcgtgaggtgtgacgtgtcatgtcggatattatcttattataaaatgactaagaaaattaggttacatgccacacggtttccacatgaaattctaacctacaaaacaaaactataactctataagaaagttttccaatccaaacttcaattttgttttctcttagtttcatttgaaaaccttctcaccaagtagagtcttttcctaaccaaacatatcggaaagacaaatctcatcgagtttctagaatcacaaaaggaccaaatgtgtaaaaatgtgtttaatattcaacattgactaatatacattcacatgctatctctgactctgacccattgcaggttaaaaatctaattcattcctagatttgaaaaaaagtaaatgcaacttggtattattggccctacatcgattatcaatcaaatataataaaataataaatttctgtaacggcggaaaaaaagaagatggagaagtggacttacggcttcaatgtcgattttgaagacgagaagcttttttctttctctacaacttgttcgataagccacaacgatgtgacctatggctaagactgacgagcatagaaacagagccacttccgccgctctgaagtagtttcctcctccgtctccgatcgctggctcaccgaacacaaacgcagcttttaacgaaacgtagattagagaagatattgaacaaatcattgttattgtcagatacggtcctctcgatagttttggtccgtcacagagtccataaacacctgtttacacgaaaaatcaaactaaagaaatgagttttcgatttcttcagaaacagagcaaacagagcaattgctctgttttttttttgggttttgtaaagtttgaatcttttttttactcacagagtataacagcggatctaatgattgagattaaaggaatatcgatgagggagtgacggaaatcgtagttggtgagatgagaagagagagtcgccggcgaagagaagcggtggaggagagcggaagggaggagagcatcggcgacggcgaggaagataggagcagagacaaggagaaaagagaagaacattgtgaacaaaacgaatattgttttgatacctctccaaagagaagatgaatatcttcttgttttgcttatctcttctttgctaatcaaacccatcttgatctttcttcgtttctagggttttttttgggttatgtccagaggatttatgatgtaagtgtgatttggtttctggagagagaggttttttggtagagacttatttttgagggttttaaaagggtcgtcgaaaacaaaaatttgacgatgctgacgatatagctgatgtgtaattttttaacaaataaataatatctatcattgataatgactcttttttttttcttgttgaattttaacatttgagatgatgttgttttggacgtcttttccaaggaataattattctagaacataatatatgatcagtttgatttttggtgcattatatagccttataggaaataatccacaagagtttcaaaagttttaatacattctgtattttccttttgtttagtctcatgattttctgaacttttcttggtttaccggaaaatttttcaacatttggtttatcggtttgcaataagtccgtaatagactttttatttttatctgtactactgtgagcaaaacatttatgaatgattatgattgcaaattatccatatttgtctacaagagttttgccctttgcaaccattaaatatttgctacatggactcctaaatcaaattttgtatacaggacagcaattaaactttatctcatatgtgagagcttaatcaacaatccatgttcagctctagtctccctagaataacggtgttacctaaattgcgtcaaacacagtactctcttgtctttatttaatttttgtcaagtgtgatgcacattactctctctaaattccattcagtctacttgtatatgtattaatcaaattgagaactatgttcaaagaacatctgtatttagtttgaacaaaaaataaaggcaacagtagtttggagaaagcaatcggactaatatatatttatttatttttcgtcagaaatcggactaatcaaatagtgttatttccagacatttttttctataaaaatgagatatgcttggtaaacagtacaaattaaaggcggatatagaggaaccgaccgattttaaccatgtgagcactcgcataccgccaattgtattgtattagttctttttaaagataattagcacatttaccatcgatgaattcagaacatgttaaccatctatataagtt

SEQ ID NO: 24460 - DNA, 887 bp, Arabidopsis thaliana landsberg
tgcaagatccatgcatggtgacctaaaattttaataatcccacggtttcaagttcaggatttaggacattagattatttatttataagcttccaaatactattagtttgtagctactcaagacagtatttgttttcttcgacacatagaccccaaactgtgtttctatatgagattcaatgcatctctttcttattttaaaatcaataaatgagtatactcaaattgttacgataaaagaactcagagaatgtttctttttgacttggttttttcaacccaaataaacaagaaacaaaaaatgtcaagataaaagatttattctttatatttttcttcttgtttatgtctataaactatggagctcctggtataatataatatatttttactctaaaattatgtgttttacgttaagtttttgggtagttgctaactgataaataaatttttgtgtataataaatatttaagtaagagctacaaaaacaagttagttagcaatgataatggacaatgctatggagttgcgaccattgttcaaacaacagcacatttggttctctaaataggaatccaaattggattatccaatcatttgggaagtgaatattgtaacgtatttgaaacatgcattaaaccctcaaattatttaatgaccaaagcctagtaccaatgatttactacactaatatactactgtagatgcgttgaattctttgtcattgttataacaacatgtggaattattgaaaacgtaatggagaaaaatgaaaatgggttttggcggtgagcgaaagaaaggcatgtggagaagacaatgtcacatgcgacatgtgagaacgttatgatgtttggtctgaaacggcgccattatgtgatttatgca

SEQ ID NO: 24461 - DNA, 868 bp, Arabidopsis thaliana landsberg
catattcgaataaattctgaaaatattaaagaatgcaagaaatcaaaacagcctaaaccataatataaccataatttatataatgggaaacagataatcaaaatgatgatgcaatcgttttcgatgattttatattcttttttgtcatctaattttatatataaaaacatagaaaaatatttttttaaattacataaacagacggaaaaattaaatatccccaaaatccaaaattcaaaaagaaaaacataaaccggtgaacgacctaaatgtctctggaaacatagccgaaagaaaacgaaatttctctgaaactatgctctataaaagagaaacttaaaatactggaaatacaaaataaataaagagttttctacaactatatggaatgtaatttactatatagaaatgattcaaacaaaaaatcaccaaaaaggtcatcctacttagtggaatgacggacaccacctatagatttttgtatggctttggagcttggacaatggacaccatcaatagattaatcactaaacgacgtgctaaattatcgtcaacttataacctaacaagtaaaagttcaatttgcctacaaactaacaaaaaaacatataaaagctcaatatcagtttaatggttttggtccacgacattgacaatgacagaaaatttctttaagaaaaccaataaatgaaatgctcgttctgttaagggaaaactgaaaacaacgtacgtaaccgacagtttttttttatttttaatgttgggctaaaggctaaaaccctctagaagatatagatcccgactagtcgataaatgtacgttgatgagcagacgacacaccatcccatccatagcgacttgaaccagg

SEQ ID NO: 24462 - DNA, 1190 bp, Arabidopsis thaliana landsberg
agcattgttggagagaagttagatattaaagagattgttaggagtaaaaaagaaaggctattgatggctctccacatttggcaacctgtaatcttgttgaggctaaagcggcagaagcttcccaacctcgtcctcctagtgtgaaggctgctaagggtaaaacgaaagctcccaacaattcaccaactattgaagtagaagggaaggctttagaaaggctctagagtatgtgggacataaagaaacaagatttggcatttaaagaaaagttatgtgacaagaaattgcttgacattgttgtagcaagatcaaacacttttagtgaagtagaagttgagctaagaaacaagctcattagggacatgtattttcagtcttgacaagctcaagaaattgtattatgttatgcttttaggtatgataacttttgttctgtttttttggcatgatgactttatgctttgtgttctgtcttaatgtatgatgactttatgttatgcatgatattgtattattctaacaagttgaagtgtatctttatgtaggatttatgctttgtgtctttatgttttttttgtagggagtttattgaagtagatgaaaaacgcatacgactctcataccacatatttagcaatcagacaagttgaggaacaaagaccacacaagtaatcagacaagtttacatggtcagaagcaatcagacaagtttttttagccacatattttatgtaaccacatatttttgagcattctcgtaccctatattttcgaattgtgatgctatatattacaacatgtatgggactaataataaacttattctctcttcttcccatgatgattttgaggaagaatttaaaaatatttttgaagaagaatttgaaaatgcattatactcttatggtcatcgtcaagaaacaaccaaacaaagaaaaagaagagcctatactgaaagagatcgtgaacaaggacacatcaagttacagaacaattatttcatagaaaatgcaactttcactattactcaattttgacgccattttataatgaacaagtccttgttcatgcgcatcattactcgactcgccaataaaatttcattctttcaacaatgaagagatgctactggaaggtctggtttatctacattacaaaagtgtacaacggcaatgggatgctgcataggt

SEQ ID NO: 24463 - DNA, 1324 bp, Arabidopsis thaliana landsberg
gtctagatatgacatgtattaagggataaccattagttactcgagttgtttagctaagtaagtaagagtccgtgtacgtttttcggtttcttattggctcttcgaatcaaaaatagatgatgatacaatgtaacataggcaaggacaaagtcatcgttgtaaataaagtcaatgatgtaagaaatacaaatataaccgccatttattaatctcacttactctgtccccaccatcactcactgattttattatcatcaaaaacattgagatcttcacccttatcatttgatccaaccatggctcgactccttctcctcttcttcttcttccttattctactccattacgcttcttgttccagacacgaacaagaaaaagaccgaatctttcaccttcccggtgaaccaaacgatgtctccttctctcacttctctggttacattaccgtcaacgagtcagcaggaagagcactattctactggctcactgagtcaccaccgagtgaaaaccctgagtctaagcctcttgtcctctggctcaacggtggacctggttgttcctccgtagcttacggtgccgctgaagaaatcggaccttttagaatcaatcctgatggcaaaactctttaccacaatccttactcttggaacaaatgtacatctctctctgtttctccatttctctccaaattttgatttcacaatccttaaattaacactctttatattgggtcagtggcgaatttgctcttccttgaatctcctgctggtgttggtttctcgtattcgaatactacctccgatttgtatactgccggagatcagagaactggtaaagtcttgacctttgacttctctttctctagatttatcaaccatttgatgattttggtttgattttttctagcggaagatgcttatgtgtttcttgtgaaatggtttgagaggtttcctcaatacaaacacagagagttctacattgctggagaaagctatgcaggttattgttattactgattctattcaattggaaactttgtcttagctaagcattttcacttttcttctttaggtcattatgttcctcagttgtcacagattgtttatgagaaacgcaatccagctatcaactttaaaggcttcattgtaagcaagaaaaaaagaagcacaaatctattaacatgttctttttgtgttggtataaacgtgagtttgtttctaggttgggaatgctgtgattgatgactaccatgattacgtgggtttatttgaatattggagggaacatgggttgatatctgatctcacttaccacaacttacgga

SEQ ID NO: 24464 - DNA, 2285 bp, Arabidopsis thaliana landsberg
cgccggtctgttctttcttcagccaagaatgctcgtttcttctccggtacgtaaattttctctctgatcctcttttttcctgaaaatgtgataaacgtcatgggatgatacatctagatagacgtcaaatattttatgaatctacctgtggttttcttcgttttctagattctcgattgtattgaatcagtgatctgttgtatcgtttccaatctaaaatatttgatcgaagcttttacttgatcctacgtgtgttcccatcaagaaaataaattgtttgtttcttgtgagagaatacttcttgctaacacattttatgtgaaactattggatacacaaatttagactctcatattccggtttttgtctcatcgttgctttgcctacataagacttcttattgattttcccattaatataaagaggatgtttaagatctgttggttttattattcacatatgaacagaagtcacaaaccgtgtttcgtttacattttgctgatacgttgattattatatgttttcagaaggccgagccattggtgcagcaagtgtggtgcatgcgactggaaaagtccctcagtatgcatccaactttggaaaatcgggttctggcttcgtctctaatagctggatcaccggactccttgctcttcctgctgcaggttttacatgcataatgtttcctataaatctgtgatttactgttttatgaatatattctacaggacacattcaaatcttcacttttgtaacacagttagtgtaaattaagcctttcaacgttttgactccaaaatgatgtctaatatcagttatacgtacaagacttatagctgatgagcttttttgtttatctatattcatgttttactttgatgtgatgattaacagagcccttattatattcgccttgctttcttttttatcatttctgttatagccttcatgctccaagatcaggaagcacttgctgcagaggtaactgattcaccaaaccaaacacacatatctctatatctttctcttgtgttatccctggtttctctgtttaattggatttctctgttcgaatcagatggaacgcactttcatcgctatcaaacctgatggagtgcagcgaggactggtttgttacttgttattctcttgtaatttcatgtcttctttattcaaatgctcaaaactcttaaatctttaaactccctccagatatcagaaatcattacacggttcgaacgcaaaggatacaagcttgttggcattaaagtcatggttccttcaaagggtttcgcgcagaagcattaccatgatctaaaggagagacctttcttcaacggcttgtgtaacttccttagctcaggccctgttgttgccatggtaaagaagcaactctcacataaaaccgacttgttttagctctaatgatccaataagacattgtttttaggtatgggaaggtgaaggagtgattagatacggacgtaaactgatgggagccactgatcctcagaaatgagaacctggaactatccgaggcgatctcgctgttgttgttggaaggtaccattctatttttatgacatatgtatatatgattgcttgtctgttttctcggagattatagttttgcttttgttttttgggaaattgcaggaacattatacatggaagcgatggaccagagacagctaaagacgagatcagcttgtggtttaagcctgaagaactcgtttcttacactagtaacgctgagaagtggatctacggccagaactgaactattccctctttctcccttattttcaaccgttagatcagacataaataattacttcttttgttttttcttttacccaaacactgaaaacgtaccgggaataacaaatttactgcatttgttatcaagtttgttctaatagacccaatgaaattaggccacgtgtgcgatcatgtaaccggtttaccgtaatgtggacttgaaatccgattagcaagcgtaatgttgttttaatttctcgttggaatccgccgactccattataaaatctcagagaactagttcagctgcgagttgactcgttcatcggcttcttcagaacgatactttagcttcgacctctctctccgatcatcttcttcgtcgctttccctaatcgttttctcttgcaaggttcttacttcataattcgtaagagtttcctcctttcttgacgagtcctgatataggttttctttcgtgttcgattgtgttcttactgtttatcgcttctccccaattcttg

SEQ ID NO: 24465 - DNA, 778 bp, Arabidopsis thaliana landsberg
tcccttacataaatctacaaacaaatttctctaattttaatctaattctatctaaaattgaaaataaaacaatatactagaccaagttagattgggatcaacaaaaagggataaaagtgaaacgtgaagaacgtaattaaccaaattgaagaagaagtagattgacacgaattttactaatttatgcaaataagaaaattatatatgtagttataccaagtttaatgaagacgaaaaaacattgattaaaaatggtaaaaaaaatttatcgattaaattatttaaaggtttgacccattacgtaaaagtcggattttttttacccattttacttggttgggttagtaatagattcagtttttaaggggtttcaaagtctttcactcatttttcgatttaaagaaaatgaaaattaatcttatttttataagaggagtatttgagaattctattactccttcgagagcccctgagaatttcttccatgtggtgtcgaccaatttttggtattaatggttgcttcctcaaatgtacatttaaaggacaattattagcagctgtggaagagacgcaaacaatggtatgtaccatatttcttgggttgtagttgatgtggagaacgaggataactagatttggttcttagagaagctttgagtagattttatttgcaagagggtcaaggatatactataatatctgatagacaaaagatatgcaatctcaagattttttgtattctaaatatttttcaatatttggaaatttttttttatat

SEQ ID NO: 24466 - DNA, 826 bp, Arabidopsis thaliana landsberg
taagaaactttatctcttcataagattatgattaggtcttttgagttttcattcacaagattcgcattgcagattcttcttctctaactctcatctttaagcatatacataaaccagacctaatgttatctattgttacagatggttatggcagtatttgcctacatatatcttcaatcatttattgtctcccaaagcgtttcggttgacaaaatcctagaccaggtaaatgaacttctcgactttgtatcaaaactggaaaatattcacttttgtgatgaatcattaaatcaatcatgtgatggtttcattgtagatattgacgaaccttaccttcgaggaacaacaagcgctcttcgtgaaattaggacaaatgctgaaggacaagctctcataggttctactgccaaaagtttcttttactcagatttgattctccaagaacaggttcctctggaatatccttttatatttgtccttactagagacaataaatttaaaattggattaagatttgttgttttctgccattgtaaatcctctcgaaatttgtcgaaaaaattagaagttttttttttgaagtcttctcatttgatacaataggtttgaagtaagttgcatctacctactatctacttatttagtacctttggatggaggttcacctgtattttgcatatcgattaaaataaaacaacatttggtttgtcagtctcatgattcgatttggtctatgttttcttttttaactggagaaattgaatgcataacgatgacatagtaagcccatattctttttgactctcctgggctttgaagataggcc

SEQ ID NO: 24467 - DNA, 1836 bp, Arabidopsis thaliana landsberg
ggcttggttgtagaggcttcctcacttgtattccccttgattggctgagcatttattgtacaaagtacggattgttcatgttcaaggacgaaacgtttcggataaggagcagttgagccaccatgaccaagataggaactaaaatgaggtgttttgataaacagaatgaagacattgttttggaattttttgtactatgttttccaaacagtgatggtgtttatgtttgatattcaaagggatttaaatataagttatatatttagtttacaatttttggttatataaaattctattgataaattaagtttttaatagacatgtatatatatagagaatttgttgtaatgaaaaagaaagagaagttggtatttgcggcgacaaaagagggcgaatgaaaaagtaaaagttcaaaggtgtgactgagttcaaactctttcaatcacacgattgtaaggtggtgaccatattggttaaatatagttgcatattgaaaaaccaaactattgtaagaatttcaaaagatccccggatacaaacttctaatagaactctttttgtatatagatgtggactttttgtttactaggtcgtcaagatgtaaaatatatattacctagtttgcagtttaaaactttaaatatcaaagccgagtcgatatgttagcatgtagtgctcgactatatccgcaagatattagctacattaattatggtctcacaacccatcatttttctactatatacatgcaacccaataaaataaaaaatttatcgatttttggagcaaaactaaataatatcattagagatgattttacaccaaaatagagtttggaagaaaatttgaagcaccattagagatgctctagttttggttcatctttgccatgtgtgaataagttatgtattgaataaactgtaatatacatttggtgtattcatcattattagctacatgcacaaaggttaaacaccaagagattaatttaatttgttgaaaaacttggaaagagtcaattttgaattttgtttttgttttgggagatattaaaattttatttacacgctcttacttcctccaagttcttgaaaaggcaaaggtacagacttgaaggctctgtatttccccacgttgttcaaatgctcattctccaacctaatcaacaattacatttcattagttttgtgtagattcatgcatgaaaacaccatcttctcagtctcggagcttacctaaagaagttccagatacctctgcgtatgatctcaaggcaagccataagcgcgaccatagtttctctatgcaagaaagagaatttcagatccaaaactgtttgcaaccacactaacctcaacaaaacattcaggacctgccaagtacatgaagcaacaatcttcaccatatatgtataaagaaaaaacaaaaacagaggttattgctgttttctgtttgctctcaccattgcagcgtagtacacggttttgtgaggaacaagaagcttgtctctcaagaaactattcttacatcctctttgaagcaatccccagtcaagaacaatgtcccagtaagttccgtaaaacgttgcaactcctgagaaaacccaagctgtgatattccagttgcttcctcggtttagagtataagctgttctaagagaagcagcaacgatggtcaaaaggtatttgatgccattgtagccatgactcagatctctgtcttccaccattcttcggatgcactgaagaaaccgtaaccagtaaggtataacggcgacgatgaagtagaatgttctgaatccaatatttgatgtgcaagtgtttcgtcgtctatatc

SEQ ID NO: 24468 - DNA, 935 bp, Arabidopsis thaliana landsberg
tgagaattgatcagaaggagcaggtggtggtgggttctctacgattgctgccaagagttcataaaagcttggcgggttttgctgatcttcagattctaagtaagggaatcttactattgcacattctaacactgacattcccaaacttcaaatgtcactgctgtagtcatatgtactcccactgatcctctcaggctgtgaagtgaagaaatgaaaaagagacaagtcatgataatgtatgtttacaatacataaacatcaagaaatttgtaatgtataaaatttttggaatgctttcgtaccgacatatagttgtaggttccaacaaatgtattcctctgtcccatggagctagcaagacttgcacttacaccaaaatctgagattttcacttcccctttatggtttacaagaaggtttgatggcttaatgtctctgtgtatgacatgtctttcgttgcgcaggtacacaagacccatcataaccttgtcacaaggggaaatataagtaagagtgatgataagtcatgagaatgctttaaataagttggtggtgtatttgacctgtttacagacaacagcaaggtaaggttcaagaatagtcttgacttgtctaatcacatccgcaagagatccacggtccatgtattcaagcacaagggaaaaggctccattgtgatagaaagaatggtagcaaacaactacatgtggacattgtgatgatgcttggtttattttaagctcctgaacaatttgcttacggatttcttcttgtatattcatctgtatgacctgtgattcataatagaaacaaaactcaaaccccaaatatacttgaagataacacaaaactctaaaattcatccactcaagagtcaagattataagagactagacaatgaaaagaatatcctatacgttaccttcatagcaaag

SEQ ID NO: 24469 - DNA, 1239 bp, Arabidopsis thaliana landsberg
  unsure (1)..(1239): unsure at all n locations
tccataaagttggaagtgccttcccttcaacgacctcacacgctgcttcaacacctaagtgctcatacctcacctctatgcttggaaactccacaccaaccctgcagattttttcaagttcaagtctcatactttcaagaagcatattcagtattcactatcaacctcacctctccattcttcttctgattttcttgagaagtttgagattatcattctcaatgtgtttgatcagcttctcaatcatcaaatgacgttccatggctccaagcttggtgacatcaacaacctttttccctttctccgtaccttcaccatatttgtcgaccagagacgatctcagccgtttaaaagttggcaatctctggatctcagcccattgcagagcatgttctgcttcatgatcattaacatcaccatcattttcaacttcatatattgaagagctgcttctgaaactcgaagtatgtctccggaatgatgatctgatgcttcttccgatctctgcaagctctactctcaatgactcaatatcgtctgctccaaccatatgagccatggcttggcttaaagagttgacctctctgaaatcagaaatttaaagtctaaatgagagataagctcaatgcattttgacttgcgtatatttatattatgggttactcaaactgacacaattcaatgatgtaagtgaatacatcagcttttgttctgagttcttgaaatgatctgcggattctaaggtcattgtatgatataaactaataattaacacatgctatcaacaattaaaaacaaaaaaacaaattttagtttatgtgtaatcagagaaaacgttgaaatactcaaagttgaaagctgtaagatcgtggaggatttgaatatcaattttatattaatataatgtctcggaaatggttataggtcatgtcttcttgtttgcttgatgactttttcttcttaaagtatttgttatgtatgtttcacaatttagattagcttttacaaattttcaggtatatacataattagaaatgtttatattggacgtttcccaaccaacagccgcagcatgaaacccaccaatattacgtaaagaaaattatagtagttttacatttgttttcgtaggacaaactaattctaacgttatgacgaaagaaatcgttcatagaatcgtcatgttttcaagtggggaagtacataaagcanaaagacacttctattaaatgcattcat

SEQ ID NO: 24470 - DNA, 1690 bp, Arabidopsis thaliana landsberg
aaaacaaacccatatgggtttacctcattggattataggtacccacgaattttttttaagtcatttttcaagtgaattaacattttgttgtcaatttttttttcacattttttccccaaaaccgcgatttaacagtttaacgctaaaaaagacattcaacattttcccgacaaaaaagacattcaacattttctcgccaaaaacgacaatcaacattttcccgccaaaacgcaattcaacattttcgcgccaaaaacgacattcaaaatttttccgccaaaacgcaattcaacattttcccgccaaaacgcaattcaacattttcccgccaaaaactcaatttaacattttcccgccaaaacgacattcaacattttcccgccaaaaagatttcacattttccggtcaaaaacgcaatttaacattttcccgccaaaaatgatattcaacattttttccgccaaaaacgcaatttaacattttcccgccaaaaacaacattcaacatttccggccaagaaaaggatttgacatttttcccatcaaatttatatgtaatacagaaaataaatacaatttaaaatatatttataagcaaattatagatacaacatacatataatagtatattagcagttaaaataaactccaagaaaatgacagaaaccaagttgggtacccacgggtagtctcggaacaatcaagttttttcgggctttacccactaaattaaaaacccatctgggttttctaaaattgggtttttggtgggcgggtttattttgggttcaggtcgggctgggcttttttaccaccacaacatctctattcgttagtcaaatctacccagcgattcttatatatctttatcataataatttaagtaagaatgtaagagtgatggaaatatgttattattaatctggcgattactaatttatataccgtaaatttattcctattaactgatcgaatcttatgttagcagtatgagagatattggttcacatggaaaataaaacgacagcttattaaaacttacatatcatacccaaaaaaatagttgtaagaacatgtcactaacaattattatcaaattattcataacaattgatatcattatgtctaataagtagtaagatttcatctttttgtcaactaactattactattctttaaaaaatattatattattttttgtgggtttctccggctaaaattggcttattaataaccaatcgattatcggatcgaatccagtttataaacaaaaattccaatctctccgaatgtcaaactaatttgtatcgaaatccaaaagattcgggttggtttgggatggtacaatcgggtcggatcaaaatttcatgcctagttagaatagtataccgtgtgtgaaagaacaaaaaaagtgttctagtttcggagatatttcatcgtttacgtcataaaaagataaacacaattggtcggagtgtcaaatactacgggatgaaaaattgaaaattatgagaacctacatatatgtggagacttcactttcaatatgtggagcttcggtttgaatcaataccagattttcaagctttaaagaacctatggcattggctatacattatgttaatgaatttaccaactaaagctatttgatctaagaaaatattgctcattctgctaataaagtgacaaag

SEQ ID NO: 24471 - DNA, 1283 bp, Arabidopsis thaliana landsberg
  unsure (1)..(1283): unsure at all n locations
atgcatcttcaatcttttccggtccaacctcccccggttttgtataaattatctttggtataatcttctcaacctcatttctcatccttgaaatcttctcttcagtaacactagccaataacttctcaatactaaccttcccatttttcacaccttcctccgagatgtaaaccgagtacttggtacgatcttttggaaaataccacttgtactggttatagaccgaatcaacgctaaagaaaaccggtatacaaccggctaaaatcgaatcaaatgttgatctccgagtaggtgtatctcctggtggttgtaaacagaaaaccgaatcttgaaaaacttccactaccttaaccggatcactacagtctttactcgatgtgtcacaatcaagaaatttgcatcttccttgtgatgcaaggcactgtcttataatctcacctctaatagattcctccatttttggccgattagctccgacatacgagaacaagtatacgctctgcatcatcgtcacttgcctctgccatctcttaacctcggttcggctctttggatggaaataagttggataaggaaccgcaaactcgttactcctagaatttgtctcaatggataacatagttatgttctcgaattcaggcaaccgcatcagtttgtttccccaatccgaatcttgatctgtaaccctcctgaaatctctaccaacccgtcccgtgacaaagaaatgatctcgtccatacattttcctccactctggtctctccctaagccattgagctagatcttcaccaagttcgtctctcagcttaacgttgtatccccaaaagcgtctcacatcgaatccagcataaaacgggacgaaaaccacggaagaaagggaagaatcgttggtcaaacactcgtagtgtctcattttctctcggaagataacctcaagcatgaattggtttgtgtagtaccaagaaccggtctcgatggttaagactcgagtggtatggttatgatcttcctccaagatacgtggaccgaagccagagttaataaggtacttacatttgtttcgtaattcgatgtatgcctcacagctcttgatcagatcttcgttgaatctgcttggaagattgtgcatatacacgtatcttccggcacaagtatctgttccaccttgtttagtttcacagtgatatttanggtttctttgtcggaaagagagagataggttgcaatttgactgatgtgaagcagaaagagcatggagaaacaaggtgtagtgagattcagtc

SEQ ID NO: 24472 - DNA, 1353 bp, Arabidopsis thaliana landsberg
tggtgggcgtaatgatctggggggttactttctactatttaacattgataaactaattttaaaactaactcagcaacatctaatatttgaatattatgtgagaaattatcgaggagactttttaataataacatattcaattaaattcagaattgtattaaaatttgagtaaagataatcatcaaatccaatatcttcaagtacaccttgttctatttcctttgacattaaaatagcttttatggataaactaataatacatagtgttaaaaaagtataatggaaataactacataatatctaaataacctatctaagtctttgcaaatttatcaaaatccaaattacacataaatccaatgcagatagattttgttgttgtcaaaggtattgtaaaaaggttgaaccttgatctcaaagattatttacaccttccgcatatacattataacagcggatcctggacagaagattacgggctttaggatgagaggaagagaaggctccgatgccgataggaccaactgagaaatgagtcaaatgaccctattcaatccaatgattatgttgactctttttagaagaaaataatctcatgaacatcatagagctaataagacatttaaactaccattaattcaaaaccactattaagctctcattatatataaagaaatagatgccggcctgaaggtgcaaaacttccttgatggaaaggaagatcagtcacggtccaagagatatcaacctaacgtgttccatacgctatattctacaacaaaaattgactcccaaactcaaaaggattgaaagataccttgacgtgaaagaaactcccatcaggtcgcgttttcttgattttccggtacaggatctaacctaggagaatgttctgttcctggagtcaatgcataagcagccactggataagtaaccatatgtggtcgcatctgccagactggtaaatagcagattattaatggttgctgctgctgctgcggcaaaagctcttgaaggattggccgtggctggtcttgaatctcaactatctctgtttccctatctaaaaatcctcccacatcattagcggcggaggtgttttcttgcggcaacatagaggaggatgttgtagatgccgcctcgtcctgtctccgattctcctctgctgtggttgcattgaccttgttgtgatggacaaattgtaccggaccattatttggcgcgaaaatcgggctggaaagaacggaagacaaagaggtaaatatcggcgactcgagacctagcaaccgattaacagtcacggactgtcgcgttaactcgacgtgatttaacgggaagaggaagagacggata

SEQ ID NO: 24473 - DNA, 973 bp, Arabidopsis thaliana landsberg
tcatctttttcttactcttagttgcggctgctgcttcttctcttgtttcttgagtaaaccttgcttgaggacgcctggaaataaaacccaaccaagaaacatgaatccacaatacaaattcgagactcatctatttcccatcctctaaatctaataaagacactgaaggttttcaataaccaagtatcaaaatcttcacaagcaaccaaaaggactatcattggtagttaatcatcaatacctaatctgtttcaacatgtgaatcaatcactggaaaacagatatagcaaaagaattctcacagaacagacatatcatacaaatttgtgacttttcaatagctacgtatcaagaccttcacaagctatcattgaactccatcatcaataaccaatctctgtttcaacatatgaatcaatcactgcacaagcagatataacaaaagaatcaccaatttaaagaaacatgaaccacactcaaaatctatactctctaaacctaagagacagtgatatttttcaagaactaagcatcaaatcttcacagttcaatcatcaatacccaatctctgtttcaacacagatatattaccttttcttattacgcttagcagcatcacgagtcctacgtttcttctcatcttgtttattctcaaagtatcttctcctcttacattcctgtataacaccagttctcatcacttctctcctaaatcgattcacaagcctctcctctgactcattatcttcaacaaacacttgcacattgtatccagaactgaagaagagcgtgttggagtaagcaagcgaggggcatatcacagaagcaagctcagaggaaagtgaagaagcggttgaagaagattcttcgaccgccattgattcgatagcgagatcatttcttcgcctttgggagattgttggagaaggaagagtgagatttggtggtggtgtaggttcggcttgagatttga

SEQ ID NO: 24474 - DNA, 1051 bp, Arabidopsis thaliana landsberg
ttttaaatgatcaaaaatggacgataacctttgaccaaagctttttttatacgtgaagatggataataggcgcaaaacaggtgaataattcatgtttttaaattgaaaaaaatacattgtgtactcaataagagcgcattcatgtacaatgatctcaagaagattggttagtcattttatagagttaagtgatcgcaacgatcattttttacaagtctactattcgtataagtagttataggaatatatgtagtgtacttagaaacatatagtatgcaaatatgtcgaagtggtttaacaaaaattatagaagtcgtaccctccaaagtatcgtaatcgaatatgcctataaatgaaatttgaggacgaaaagaatgaatattgcaaatgggtttggctctatattctatctgttcaaaagtatatctgaaaataaactaaaatgaaaattcgtagctaaaacgacatccctagctagttgtcttgcatgatctatccttggatatgggcttatggacatgttggtttgtttttaaggttaaccctaaattatttgcctcatatattatatagaatcataattatatatgtcttcaagtagttataatgtattgttttattatattgttcttcttaaatgacattgtttcttccgtcggatcggataacacaattatacatatgctcaatacatgtgggagcttcaatttttttgtaacaagttgttagatatgattgtgtgtgtgtgtgtctatatactcagtgaatcatgaatacgaccaaaaaacgacgaatcatgcaaaaagaaatcgttcatgaaaagggggggacaaaagtcgtataattcaaccaaataaaagtatattatcaaaattacaattattgacatttggtgattaatttccaacaaaatctactatttagctaatacgagaaatccatctagtaatattagttgactcataagcaatataattgccaaagtaagagtttcggttagtttttgtttaacgtaatattaaaatgagtaatgtagtcgataagggtacgt

SEQ ID NO: 24475 - DNA, 914 bp, Arabidopsis thaliana landsberg
  unsure (1)..(914): unsure at all n locations
aacgatcattatctgagaatgctcaacgttaacgtcctgagacgagccccatgctctgttggaatctttgtctattgcaagcccatcgttgaatctcatatggctaagtcccacagcaaggtgcttttcattttattttgaaaactaattaattatccgtttgggtacgtgaaaatacaaatttcagaattttataaaatctaaaagaatatttttgcaacgtctaaatgaaattaaatgctgaaagaaaatcttttcattttcctttaccatttatgatgaacaaaagaaatggtactaatatattnnnnnnnnnnnnnnnnnnnnnnnnnnnnnnnnnnnnnnatgtttgatttttaacggtggaaaagacgatagagaagctttggcgataacaaatcgaatgagactgacagaaaaacgaacaaggctaacgatcataagattcattccaaaatcttctgaaatggataacgatgagtgggagcaacagcaatcgattaacctaaaggagtccgtgactagcatcgttgggtccaacatcaaagaaaatgatgccaaggtgacatatatcgataaggcggtttctgatggatctgagacctcaagaatcttacgagcaatggcaaatgattatgacttgtttatcgttggaagcggcagcggaataggaactgaggctactagcggaattagtgaatggacagagttcaatgaattgggacctattggagatttattagcatcacatgaatatccttcaagtgcatcagtgttggttgttcaaaaacaagtgtacattcatcatacaaaaagccaaaggagaaaatctttctaagaaataatgcgagatatgttcaatgctcagcttttcaatgttgtatttctctacatcaataaacattggttttagg

SEQ ID NO: 24476 - DNA, 1976 bp, Arabidopsis thaliana landsberg
ctctctttctccaatttattcatagtgagaaaatattaactattaactatttaatatcacttcacacacggtccacaattatgcccaagttgagagtattatactgctgaagaagtataataattccacgttgaaaaagtgtgaatgtgaatcaccattaattttcgttagaccgccaacataattatttaaacaccgttaccatttatattttgtataaagctgagggatagtcgttgctcaatatcataacttaagccaacctagcaattataataaaagaaaattatgaacggcgaaggaaaggtggtttgcgtcaccggagcttccggatacatagcttcttggattgttaagcttttgctcctccgtggctacaccgtcaatgccaccgttcgagatccaagtttgaattccttcttctctctttcttttttcctcctgatttctccttagtaatatcgaagacaattcctctttgtcactcacttgaataatcaaagttatctagatgctttttagagatacaagtgacaattcagagaaaattaagaatattagctaagcaaatccaactatccaagagaaagtattttgtaggtacttggtacgattaagagttggttctatggccaaaaaagtatgtttttggtttcattctctaaaaggaaggatacattaacaaacgaaaattcaaatgaactcacatgtagtggatatagatggggtgaaactttggtcgatgtttaaagccaaaaactaaataagcatttatggttatctttggaaatgcactttgacatatatgtgtgttttcttccagaagatcgaaagaaaacagatcaccttctagcacttgacggcgcaaaagaaagactcaaattattcaaagcagatcttctagatgaaggttcttttgagctcgcaattgatggatgcgagactgtcttccacactgcttcaccggttgcaatcactgtcaagactgatcctcaggttcctcaatgatataaatttgttcggaacaacacaatcggtagtaatttactatgaaaatccacatctaaatataatagtttttgtactctggaatttgcaggttgagctgatcaatccagccgtcaatggtactattaacgtcctaagaacttgcactaaagtgtcttctgtcaagagggtcatcttaacatcgtccatggccgcagttcttgcgcctgagaccaagttgggaccaaacgatgtagtagacgaaagcttcttcactaatccaagttttgctgaggagagaaaggtctttgaattgtgttttgacatatcaatgagttcatgataactcacattttttctcacccattttattttttcctttccagcaatggtatgtactttctaagactttggccgaagatgcagcatggcgatttgccaaggacaatgagatcgacttgatcgtactgaatccgggacttgtgactggaccaatcttgcagccaactcttaatttctcggtagctgtgattgtggaacttatgaaaggcaagaatccttttaatactacacatcataggttcgtggacgtgagagatgttgctctagctcatgtaaaggcactcgagactccttcagccaatggcagatatatcattgatggtccggttgtgacaataaaagacattgaaaacgttttgcgcgaattctttcctgatttgtgtattgctgataggtgagagagttttctttttctttgatcatttatttataagtctttatcatgttttgactctacaaacctaacaaagaatttctcttgatctattattaggaatgaagacattactgagctgaattcagtgactttcaatgtgtgtctggataaagtgaaaagtttgggaataattgagttcactcctacagaaacaagccttagagacactgttcttagtctcaaggagaaatgtcttgggtgaacctcttta

SEQ ID NO: 24477 - DNA, 1046 bp, Arabidopsis thaliana landsberg
atgtcattcgtttctaagaaaaaaaaaagcaatttttcgttctttatgcacatacattaattgttgacgacatacatgaacttgagataatcaaatattttttcaaggatacattaacatatctttttagtctttttagcaacctgaacgtatcaatgaaaataaaaccatatttagaagtatttttggaatctctcaagatttttggtgaaaataaaacatatcaattgtttataacttttcatactcctttttttttgttactatattaaaacatgaaaggctattcaaatcaacgaaatttaaagtgtagttgattgaaacgcaaccttttaaggttggagtggttgaaacattaacttacatgaacgtaaaatcgaatatagttcattgacctgaggctgaaaatcgaataagagacaggaaagtgtcaactaatcgcatattaatttcccagatatcatccgttcaatcattatttaattattttagattttagtgataaactagttattgaaaaagtctcaaaccagtcacctttttaggaatgacattataaaccaagatatatatcgagcatcgtataaatggccagcctatattacctgtacaaaaattataaatataagacaactacataaaaaaatatattaaacgtaccgactatcttattcttgagattaagtgtgtattgacaggtggtggaacaaatatgagttttaattagtgtctctaattaatatataaactcatatttagttctatctcctgttgaagcacacattaatctaaataagattttcaatagcagtcacatagatatattatgtatatactacaaataaaggtacacgcctaaataaaattttgaaggataatgattttttttttttaagataaatgagaacttagtagtcattagcaacatatgtgactaatgaatagacataatgatcagtccactaatttattttattagtaataaataacagatgagaagcacctatactactatttaaagagtttgtgcaaaaaaaaaataaagg

SEQ ID NO: 24478 - DNA, 666 bp, Arabidopsis thaliana landsberg
gcaccaacggcgatcatttgttagtcgtaatttccatgttaacatggtattttattatgaatccgatgcaagttacgtggtcagggttctatcgatgattctctcaaccttcaaccaatcgaccaaactaccatcaacaatcgttcttgtagttggtgttacggtaaaggcggcttcttttaagcttcctccattctaatcaacatacatatatgggtgaggtctattgtttttttattccttcaaacttgatgcaatcgatttaatatcgccatcatcggcccaagcacttttcggcagttgcaattccctctataatttggtttcgtcttgtcattcttatgtagctcaagatctttcattttcgaagtctccaaaaaataagtgaagactataaaaccgaaagtttagatgatgtccgttttcggagatgcatgaaatagcttctgattttacaaaaaattggttaactgaagaagaaagaagcaagtgataataattgtagttttgatgtcatttgtaacctgattatttggataatcattttctgttgattagttttgattatttgtcatctcgagcaataccggctttgtgtaatttctggtttcagttctaccatttaataaaaaggtcgtccactttttaaactctcatactataggg

SEQ ID NO: 24479 - DNA, 1072 bp, Arabidopsis thaliana landsberg
agattgatcccttagccatatagatataggactgagatgtagataggaagaatatgatcataatacatcttacggttaagtacatatctatagtggtagactggtagtgtttcctaatctagatgaacacaactctctatgatagaaataacatatattttcgatatcttctagatccttctataaagttatcactacgaaacctagaattatcaaagatcgtattcattatataccatgagaaactatattcaacaagtcgtactgtactcacctcacaattaaagcattgtcaaatttagaattaatgttctagcaattgtaaaagacacatgaaaaaccccacgccattcacgggactctccctaatttattacaaaataaagaacaagaagatacatgaatattacaaagcattaaaacaaaagattacaaacttaggaaagacggttagacggatgataacttatcattgattaggggaggcagagtatgagtagagaccatggcggagtagagccggaggaggtggagaagattgccttaagaagattgtgacggcgtcagccaccaccaccaagaactccattgttatcttcgtaatctctatgcatagctcgattttctttatcaccatcctctctttctttctctttctctattttgttttgcttcttttttttttctttcgtctctaccgtcaaattcttactccatcttcttcggtatttatataaagtcaaacatgcatgccatgtgaatattctatctataacttgaaagaaaaactattgtataacgtgttttgacttttttttgaataaagtattctaaattaaaaagttgaaaatttaaaataattggctgactgttactgggggtttacaggttttaattattcgcaactataagaaaatcttattatatttcatgaattttcggaattaccaaaaaatatattcattcttccaattgcatttccttaattattttccattttttggggttaatgaatcctgaccacaagaaaatactatttgatttggtttttttggccttaaggcaacgtccc

SEQ ID NO: 24480 - DNA, 670 bp, Arabidopsis thaliana landsberg
aggagggggggggacgctctgttggttcggtgttgagctaaatcttgaaaggacaacaaaaaagcattttgacatatcatgagaagaaagtaacccccaggaccatattaaaatagcccgtaatagttgcaatcaaagaatttcacttgcacatacgatatgtgtccattaggattgatcgatgtctatacgaccaaaaccgaagtgtacaaaccttttttttatctgatcttattgcctcatatatggaagaaaaaggtaacaccaatttacaaaaaggcaacaaataagaaggaaaaaaaaagtggtgtgaaatcgggaaatgatcgaagaaagagaaataaaaaaacacatactaaccaaaaaataataataatcataaagaaagaaagaggaaagggtcaagagagcatatattctcttctccaacagaaccccactcatgtttccagatatggagtgaaagaagaagaaaagaaaaagaaagaaaaaaaacatcaaccactccaaagatttatatatatatctattaatctccatatctttgccaacaaacccaacaatctttgaaaacaaatcaccctttcgtttttatttaaatttcttgggtcgtttcttaaatttgtatgtgtttattaatggagatcaacaataatgccaacaatactaa

SEQ ID NO: 24481 - DNA, 1053 bp, Arabidopsis thaliana landsberg
atagacatggtttaaaaaaatataatgatcgttaattggtatatacactacaaaatttaagactaatgagaataataatgggtaaactaacgttaaaatttaccaaagttgatataactggaacaattatttgtcttctattttgcaccaatgataggaaacaagagatggcctagaaatttgtaggaagaaattatgtatatggaagtagaacaccaaaaaaaaaaaaaaaagtagtggaactcaatctgaatactattgtggtatttttaaagaattttttgtaaacaagtaaagtcataactttggtcatatacgtgattggattacaattttataaaggaaaaatacttaaaatgtactctggatagtatccttgatgaactaccacacgaatagtacctgcaaatgacaagtgaagcaaataagaaaccctaatttctgaaataaacgtttctaaaagcaaaaggaatatgaataaccggaaccatcgacagagtgattggccggcggtacaattggaacccatatgtcggcaaacgggatgacacgtggcggaatgagaatggaataattttggtggaaatcgaggaaagaaggaagaatgataagtggtcgcagccccctgattaggttttgcttggcatgtgctgtctcactcacagtcagtgtttcaatttgaatactttcacttttttactctcttttctttttttaaattcatagccaaatctatctatttccaaatgatctctgacaaaaaacaaaattatagagccaagttttatgttactctagtttgcttgtacatagtcctaatcttatatcctcaaatacgaagagaaactacattctaaaatagtatctaataagctagtttttcaattgtatatcattcgtaccaaaagaaaaaaaaaaaactgtttttgtatagtacagttttagttttcattttatgttagccttgcatgcttattttaacatgtagtcctctctcatactggttgatagatttatactataacagtaaactagaaagagacgtgtataaaa

SEQ ID NO: 24482 - DNA, 836 bp, Arabidopsis thaliana landsberg
tttttacgatatggtgattgtcaattatatgatgatgttaattgtaatactaaaaaaagttttaaatgacgacaacaacaacaacaacaacaaaacaacaaagagtaaaaaaaggacgctttaaatccgcaggtgactttgaaaaagaaagtaacaatgatgaggtcttcttcgaagcgcaaccttaaacttttcttgtaatggcattgtgaacacaaattcatttttattgaacttaaaagacagatatcatgatgatttagattacttggcttcacgagttttaaacaattttggacccacccactatatcgttcaatggactatggcttagcctaaactattatacctaaaacagtgtactaattcttttacactttaaggtttaatgcaaaaagtgtttataagtaatgtgcaatttcaaactattagagccatccttagattgcggtgctttacttaaatcctagtactatttaatctgaatttgtgttaatcttcggaatagaatccagttaaccaatttgtctctaaaaatgtataagtattaaacatcctattttgtcaagcgacatcgattgtttcttaaagctcaagatgtagtaattatcatacggtatggtaagtaatcataacacacatacacacacattcaaacatctatatatttaatagattaataaaatattcaaacaaactaagacctaatttagaaacatatttataaatgcgaatggtattgatttttttaattaaatctactttttctatatcatttggttttcgtttacagagacatcatttggactttggagacttggagtttacattgaaac

SEQ ID NO: 24483 - DNA, 1089 bp, Arabidopsis thaliana landsberg
ggttaaaatctagtttttaatgcaattttgcaagtattttgtcaatttaacagtatagtgttaataaaatatatgatttttttgttttgttttgattttaaaaagtataaataaaaaaatattagaaaagtaaatgagttagtattttatgttttatgtgtttccacgattatgtaatttacatattaccaatttaccaatcgaattttttgaagggcaagcaaaatatatgtgacaaatttcatttcatcgactatacgttatacataattaggccttttattgactaactaggcttgcttaaaggtccattaagattatgcatgtttaaccatttaaggcttaaaatacaatgttactgtcaatggtagtcttctaagtttggagagatttcttttccttgggtttgttcgttgttgatgaatatgatagcggtctcgatccatcttcattctcattcttgagattggtgatatttatgctctttgtgactttgtccctgttttcaattttcatgatctatttagatttgatcgcgttttgaaatgttttggagtttttttcatgaatttcatgactttgtccatcgtcacattcagaaatgttttcgagttttttttgtggttttgcttgccatattatgaatttttttttcctatggtttcgaaagattagctaacatcgtgatagaagatggttgatgttaacttcggattggccgtgggtatctttggtaaatctcacctacatatgcttgagaagaagagatttctttgctttctttgagtctagagggtatgaatgtatgatgatgaagtctggtttcttttgttcttagtttaaggttttgtagttcgatttaaaagtttatgcttcgtattaatttatagtgtcttaatttgcatcccttccatagaatctagattccaagaaaatcacttttcttccggctgtgtttttggaatttttttttttgtccacgatttaaattttttttatttggacgttataatttttcgtggttccacgacaaatttctttattaaaaatttccgatgaccaaacaaaaagaagggattcgaggatcat

SEQ ID NO: 24484 - DNA, 549 bp, Arabidopsis thaliana landsberg
  unsure (1)..(549): unsure at all n locations
cctacaaaatcgccatttccaaaaacaccaaatcagcacattttcaacctacagaatcagaaatttcaagagagaggtgtgtggatgaaccagagagatagccgacggtgacggagatgccggtgatagtagagaaacggaggtaatcgagagnnnnnnnnnnnnnnnnnnnnntagtaaaagcaggattccgatcaaccactgggtattgtggcttctccaaggcagtgatgtcagtattcatcttcgatcgataaaatctacaaatctctgattctatcttctttcttcttcttccgatcaaaatcaatttctaggttatattcatttcaacagaagctgagatcctctctttcgtctagaggcttttttctttgacccataaactttcttggttgggctttctcataacagacccgaatgagcccatttaagtcaatcaagctccaaatgatcgaaaattgcagatctaacaacatgcacgatataagattgaatagtactcgagtttattctcttaaaatctatctatgattgagtgtcgacatt

SEQ ID NO: 24485 - DNA, 1280 bp, Arabidopsis thaliana landsberg
ctctttctgtgcgtttgtaagcaaacttaagtgtctgtcataatttttcaaggtgtgtcctcaaacaacttttttgtgtgttgtaattttctattttatgattttgtaataaacgtctttggtggtatttgaatattgactcaaaatgtattcaaaaacttatttatgggattaactcctcatcgtacggtctgtgttgtaatcaagaatttgatatgttttttgtgttttttttttcgtgttttttttttcatttgaggacttttatgaaaacccttcattcacgttgtagcaaatctttcttacgaagttaatttctaagtttataagaaaagtcaatagaaattttgcttccccacagaggccgaatatctccaaacactctttcttcttcgacatgttacacatgatgttgaaatggacataaagcccgctggcctgaaaggatacggtcttatttttgtggacccgaacccgtttaaagacactatataatgggttgacccgtttagatttgactactaataatgggtctgagaaaactaaaaggtagcccgtttagacctaattactaatgtgtctgaataagatgctaaaagtctttgctttcactattctagtaatttctttcggaaattccagaaatttgattcgaaatgatttgtggatttatttgaatgaaatccacaattttctgagtatttcgaaagagtcaagacaaaaatttcccctcttaatcatgtgaggaaatgaagcatatcttgttctttgtttcttgatttactttctggtagtaatggataactagagagattcagtggaatggccaaaatctcataagtagaatttcattggttttgcattgaatattagatggctttatggctctgaaaaagcagctcttgccggccagtttagcatgtttttcaacagacaaatacttaataattataccttgataatgtataaacaatctttttttttatgttgtgtttattgtttgccttgggatccaagtgaacaaagaaagcaagtcaaggtttatactccatttcactagaaattttagttatttgcaataatcaaacccactgtttctgttatcaacatagcaatctttcatgtcctcatttcccatatttttttgtttattaaaatatatatgtatccatactcaaattattccatctatatcgtagtgacactgcaattataatgaataaggtgtcattttagaatagtgcaagactattgttgggagaattaatttgtatgggaat

SEQ ID NO: 24486 - DNA, 651 bp, Arabidopsis thaliana landsberg
gtttagaaaagtttttaaaaaaaacgtataaataatgttaggtcaaccaatcagaattttcaccgattttgcttcttgctataaagaattctttgtacatcagatttttgttgtgggagcaaatttgaaatacacattcgtttggcttaagaagagcttcaaaatgtgattcttatgatcccatgcaatatattttatatatagactatattggatcaaaagaatcagaagattcaaacgtagcagcgtcaataatctcttttaaatccgtctttgtggccaaatcatgtgaaaaaatcctaattatgtgaagaagttgagattaatgaatcaaccaatacgaaacagagaagaattcttgaagatgatgggtcgcaaaatacgacacagatgtcaaggcccacagggcccatactataacagcccagcccacctaaaacttgaataaaacgtcttttgtttgtttctcctcttggctcttgctatataaaccctagcaagtcgatgagctcttttctactcaatttcaccatggacaaggaatgcccgacatccagagatgtataatcttcttctttcttatgaatttattattcgttcttcttcttttactatctattaacgttggtgttgcttcggattttagggtct

SEQ ID NO: 24487 - DNA, 510 bp, Arabidopsis thaliana landsberg
tcgactctagaggattctagaggaccccgataaaaggtcgacgccgaccctcctccgccaaaaggcccaaaacctgtccctccgccgttaaatccagtaccaccacctgtccctccgcctcccacaccagtcccaccaccgcctaatcctcctgctcctcctccaccactgccaccagcacccaatcctcctccgcctcccacaccagtcccaccactgcctaatcctcctgctcctcctccaccactgccaccagcacccaatcctcctccgccaaaacctgtccctccgcctcccacaccagtccctacaccgccacatcctgtgccgccacctccaattcctccaccttcacctcctacctctgaatcgtcttcttcactataagtgttccctgtaatattgacattcttaaatgaagcaacccaaagcctgcagtacaagtaacatacatgcgtgtgtattaaatgaacaacagacctggaaaggaaactaagaggaagaaaaaag

SEQ ID NO: 24488 - DNA, 754 bp, Arabidopsis thaliana landsberg
ctaacatattctttatgtgttacaagttggaactatagttcctattaaacttctcttgatgctactccaaagattatcatctagcatgagttctaacgtaaaagacacgcaaatagtggttatacacatatatatatatatatatatactctatgcttttcatatgaatacacatcatatattatacaactacaatatatattcatgcttttaaaaaataattcagacaaatccaagaaacctaaaaattaaatttaacaagaaaatacaccaaattaactttttgaagagtgtgaggaaaaaaatcaaattaaaccaaaattaatcaatttgactctgaatcaacaaaatttaaaacaaaatcaaccattatatatacaaaattcttattatatacagattttgtgatcaatccagttctacaaatttcaggtttggttcgtttttggtttcacagataattgctagtactattgacttttgagcctgtctatgttttggtgttcctagtcaaaatgactggaagccgtcgatgtctggggtactgtacacgtggaggttatccaaaagcccatctcccacctagctaaaaatgcggttgtcgccatcaaacgacgatttaccttaagtcccaccttgatatgttcaaacgcgcgtttgcgttttcccttcgtgtgccgcttctcatctctccatttgtttgcgtccttttcacagtttcaaatctaacatatcccattttgtgtttcaactt

SEQ ID NO: 24489 - DNA, 1692 bp, Arabidopsis thaliana landsberg
tcggattattctcaattttttttttttttgaaaaccctgcagtgcatcttacaacaatataccaaccctaattccaatggaggaaattagctgccttgaaccacatcagagcacaaagaggcttatccaggttcggtttcatcaccacctgcttcccatgaggttaaccttacattacaatgaaaagaaagttcctgtcaagttacgacctgatcttggataccttgtgaaaccattttcaatgagcatcgaggaattcttagctacagaatctcgattacctggaatgtttgagtatagtcgaaggttagctgctttctctacttaaacttgaggttgatgcataagaaactttgacttttactttctgcacaaaaggttttcagaaagatcatgttcacttcacttactgatttcctaacctgggtggttctcttcacttttggtaggtgtacttttgacgatcatgttaaagattcaagaacggagaatgggaaagacaaatttcttagcatctgcgagagtataacactaaaggtgcttagcaactcaaatctacaccttgtatctgtggatttaccagttgcaaactcactcgaagatgcaactggtctgcgattaagattcagcagcaaaatcttgagcagtgagatccctcttttgattaccatcacagtcgaaggcaaatgcaccgaagttctgaatttaacagtcaagatcaattgcgaagaaacggtttttggtttaaacctgttgaacaggatagctaatttcatggttgagccgtcttcttcagccacttgatcatcaaaactgaggatcttttttttgtcaccttgtgaaaatgttaccaatccttttttttataacattattttgatacatttattaaaatataaattataaaaacaatgagatttcacacacatgcttttactaaatcaaggagattcccaccacccaccagatcatgatacattttaatttaaataattttttgtacttatgaatatcttaatgatgttgacactaaagatagaagaagaagataaaatcagcagttttaagaaaccaaactaatcaacttggctatgcttccatcctccaaactgttctccatccattcccctgtcttgctgaaaattcccaacaaaaagtaaagagtttacttcaatcagagagtaaataaattttagttaaaaaaaagaaagtaaaaagtaaaaagaaactaaccaaaagagagtaagaaactccaatgagaagctcgccaacaaaggagagatcggagtcaacaatgttgtacttggttggccttagctccgccgttcccttctccactcccatttccaatagctctttcacatgtaccctatttattcatttccattaatcaagattagtccatatcctttttttcttttcgatttcagttatgtatagtttagggctatcatgttatgtgatatacgtacgtggcttcgccaatgaaatcgtcagaggagaaagtatcatgatccatgactttgacgatgagtttgtagtcggcgccggagccaggaaactctgctctccatttcaatttatcattccatgtcggatttctacctccatcttcttcatttaagtaaacaaaaaagatgaaaatttgatcaacgatgtttgtacatgaaatatgattatgagaaaagaaca

SEQ ID NO: 24490 - DNA, 1047 bp, Arabidopsis thaliana landsberg
attcctcctaataaaagtgacaaaaaatgttcctctttaagagaataaactttaaactgattgatattagagatcccttgatatattaattgtcttaaattcaatgttcatcttgattaattctatgtatgtactactcatatatataccaaatgttaactgcatgatttatatcattgataagtttttctatcttataactgaaatgaaatattttaattttaaagaataaagaaatgggggttcatgcattacaaaagaattagaatcttatcggtaaattaaatatagaattcttaggagctttatcaaaaactaccaaataaaatgtgcctaaacattcactgccaataactttttgacatggagattttgactagtccaagcaaaactcattcatatatgagaccttttctcgatgctatataagtgaggaaaatattaaaagaatcccagtttcaaagttgtatttttggctaaaaccattattttgtagtcttcgaggtcttgtcgtccttcatttgcacttcctcgtttttattatcgttcgtatttcgtatctatcatgtatgcattaggatcttatgtttgtatgagtattaaattctgaaataagtttttgattgtgtccgtgacatttcaattaagcataaacccttattactagccaaattggaagttggttggaaattagaaaattaattttctgataagagtaatgtaaactgaaaaaatacttttgagcattttcctcctactttttatgaaaaatgtataaaactattccgtgtattatcattttttctctaaagaactcccaaatattggttaatgtatagctgtgatcattagagtttgaacaccttgttggagagtgatctaaactgatctaccaagatcaatcatattaaactgattgagactaaccaaaattacaaacttatactgcaaagccatagtaaaaaatcttagataagggggaatatatattatttatattattataggggaggaatttagctttataggatgtatattatttatact

SEQ ID NO: 24491 - DNA, 633 bp, Arabidopsis thaliana landsberg
aaatttatttgggattttggggtaaaggtcaccaaaaaggtgtaatatttaaatttcgccgggtcatattttttataaattccgaaccagaatcagtaaattgtaactgaattttgtatttgatatagagtgttcaacatgttgatagatatattatgcttacaaatttttattgaagttaatttacgctgttgtttactaaatgggcaaagtgtgtttgggccaataatgcaatttgtatatttttaatgagggtcaccgaataatgagttaggcccaataatgcaacgtttatttttttaaattatgagtgtcacaaaataatgagttaggctttaggcaggccttgaaagaaatatttgtttcattacaatttttttttaattgtagaaacaaaaaataatgaatcagaaattgttgtcggcaaatggctcatcatctcctccatgcggaaataaaatccatcgtcttcttcgtccgatcactattctccattgataatttctttttcagtagcatcgattaaatgcaaatctatcgtcttcgtcgtttctgaaaatgttttatgtatcatcttcttcgtgtcactgcaaatcgtcatgaataattttgtatttgaacggtccagaggaa

SEQ ID NO: 24492 - DNA, 1729 bp, Arabidopsis thaliana landsberg
agtgctcctcttttggtaacccctcttttcttctccttcaatcattctagtttcattctagttttgttgatgtgcacttgtttccgtcggatctaccacctaaatgttgtttgctcagctacgtattttgcatcttgttaagttgtttggatccaatgttgaagtcaacaaagtttcggcatttgaatttttcttatttggtatccatgaatatgtatcagttgagttacaattgtatcatagtatgaagcttcgagctcagatttcatggcaaaatggcattttgttcaactatcaagttaaggttttgagaattccattgttgtgtttgtgtgaactaaaaattacagatttgtatcagtattactagatcagaaccaaatactgatgagatgaatcttagagttgttcctttttcacttttatagttcgtatgcttagctttgcaacccaaatcccttgttatactcatgtgatgatgagctgaaactttcttgccttttttcctgtttgctcagattgtttcgggaggcggctaggaccacgtcttcttggtaggatagatgattcagaggtgagtgattgcttcttttcaggtgtttgaattatgatctaaaactctctgtatcagtatgtttaagtccggatttcttttcttttcacacgttctgttgcagcagagactagttagagatttttacaaaattctaaatgaagtaagcactcaagaaattccagatggtttaaagcttccagagtcttttagtcaactggtttcggatatgaagaataaccactatgatgcaaaaacatttgctcttgtgctgcgagccatggtacgctttgtctaatctgaaattatttctgatcctacatattatatacttgcatcaaaaggacatttgtttttgtttagttagaaaatattttgcatctatctgtggctcttgcaattgtcaagttggtttcttttcttttttatttgcatttggaagagatctttgttaattcttgttgctctctaaagtgagccatatcaatgggaagattatcatatgtgatatatctctatcttgtcttcaacagatggagaagtttgaacgtgatatgagggaatcgaaatttgcagaacttatgaacaagcactttgcagcaagttccattcccaaaggcattcattgtctctctctaagactgacagatgaatattcctccaatgctcatgctcgaagacagcttccttcaccagagtttctccctgttctttcagataatgcttaccaccactttattttgtccacggacaatattttggctgcctcagttgtggtctcatccgctgttcagtcatcttcaaaacccgagaaaattgtctttcacatcattacagacaagaaaacctatgcgggtatgcattcatggtttgcgcttaattctgttgcaccagcaattgttgaggttaaaggtgttcatcagtttgactggttgacgagagagaatgttccggttttggaagctgtggaaagccataatggtgtcagggactattatcatgggaatcatgtcgctggggcaaacctcaccgaaacaactcctcgaacatttgcttcaaaattgcagtctagaagtccaaaatacatatctttgctcaaccaatctagaatatatataccagaggtaaatctttatccccctagttgaaccttgcatagaactcatggggattcta

SEQ ID NO: 24493 - DNA, 1104 bp, Arabidopsis thaliana landsberg
ttttacatgaactgtttcctgatttgtgccgtgttgataagtaagttatttgtttcccttcatcttttatttatacttgaatccataaactaatcaacacttttgttgatattctattgtagggataatgagaatgaggtgggtgaaatggcatacaaagtgtgtgtcgataaattgaaaagtttgggaattgagttcactcctatcaaagaatctctcaaggatactgttgttagccttaaggagaggagtcttcttatatgatctttgacatggactccttgtcatatctttatttttcttgagatttttaatattaaatatgatgtctattgtctaagctttcacttaatgaaatatttgattataatcttctaatattaatactaccaaagactgtttaatttaaatctgagagagtggtaaaactgcatccttctctaagaacactgtctaaaacgaaaatggtaaaattgtttttattatttttttattttttttttggtaaaatgtgaagatgcatgtattaatttgaccttcaagaacctagatttcaaggcacaccattttaatttagcttatcaaactagcatactgatatcaaaaacagtctaatatagtaaaaagcaacctataacatatcctggtaacgttaccagttaataccactgttagtaccaaattttacccaatagacaaagaatcctccatatgaaaggcaaatcttacctaactcgatcttcctactcttaaaaattcacaatgtttcttccaggttccagctactaagtagcccaatgacattctacaaacttcatcgaccttgtaagttgaaaccattttagcaagaagtagttttagatcaactaacacatacacatctataccttagatttaactttcagggtacggaaggaactaactagtgacaagtgacaacatctaatcacataatcgtcaagagatagctctcttgccgaccctaaacagaacaactcgatacataatatatcatcctacacaatcactgcattcttctctaacggtaatacagcaaacacacagtttacataaactatcacatgccatctatattagttatgt

SEQ ID NO: 24494 - DNA, 864 bp, Arabidopsis thaliana landsberg
ttaattgtgatttatgttcataactcacttgagggttattttctcttacctttttaaaggatatgtgctttatcttcatatattgcatatggtgctagactatcaacgatgttctactcggaattacacaagccgctctttctagctatttgaaccgacgatatggtaaacattaaactcaatatattttatatatgatgtattattaagatcctaaccagaagtggattctaatatataaaaagaaaagaataagcttatatgatcaatctatatctaattaatatgtttcacacgcgtatcttattcttgaagaacacgaaaagaataatgaggacgatggagtattgacttcatatacaaacaatcttccagatcgaatacgatttcgtgcaggttgtacagtaaacctaaggtcagacatcgggttcaaggttagaaacatactcctcaaattatataatgtgaactctgtcttatcaacaaacaatatttatgtaacatattatttctttctgtataaatcaagcctttggcagaaatgatggtcaaggattcaaaatgcagatggggaaactactttagctatattattttaccattatcgattggtttagaaactgatccattggtttatctaaacaaatccaaatccatgatggctcgaaagaagcactcttatcaagcagctataacgtattttcttatcaacatcgctctaaaagagattggcgccaaggtaaagaaattgacatttgactgcaaatttatggacaacattatactaacacactctttaattctgagatacatgggctgcagcagaatcatttgatcgaccggtgaggaacacaacgacatgtg

SEQ ID NO: 24495 - DNA, 660 bp, Arabidopsis thaliana landsberg
gatgaaggttcctgtgaatataatctacggaagttataaaagtggacctgatgattcaggtaaaggtcacgatgcacctttaccaccaatgataccgatgaatataaattacggaggttataaaagtggatctgatgattcaggtaaaggtcacgatacacctttaccaccaaaggtaccgatgaatataatctacggaggttataaaagtggacctgatgattcaggtaaaggtcacgatgcacctttaccaccaaaggtaccgatgaatataatctacggagattataaaagtgcaccatcaccaccaaaggtatcgatgaatataatctatggaagttataaaagtggtcatgatgattcaggaagaggtaaaagtgcaccatcaccaccaaaagtatcgatgaatataatctatggaagttataaaagtggtcatgatgattcaggaagaggtcacaatgcaccatcaccaccccaactacccgttaatataatctacggaggttataaaagtggacctgatgatggaggaggaggtgacggggcaccatcacctcctctttagtaaaagatatgttgagtccatattccttatatggcatatgtaatgggtgtgaaagatatatagacaataataaatataaatattaaaaaaag

SEQ ID NO: 24496 - DNA, 948 bp, Arabidopsis thaliana landsberg
gtttagagggacaaaatcagaattatgcgtctgtacacgtaggtgtgactgttgagttacacggtagtagtcgcaatggattgggacagagaggtaacccttccgtgttaaatgcagctgtaccaggctcagtgtccatatatatcttctgtagtcacaatgtgtgagcataaaaggtaattatgtatttctgaccagaatcttagctttgttgctgaccgataaggcactgccggaaattcccttattcattgtatggaattacataagtgtcatgtgttatataaattggtccctttgtatgtttgtagggccatcgctaccaatccccaatggaagattcgcagccgtgtacatcgcgtaccctagatcatgccgataactcctcagcaagcattcctcttaaactcatcttcgaaatactatcgaggcttccgacgaaatctatcatcagattccgatccgtgtcgatgctgtgacgctctatcatcgatagtaaagatttcgtcgacgcctttctgaatcctcttttttcaatgaagactctttttttagtccgcttgatggaataatacttatgttctaacgtaatgaatctctatatctatttgtatttttcagttacacttttgtttggacgttttgttttcaaagaacttctcaagttttcttttccttttttcttcttgtagtttgccttgctcgttggtgaatacactacattaattgagggcacttgcgattatgatgttccccgcgtgaaagagcattgacctctcttttattcaaaacatcacataacagagagtctgtgatgtttgggacatcgcattctcaaatctcaatataagtggttttggtcgagtgctagaaaagggtgacttgtatgttgtgtcgcaacaaatgttcgcacatacagtttatgatctaacgtatctataacatatt

SEQ ID NO: 24497 - DNA, 1197 bp, Arabidopsis thaliana landsberg
tattggcaaataaaataacaacatatctattttaaaatatgtaaaacattttctggaaaaaatgtattacattctattatttatttattttatttttttgaaccaaaacataacattctattaatggaaactaatttatgtaaaataacatgttattctacattccatttataacattttatgactcggaacatttttacacaacattcagaatcggcccattgccattattaactcacgaatcttttgataatatgatagcagaaacagaatattcatttaaattcgcatgtgctcctaataatgcagttcacgatactccagcgaacccaccttaactgtgccgagtgggcagcggcagaaaaagtgccaacagttgaagagtatttggaggttgggggcgtagcggtcacaatgtatgcaactatagcattgggacttctcgggttaggaccgaaggctagggaacacggatatgagtggctaaaatccagaccaaaactcgtccaatctttatgtactaaaggtcgtcttatgaatgatatagccggttttgaggtacaaatgtgcaaatcatttcttcacatttcgtgtatgtctactttcttgttccatcttaccaacttattacacatatgttgattaggatgacatgagtagaggatatgtcgtgaatgctgtcaattgttatatgaagcaatacggagttactgaaaaggaagcttttaaggagattcgtaaaatggttgtaaatacacataagacattaaatgaggagttcttgacaaccacttgcgtgccacattatgttcttaaggaaaccatggattttgcacgcatgatcatcgtcaccctacaatgggatatgaaggatttacccgtcctgatgaaggaataatcaaggagtatatgacttcgttattcgtcgatcagatcgatctttgaagtctttgaagatgttgtagtgtttgattcaggattgaggcatttgttttctttctagtttctcttacaacttcctatatatgcttggtttctactgtctacaattagattgtgtgtcttttgaattagcgaaaagctttgtgtgtgtgtgtgtgtgttgttataaatgatgttggttgatgtcaaaaaataagttaaatgcttgctacataagccggagcccttagttccatttcgtttcaaatggataaa

SEQ ID NO: 24498 - DNA, 920 bp, Arabidopsis thaliana landsberg
  unsure (1)..(920): unsure at all n locations
tctcactcacgatctcttccacatgcattgaatgaacctgagatcgatatgagcactttggtacgacaccacctgtggattggtcacaatcgtgctctcataagtctataccagagctgcaaggacgaaagctggatcgaaatagccaagcatttgaaggannnnnnnnnnnnnnnnnnaagttcacagcatgtagattctgtggagaaaatcatatcagttgtgttcaagtcacttccatcaaatttcaaccaatttatcaaatggatggctgagattcgaagaacagaggatgtaaatcaaaatctcagctcagaagagaaatcaaggctcaaattaaaggtattatcttgtccatttgcttctgaactttagttttccatgtttatattccatcagtttattcatcactgttctatggttcgttttgctgtagcaagagttactgaaacaagtgcaagaaactaaactgttcaagcatgtggataagtttctctcctctgtgtacgaagacaatctgccatatgttgctgctaaggtttattgtgacggagatgaaatcttatcgggatatgaatcagatgaatcctgttgtaaggaaacttgtgtcaaatgtatcaaaggtatgtttgttcttacattctggttatctttctaagcgcttcagaaaccttggcttgaagttagtagtgtgcaaagttctaatcaagaaatcacttttttctttgaatttcttgttttacatcaaggtcttggtgaggagaaagtgacagtggtagcttacccatccgggaacgatgtgttcactgctcttctgttggctttacctccacagacgtggtcaggtatcaaagaccagtcacttttgcaagaaatgaaacagctcatttccatggttagccacccgactttgcttcaac

SEQ ID NO: 24499 - DNA, 1419 bp, Arabidopsis thaliana landsberg
cgtttaaaccatctaaattattacttttctgtgtagcgcctgatgatctatagttaaaattttgacagaaatataggtcacgattgtttctttgcatttgcgtttatatttccatgtgacaaatgactaggacatttttaacatggtaacataatttgcaaacgtgacatgtacatgcaaataaactaatcatgattttaatctgaatattagagtctttgaccaaatttctattttatttgttttagtgtgaattttgggtttagggttttgattagtgttttgtatactcttggctaacaaataaagacttaagtctaataattgatggaaattaattggaaatatagatggcatctggagctgccgggcatattagagggatcgattcttataatgtcaaaagcaggaacaggaacggccatgttcaatatgggtacgtttatttatgtccatgcaagtatctttctatacgtaaagattacgtatcagtattgagataacagtgaatacatgcatatatacgcaggaatattcatggcacttcaagaaaagttgatagtatgtggaacaagcttgactgtgatgggaatggtattgaagtttattgccggaccggcggccatggccatcggctctattgtccttggcctccacggtgatgtcctccgcgtagccatcattcaggtcataaattctactttatccttttgtaccctaattctactgaagtttgtatataaaaaaaagtagatcattttccattcattcatccactaagatactaactttatatttttcagtttaatatatcattaatatttatatgaaatttacaggctgctttgccacaatcgattacttcgttcatttttgctaaggaatatggattacatgcagatgttctaagcacagcgtaagtccgaattttaaaaattcagtctatttaagaagaaaatggtaatatgaaattaaattaaaattttgataaaggtggggggaaattgggagatgtgggccccccaaccggggcccgtggcctactaggcagctctggagttaatccatggattaacctaggaaatccagattttaccaccaatattccccttggtccaccttccccaagttttttttttttgttatctcttttacactttcctcctaaaggagattttgaagtatattcgagatatgaaaaccattaactgaatgaattaacctagtgtatgcttaattttatactttcttaagctctctttattttcgtagtatgcataatttagtattttgttcacatatacgtatcaagaaaagataaaaactctataaatgaaaatacatcatgttcggatctaaaattgttttaatacgtacactaaatattataagcccttttttgttaacaaaaaaaaaata

SEQ ID NO: 24500 - DNA, 129 bp, Arabidopsis thaliana landsberg
agcctccggtagcacagccgagacagcaacgggttctccgcccctgcggggatggagtgacagaagttttgagaattcaagagaaggtctcggcgagacgagccgtttatcattacgataggtgtgcaa

SEQ ID NO: 24501 - DNA, 1819 bp, Arabidopsis thaliana landsberg
gtataccagcgtcaacgatgaaggatctcatgcaaatccaacggctatccatagatctgaggataggactcaattgtgcctcaacatctcctctatagtcgtgattccccaatactgaatatatagaatggacagtgacatatctattagtctctttttgttttagcattaattacttttgaatgaattaatgattggagacattattaccaaggtaccaaggcttttgcaggctaggagaagtgtagatattactaaaggagagttgaaaggcgggatcatcgatacttttcatcccgttatcgtagatgttatcacccgtcgataccacaaaattgatatccatctcctccccgattctccccatctatgtttccatctaaacgatcttaaaatactacaacacatatgggtatatagtatgtaaattagtacctggagggcaacttgggattggttgtagagtacatgcctaccccaatctccaatcaccagaaaactgatagagccatcgagatctggagcatgttggaccgttgcgagctcagcctcaagttttggagccaaagataataataagaagcaaagaagcagagtcattactatgcttaaggagccgatatcaaacttagaactcattctgttcttttgcacaacgagctttatgtgataaaaagcaacatatatatgaataagtcgactgtgcatgtgagtgctagtgggtttctcgcttgtaagtcacatttggataatagcgtgcgtccacatggtggaccaaacatgattattataactggatcctaaattagctatctatatatgactgtttttgttcatatattatcaatatttcttcttttcgtaaagggcttagtttatctacattgctttcctcctattttaaactaaaaataaatattaagaaagtgtacattttctagttttttatcacgcactcacactcacactcacaaaggctcataattccaactcaataatactcttgtcatcattaataccaaatcctggctaatagtattaggccatatataatctttgtttagtgcgtatatatatatatattcaccgtcaaacaaatactttattgaattgcatcttttttttggtttaattgttttgctttttcaacactttagtatatatattacatgttatatgtatccacctgaatcatacatacaagacaaaaacgactatgaattattgggaagcctgtgattgattttttaaatgcaagaagtgtgttttaaattcgaatggtgagtatgtagatatatgttgtggaatcaaaatgaacttttttttatccaaaacggataattgagagatagaagaagataaattatgccccatacgcaatcaagtttggctgtcatgtctctaaaacaactttgcggaaatgccaactactcatatctggtctacccgaatcaaactctctaccaaaagcaaaacaacaaaataattgcatcaccatatcatgtatatacatctttatagcctgatctgttatatccaataatattgttcaatcattgtttccaaatataataatataacattataaccccaagaagaattttgtttttacaaaaaccatataaattttaacatccaacaatttctcatgtgtatattacaaattttggtatttattttcattattttattcttctaactagctcattaataataaaaagtagtggtaaacacaaagaaacatcatgatgataattgtggaacgcatcgctaaaaatgatttctcgagtaaaacttggtactacaacgtaatatttga

SEQ ID NO: 24502 - DNA, 416 bp, Arabidopsis thaliana landsberg
tacaggaattacctgatatggtattaatcttattaaatagtaaaaaaaattaacgcataaacagaaacatatttcaaacagtagttcagaacattaagatgagtttttttcttcttcttaaaatagcatttttatttccattttaaaagaataataattaacagacaaatttgggaaaaaaaactgtagacaattggggactagtataagctacgtacgaacactatacactattgaactttattactataatatcgggaaagagttggtattttacctaaataaataatagttttgatcaattaagtgactacaattgataaagcaattaacttcagtgtgagggttacaagtggtatttgcaacgataatctgaagagacaaggaaaggagccaccttcgccgccggaattgat

SEQ ID NO: 24503 - DNA, 585 bp, Arabidopsis thaliana landsberg
  unsure (1)..(585): unsure at all n locations
aaccaaactatatttactgataaattaattgattgttattgtgcagaattgcttggggcgattgtgggtgtggggattttgagaaattattctggcaacgttgaagacgttaatggttacacacttcggttcaagatcatggatcgctagtaagtaaaataactttatattgtttatataaaattgtctgcataaatttgtatacaagattttgatcatacttattgcaacagcaaagaggtattgtcgtgtgaagcttttgggcagacagctattgactttgaaaaaaacttttgattgtatggaaagccaaatatgattgttgcactagggtggtggaaggttttgaagttaaatgggtggccaaatggagnnnnnnnnnnnnnnnnnnnnnnnnnnnnnnnnntatttcctaatccagagattcttgaagttgaagaaataaaaatggttatagattgatggttgattcatgaaattttatttttttttgtaataatttctgatttaatgtctaacataaaagattttatttaatatttgggttataaaaaaaaaattatttattaaaatatttttaatttt

SEQ ID NO: 24504 - DNA, 1299 bp, Arabidopsis thaliana landsberg
aattcccattttaataattattattttatttgctaaaatcattagcaacatatatttaaatcttaatcggctctctaattctgtttctttacacgaaaatgagagtttctttttcattatttcttctatgtaaaagatacattacattaaccaaagagattttggagtcattttgctacttaaattttcaaagtcagaatcaatctccaacgtgatacaaataatgttttttttttcttttttgtcaacatacaaataatgtttttagcttgtgtttcagcatgttcacatttgtgggtctatttgcatgcaagtgtatacacaaaaatggttcttccttatcatagaatttgcagccgcaaatttaatctataaatgccattttcttattatccttccatattttagacgacaggacgacatgctagagaaatttatatataatcgttttagagtttacaattaaataaataaatatctaaaaaaaataaaagaagaaataaatatcttttaattttggaagccagaaaaatgttttataaccttttgttgtaaaaaaatagggacgtgaaaataaaaaaaaaagaatcgcaataaaatgagaagagagacacaattgtctccatcaccggctcttattttttttgttgaaataaaaaaaatctgtttttattataatcatcaacgaaaagcccaacagtcatgagctgtttatagctgtctcgttctgagatcacgcgcttcaagatcgcgtggaggtcgagatatccaatatatgaacagctggactttattttggagcacaattttcaaaattcacattaggtttcctttctaattcataataggtttttaaaaataaaagactctttatcaattgattgaccattagagtttactcaaacaaattgttactagcgagtattactgacaaaaagatccttaaaattcacaattttggaactaataaaagatcattttaagccacctttaagcgaacaattaagaataagagacatattacaaatcattcaacttcaaagaaatgatcattaatcaactaaaccagaggtcaaacgaataattaattagtagatggcctataacattagctcgcctttaaaattacattaacttatatatatgatgactaggattaataaccctctcttcatcatttcctcactaacttattttccctaatctctctcactcaaaccattaaaacaaaaaaaaagggttaagagacaaaatctcaaccacaagaaagagccataagatgtactgcggctcgttcct

SEQ ID NO: 24505 - DNA, 1263 bp, Arabidopsis thaliana landsberg
tttatacactcatgttaagtcacacacacaaaaataaaagtttatgtaacatacgggcattttgcataatatgtcaattcaattttttcccatagaatttcacaataaatcacatgcagttgtacgtattttcatgtacttactctgtttcggttgcatctacaaagtccgattttaacaaattcgtttagtttcgattcagtattggtcccgtgaattatttggagttttgtataaattgattaataatatatgtgatgaaagagttggtgcctttgacgtacggcatagacttagagtatagagacgtggtggtcttgtgtaactcaagtgttgtcatgtcggagtcactgtgggactgctctactcgaatctaatttgggcctttctgaaaccctaaaaccgattttgttccaatctcagtttggacccctcttctctcaccttagatgggcttttggatcctcgattcttctcctctgttttcctttttgtttttatgtttcttaacccatcaaagagtttaataattgaaaagaaaaagagtttgatcggttttatctaaaaaaatctatatagcagccattttgtgaaataaatcctatagttgggaattatttacaataattgccactagattttaatgtttgtttttgataattagaaaaaaaaatctttgaataattaaatatttgacatttaacaatcttccctaaatctctcaacattaactacacgattagttactaaaataaaacttgcaaaatatttaatatcatttaaaaattacaaaattatcatttttgatattgcttttttgcatgactataacaattcaattatacgcatcaacccacagagatatttgatagcaattaattattacaaaattacaaaatatttagacaatgattcataaacatatcataaataagatcaacattaataaaataaatagttttttttacgggacggattggcgggacgagtttagcaggacgtaacttaataacaattgtaaactataaaataaaaatattttatagatagatacaatttgcaaacttttatatatactaacttaaaaaaaaatatattgtccctgcggtataccacgggttaaaaatctagttgttattattaaaggaaataaaatatcctcataaaaccctttcctgtaatctatctttgggctaatgtatattatcaaacaagacgaaccctgaccgtattcgtcgtagaaaagaaattgcttcgtaccca

SEQ ID NO: 24506 - DNA, 1342 bp, Arabidopsis thaliana landsberg
  unsure (1)..(1342): unsure at all n locations
ttacaattcttacatataagcgataagaagaattgaagacgaaaattggaaggaggagctgatggaaaacttaaaacaatctacacgcagtgacgagttaagccgttctggtccccctcaaattccaaatcctgactggtaaatttcgtttcatcaataccttctgcttaatattaataatattgattatgaaatattattaactaatgtaaaaaaacgcaactatataatacgtaactgttttcggaaacaaaagagtttacgtcatcaaacagaaaatctttacctcaatttttcttttggccccgatgttttttatactagccatttcctaggaacgacatttccactattgcgtactgttttgtttttcttttgacttcaacgtatatttgcatgtgccaatagaatttatatataaataacatttcatatgatacaaaaaaaaagaagataatatctactcgatcgtttctatggtctaaattggtttgtttataataggaacaatttgtatcaccgaaccacagtggcctcatgtttggtgcaaggagtttacgcaaaggaaagagacagggaaaacaaccgaaatggttccgagtcattagccacaccttggtggaagagtttcaacttcactttagatgaaagtgaaatcctatatgacgcatttgacgactccatatacggtgctgtcttccaaaacatgatcaattatgagaataccccggactcgatagtaggacctccgcgttacatgattgcgttacggggaactgtcccaagtgatgtgagtgattggatacataacagccgtattgtacttgagaaactccatggcggnggtaagcatatgcttgtcattagaaaaatctattcttttgtggccacatatggaaacacagctatctggatcgctggacactctctaggagctggccttgcactactcgcggggaagatcatggccatgtatggatgccctgtcgaggcttacatcttcaatccacctatctccttgattcctctagagcagctagtggagagtgaggatcttaaatgtgcggtccgactcgctagggatatcctcaaagccggcatagcaagagtcctagaccttaaggaggtatcaaatcttcataatacttgtggtacttcacaaataatactatctcccaaataagttgaggggattgacactaatggcactaaaaaactttattattccaaaaatgataccttgttttgaaacttccgagaatatcatataaaggttttatttttttttatattaattaaataataaagttttttattactatttgtatcaattccctaaata

SEQ ID NO: 24507 - DNA, 1066 bp, Arabidopsis thaliana landsberg
agtttcgccactcgaaatttaagacttttagtcaaacattccggaacataacttggttgctggttccaagaacaagagcagtacttgtcaacgaaatcatggttctgagaaaaaaagatcataaaacatggtcggtagttagatcatcaagtaaaaaaaactacagatcaagtgatgagccatgaactggaaaactaattaccttatcgttaagcttgagaactcgaagtttaggagaatctcgaagcaacattgcgagtatattcaaccactttgaatcatcacatgtacatagctccaaatgatcaagctgagagaagataataccctcaggatactgagcctgcacatgacacacaaacttttctaagtacatgagaattttttttaaaaacaatgatagggtttaagttactagactcacatttgatttcttcaagcataaggaaagtttcttgacagaggtaagagattcaaaaaaattctcagtatgggtgaaggcaacgtcgagattagcctcgtctaggtaaggcatatcttcaaaagagcatagatcagtgtaatgatccttaatgtttaagtacttcaaattaggtgtatttatcacatatgcatctgaatctgctacaccatgtaaaggtgataaataaaccgtcaagctctgtaagtaacgcacaataatagcaaatctcttgacgttgtcttcattgtgtcgtttcacaacaagatttcgaagtgaaggacagcttgatatgagattacgaacacattcatccccggaatacttcacatatcgaaggtgaagcgttttgagtgaactgaaacatgttgggagccaaatagctccaagaattgcgttcttgagttttaaggaaacaagggttttgctgtcgcatagtctcctagataacctgatgtgaccatgatcgggataatgtttgattattagctcgcagatgttgcggtccagcgcgagtttaatccacaatccgatatcatcagcggtacattttggaccaacgctaagtctaaggcttactaaagtaggagccttaagtaataccaa

SEQ ID NO: 24508 - DNA, 1266 bp, Arabidopsis thaliana landsberg
  unsure (1)..(1266): unsure at all n locations
atcatatccaacgaattttgcaaacacttgaactttaaacacctaatactgcaacacatgaagtttttattttcacctctgcaatatatggccacctcttgctcagtagtttattcagacattagaattgaaaacagaaagaacaaagtgtttgcagctaaaaactggtagctatgtttctaagaaaccgagtggttaaactgtactgcaacacaagaagattagattctcacctctgcaatatatggctacatctaactctagagtttaatcaactatttgacctgaaaacacgaaataacaaaatgtttggtagatatgtttttgagaaaccgagtggtaaaattgttctaaactgttccatcatagagacattataatcaagtattgttaaattcaaaaaatcttttccaaaatctgattaaaacaaatctgcaaattcatttcaataatctagaaaaaatacacacctttacaaacttcatacgccttttattctgatgagctgagttgattgtttgtctccatttcttcctttcagttcgcataatcaaatcggagttgaattggaggaattctgatctaataacgaagttagaacatcaaagatctctagaaactatagagaagtcgtttgttggaggaacgatgagcaactagacggaaagtagaaataattatttgccgatttgagcaatnttgcaaaaaagatgaagaacatatattgtcgacacatctctgttccataaaagaagaacatttatccagtcgagatgagtaatggctgttttttttttacatttcattccgattcaaaacaaatgttgctaacaaagtagataattctattttcagatatactgtggtttttattctcataaacaatttagttatttatgtggatccgtgggcctatatttatgttaaagatgaagcccacaatatgtttattgttttgaagcaatattaaaaatatttcagactcccttgaagaattgattcctagatttttatatatagatttcaaaatacaacctgaaaaactaaaaagaacagcatttacagtttatttaaattatctggatgcaaaattacaagactaatccaaaattacaagactaattgtttaaaattaattaaaatacatcaaaacaacttaataaggtgtatacttacttattttctacatttatattgtacacataaaaaacaatcatatttatatttgcaaaatatagtaaataataaatctaaacatagaaaaaa

SEQ ID NO: 24509 - DNA, 977 bp, Arabidopsis thaliana landsberg
ccagtttggccatacacccagtttctttcatgctctaatttaaacaaaatatgtcaataattgtaagaaataattttctcttgaaagacaaaaaaagccaatgctcttacagttgaacttctattttcataaaagattaaaagaatttaagtctatttgcttggattaatgtgtgtgtgtgtgttatataattctttcatgaaaatattttccataaatggtgacaaaatctctgaatttatatttattttccatcacttgtattttaaaacgattctcaaatctcaacgatgtgaaatgaaaaatatatatgtactgtacttgtttagttattgacagcaaatattgattcgatttcaatctttatagattcgagatcaaaaatgtgtcctttattcagtatttcttttaaccgccttctgcattttttttttttgggtgtctttatgggaaaaacctgccgtcaatggagaaaaattattatacgaacgtctgttttgttagtggggtacattgatgaataataagtcctacaacgtaaaagaaaaaacatcaaaacataaacactactactttttcccattggcaatttacaattacatatatatttatacttattgtatatataattgcaaatccagtatcaatttaaaactatgaaaaaaagatttataagcaacatatacaaaaaaaaaacggtgctaaaaatcagggagaaacaagaaccggatcggtttgtttccaaatgttacagaagaagaagcagctggcaagcgcgggaaacttacttaccgatgaagagaagtgtttattcttctttacgtggttttggttttgaaggttttgcaggaacaacgtaactgaggagaatcaatccaacaggtatgatcgttcctatgtaatatacgcttccgtaggcggtgagtgtttctgcaagcttaacacctgagagtttgcgattgttaaaaggggtttat

SEQ ID NO: 24510 - DNA, 784 bp, Arabidopsis thaliana landsberg
cattatatctctctttaggaactgaattggacctccccaactggtgtattaggacacacccctcgagacaccaatgtccttctatcgaggtctgctctaacagtggttagttttctaatgttctaataagtttattattttaagttttcaaataacctcttgctcacggttttttggtgttgtgttaacaattcaggaccctattgttggtgttgaacccactccacccatggtccagacggaggttaaccttttctcccttgtttatcctattgttaattatgttgatagatgttaaacaggagattaatttaatgttacatttcaggttcatgacgatttccccatgtattcctcccaacatgagtctcgtgcaagcgaggaggttagttagcagtttaatattttgttagcacgcaaaagaaaaatttattgttaacttttccgatgtaggcagtctttaaatttttttggtatagctattaaatgattgtattgttttatgcagccccttccagatcaacccgatgtttctaaagctaccccgagtcaggtgttttctatttctaactttatagctaaattactttttagatgataaggttattactacgctaaccatataggttctagtcatgcgttaataactaccctttaaatataattttcttatagattggggatggggctgctagatatgtccctaagtcacccccttagcatgaatctgatgaaataatctaaaatgtggtcaatgtgacgtaaattatccgctccgtgttcc

SEQ ID NO: 24511 - DNA, 1443 bp, Arabidopsis thaliana landsberg
ttacacttttctgatattttttcaattatttccctttttttttttattctagccgttgatacaacaaactagcactagccaaagttttgttttctggatcatagtatttaaaaacgttattgttttgtttttgttggatttacaccaagaatagacactaactagtaaggagtatcgttttttaatctacaaacttttgatgcatgttttgttatggtgtgaagggagttgttgggctttctcgactgtgggagcagtggaaggcttaaacaagatcgtgacgggagagttagtcactttgtctgagcaagatttgatcaattgtaacaaagaaaacaatggttgcggaggaggcaaactcgagactgcctatgagttcatcagtgaaaaatggtggtcttggtaccgacaacgattatccttacaaagctgttaacggagtctgtgatggccgcctcaaggtcagtatagtcacgatttatatataacaatattaaaagaaagaatcaattttgaacttattttccaaaaatatttgtgtaggaaaaaagcaagaatgttatgattgatgggtatgaaaatttgcccgcaaacgacgaatcttctctcatgaaagcggttgctcaccagcctgtgactgccgctatcgaatgcaccagccgcgagtttcagctttatgaatcggaaaaagattaattttttgccaaactttcatgtagaaaccttctctaattggaaaaagatttcatcaaattttttaatatttttttttatgtcaaaaggagtgtttgatggctcgtgtggaacaaacctaaaccatggtgttgttgtggtcgggtatgcaaccgagaatggtcgtgaatactggattgtgaaaaactcgagggacgacacatggggggaggctggctacatgaagatggctcgcaacattgccaatccaagaggcatatgtggcatctgcaatgcgagcttcataccctctcaagaactcgttttctacggataaagtttcggttgcctaataatatgaactaaatgtatgccatggaacggatcggttaagccattatagttattcgactttgaaggaaactaaaaaataatgtggtcgattggtttggttttgttatatattatgcgtttgtatgggggtcagtcaatgtttgaacgttgtataatatttctttgggtctagtgataaatattttgccttttgcgaaaaaggtacttgtgtgagacgagattgatgagtgattctgaatttggggaatgatagttcccaactacactttaaatgcagtgattataaagcggagtagagattataaattaaggtgacaattggaatttttttagatttaatcggaactagacctatgcctctaacgatgtttagttaatgttaactgagtgccgtcttggcattggttgaaactaatt

SEQ ID NO: 24512 - DNA, 800 bp, Arabidopsis thaliana landsberg
ccggttggataatctccgaggacgataatagatttgatcatctattagcgtgtaaagcttacgaaagagaacagtctgtaattcagttgtaagataatagatttgatcatctattagcgtgtaaagcttacaaaagaaaacagtgtgtaattcagttgttttattgtattttttttaaaacgttaatcatttttggtttatgtgtatgtctaaaaaataactatgtcatctctgtttcaatcttaataaagtaaagcaagatgttaaaaaaaaaagagatgaatggccaaaaatgtttattgttttgggcgaaaaatgatggtttctttgggtgtaaacaggcccaagccaaacaattaggcatagtgcgactgtccatagaccttttgttatttcttttattttttttttgggtgtcggcttgttaattttttttaaaaattatcttgtgaagaggcctgtttaaaaactattacaactaaaattagaccgccgaattcacaaagattttcaattaatttttaaaaagcttataatttttaaaatagtcacaagtatttaaagttttcatacctcttacttaaattaggcctattctaatgggatatctttctctctcttaacaaattcttatctttgaaagagatgcaccggaaatctcctccagtgatattcggcttttgttcagattataacttctaactgtcgccggaactgatcttccgttttgtaggatttaataacccctaacttagctagacggtttcttatcgactagacctctcctctttctatacgat

SEQ ID NO: 24513 - DNA, 1438 bp, Arabidopsis thaliana landsberg
atcaactagcaactcaatgttcttcaaaatttggggtagaatcttcggagtgctcttcaacttcgatttgagaaatcattattattttttgtttcgatccattacaatcaccgcaatgttaagtttattaaaactgagatcactaggtagaaaagtagaaccacttaatttgcttttcatatataagttcaaatttaaagaaattattttttggttttccctaaggtttggggttgaaaattttgaaagaaagtaatagagttcgatatatgtatattaatttctttccagttttgatgtttaaagaaaaactatgtaattcgaaaaacaaaatctacttaacgatgttattgacggtggtccggttgtctttagttcgactagcatcatatccaaatatagtttaaaatatcagttaattttctgttaaagacatgaaatgtcttaacatgtgcatgccatccacactaaattttctacgccaaagaaaattcaattgtataaaattggaagaccataggtttgtctacgcataaaaaaatgttcaaaaaaatgcatgatcatcgttaagttattactctcacccacaaacttacaactctatagattaactattctttgtaggcatgatcatcactagattgtagtcgaagtttataagcaaaagttaatcccagtctcttacacttttaacaaccccaacaatattttcttcttctaacttaacttagttataatcaaactaagcaaacatttctttattgggctttaaccaaaaccgatggcccaaaatacttctcagcccaaaccattatcttcttctccttgttgacttttctgttgaccatctccaccagcaataataacaacaaggcctaacctgatatgcattcgacgagatatgtattcgacgaaaaagaaaaagagaaatatgcattatagaaacaagaggcctaatctgacaaaacaagatttagactgtaccaaaataaataatttaagtaaaaatatttttaaaataatgtaaacgtttttgtgagcttagacaattaaaaaatagccaaagttatttatggactttattgactaaaatgaatataaaacttatatgataaaactaaaatgaaatatttgagtatattataggcctttgtttgtatttcgtatgtgatccctatgaggaaactaataagcttggaatattagatcatattggtagctagatcaaggtgttaaacctcgtaaattcaattgttagattaaagagagaaatgtatatgcaaaagacagaggagaaacacatacgttaaagttaggctttttgaagtttgaaataaaaaaatggttaacacttcgtctgttcttacccatttcatttaataaagtatgaaaacaaatgataaagctcaagatatgttgatcatttccagagtacagt

SEQ ID NO: 24514 - DNA, 1909 bp, Arabidopsis thaliana landsberg
tatgagaaaagttcctccttctctaggaaaaatgttcagtcacatcccatctatttgctttgagttcatactttttcgctatagtacaacacgattagtccaaattaaattcatataaaaagtgatgtcatcaaaattatattaataagttcattcatcaaaatctagtagtatctaagagaatccccatcagtggaatgactcaaaaagttttttaacagaattatattaataatttattatataataaaatttatttattttaaaagaactaaatcattaatcatgtgacacttgtttggagaggttctagaggtatctcatttaagagagtctctctcactctctctacaactttttttcttttcaaatttttattagcttagatatccatctaaaacctatcgatagaagtgctctaataaagacttccgaattgaaataccaagctataaactataaagctaaaatatatttgatgtatcatcatcaacttgtcttcacttatgacttgtcttgacttgtaaacctgagtttaggagtgcgcattccgagttactatttggtttttatagttttatagttttaaaatagtatgtagttgttaagtttggcagttgcacccaaaaaaaaaatagtttccttagcttatggtttatgggtttttacaaaagaaagatgaaatcattttaaaacaatgtaattcggtttgattttggttttttcggtttattccttttattttacaaagaaaaagaaacaattttgatgcattacaaaaacacacattcactttagagatgtaagacaattcgcaagtattgaaagaaaaataagaaacaacatacattcttgttacggacaaaatatttaacgagatcaaaagaagtaaaagataactatgccaaggcgtaaaacaactaaaaattgagagaaatctatcacaaattcaaattcaaagagtaaaggaatatatttttttctctcgagtgtgtaaaaaatctctccctaaaactagagagtatgcgttagtcaaatagatagtttgaacgccattataaatgtgatatctccaagttactttgaatgaataacgtacacctaagaaatgatagtaccacatcttcgccataaggcacaagaattaacgtgggagttgacatggcatgccttgaaccgttgatgtagacttcacaatatctgatgataatctccaaacataacctcagccttaaaaacctgtgagaactcctcaccacctcacaaactaatctctcattgtaatttttgttatctatagttatttagatgaattttgttgggaattgtcgatttctcttatgctcggattgctaaataatttattttattctttaaaatggtttgattctataattctgagaggtttttatcatatggtttagtcttttttggcattttatctgaaaatattatcatcatccacgtggcaaatcctcgtcagccggctcacgagaacctcaattatccaatctttgtatgtcacttgagtctctatatatcaaaccaccgaaaagcacgattgtttatcgtagtgcgttacaagcgttttaagctctcactagcaagcaagtactagcaacaatggcgtcaagcactgcgactatgctcaaagcctcaccggtgaaatctgattgggttaagggacagagtcttctcctccgtcaaccttcctctgtctcagctattcgcagccacgtggcaccttccgctctcaccgtccgtgccgcttctgcttacgccgatgagctcgtcaaaacccctgtaattaactctaccatcccaatatatttcattttcattttcatttcaatggctaaatgattgaaaaatggtttgccaaaaacaatcgcctttccgggacacggaa

SEQ ID NO: 24515 - DNA, 1317 bp, Arabidopsis thaliana landsberg
  unsure (1)..(1317): unsure at all n locations
cgttatttctttttatttctttttttgtctttttttaacaacatttcacaaaaagagaataacaatgagaagccagaaaaaggaaacctttatattttcttcagttggctaatttcgtcgataatgtttgtacacggatctagtaattaaaccaaaaataaataaaaattccactgcaataattagagagcaagacattaatatgtgtacatctttcctacttcttacgtataagtatagaccaaaacttattttatttgtgtgcatgtcctgtggtgtttactgtttaatttaagcccactattatatgacagtgatttgtagccaaacatatcctcatgcacacgttcacaatcatgtacttctcgatcagttggtgtcatgtcccagagattcagaaatggatttatccagttttgtatatctgtgtttccagtcaatagattatcatttaaggatgatttctcaccaacccaatccaagattttttgggtgaacaatcgttgtatatatgatacaaaaaggttctacaaaacaagtacacgtgtgacgtgtgaaaaaaaaaagtacacatgtgaaaacatacagacctaactggtttgctattccgtctattgttttatgttacttcctaaggtcaatgttgagttgtacgttaaagtaaatcaaataataataatattgaagcttttttgataaatataaagataatattgaagcttttctgcttgtataccaaaatagttgcatatatgtgatatcatgatatagtgttagcagaaatatccaaatttgcagaaaaaaacacatgattttcaggccatgccacattttaaaataaatgatatcatatggtcaaatttaaaatggacggatgggctatcaacctattaaatagtggacttgcccattactagcccataaataaaaaggttacgtcccaaaaaaatgttacttttcaaaataaactaaacgcggatctagaatatgacatgactaaagcccaaaacccatgtaactactcaacctatatactgtatgattgatacttcaaagttcaaaacattaaaaattcaaaaatttcactgttgaattgccatgagttttttttttttttttttttttttgngtgtgtgtggcaaaagccatgagtagttttacacccgaaagctaactcacaaaacagtactctcaccaaataggagaaagatcagatcagatcgtgtgaaggttgttattagatgtcatcgctttaggggtcaatattttgaactgcatggaagntaatttctcttagatatttctccaaaatctttt

SEQ ID NO: 24516 - DNA, 2175 bp, Arabidopsis thaliana landsberg
atcattggagcgtagataatttgaacatgtaaagtgtgattttttctggtttatgccgatagttgcactctgatttgagtcaatacttgttttattcttgttctttaaatggcttaatgtgacttctgtttgtggtggtgattgatatttaattgcttttgattgatattcatttttcacctttcgctgtcaagttttatcgttttaattgagtgttgttgttcttgtgtgtgaatatagggtttaaagaggcatgtctatctgatactgccaaggaaaatgcttctgttgtcgattcgtctttgactgattggaaacaagatttaggaaactctgatgatccaggtaaactttgaagcatgttttgttattcgcttttttttacatggagatttgcgttttattttgtctgtctcttgttgtaattttttcagagagtacaagttacagaagcaaggaagaccataaactgtcaaaggtggatgttgatcgatgtaactttcctgatcaacttgaaagtgcaaaggcgaataagaatagtaaaccagggtatcgaacgagatatttcatcatcaaaagtctgaattacgataatattcaagtttcagttgagaaaggtatttgggctactcaagttatgaatgagccaatattggaaggcgcttttcatgtaagaacctctcctttttagtttgcaccgctctataatcttatatttagtgtcagcctgtctggtatactgaagttatagtctttgtgtagaaatctggtcgagtgattttaatcttcagcgtgaacatgagcggattcttccaagggtatgcagagatgttgtctcctgtgggttggaggcgagaccagatatggagtcagggaggtggtaaaaacaatccctggggacgtagttttaaagtgaaatggttgcggttgagtgaattgccttttcataaaacacttcatctcaagaatcctttgaatgattacaagcctgtcaagattagccgagattgccaggtatacctaaagtttcttctatttgcttcatttcctagaatttttgcgtttgttgtcttaaatccatataatggctctggctagaatagcttaagctctatgaaaatgactcgatttgaagttcttttaatgtgcgcatgctctaggaattacctgaagatatcggtgaaacactttgtgaactccctgatgcatatagctgtgatgacgggttgctgaataggtatctccttgaagtctaagtggggctttgggttcttagatctgcttgctcttgattctattctctcacagctcttctagggatgattattcaacaaaaaagtcccgcgcagaacctccatcttcttccggagacgatgagtacaataacaatctttggggccatacaccaatgccttaccctcctgcggtctacccaaaccaggatgacctcagtagatttcatcttgcacagcagagaggatatggagtttcccccgaatatctgcatacatcaccaggtgcatctaactctcgcacggagcaagacaagtctttacgattcaactcatggtgtttgcctttggaaagccctctcgcgaattctctaaccgatgatgattttcttgaaatggtagtggcatatctgcttgtaacttatgctgcgaatttcatcccattacgacctcttgttctcgaattagatattttttgtaagtcatgttgtttagttgaatcaagaatagtcatgacacactactggaaatcttggtgaaaacatttgtagtatttttcaaactctgagctatttcagtgtgctctttctgatccataacacttacatatctcagtgtctggctgagttttgcattgatgttacagggacttctttctgtttcttgagaagcatcatgagatcaggttatgttgttgttgtatgtttgacacagtcttgcgattgtgtttttttgttgttttttgcagtcttatgaagagtacgttgaaacccatggcaaatgcatgaagcagcttggtcttcctgtcagtatgttttatccatcactgtttacattatgttttgcgttctttcggattaattgtgtggcttgacctgatattacttttaagtttacttactttgaacacttataggctttcttgatcatgtttatcatatta

SEQ ID NO: 24517 - DNA, 2206 bp, Arabidopsis thaliana landsberg
aaagtaaactaaaaatactaaagaaacaagttaccttaacatgaaaaatggttggctctcccatattcacaagacttttaatttttcactgacgtctttaagtgttgttagtcctaatataatttagcgaataatgttatacggatattaaacaatacagaacacagtcgctataatctttggccaacattctaagaaactactctaccaaacaaaagcttaccttcttcaagtctctttaccaactccttaatagatacatcagcaggctcacactaatttatattcctgcaatacacatgaataatgaacaatgtctacatcaaacggacaaaaccacacaacttaatttgagaaaacaggcaataaaacactaacagtctctctaatcttgaggcagaaccggtgggagctatcctctcaaaatagaagattataactacacccctgaatacttggaatatatattaaactcacattggttctattaagaagagtataaaattcacacagcacgttcttgacatcaaatattattatccacacttttggttaaagaatttttgtaaaagtttgttttctgttttggaagttgtttggatgttctgtgctatgttttgttttagtgtgtttgaatttcgttgtgtcttagtgagtttaaaatgtttttgttttgatgtttttttgtgtgcatttcagcgtgtgtttttgtgttttgattttttttttgtgcatttgagcgtgtgttttcgtgaatttatgttttgtttttgagacagtgcaagagatgttataagtgagagagagagaaagagtgagctacttcatcaatcaccatacctttgaatggtcttcagatcttctttgcagctaaacacttcttcatcttgaaaccctttgtcaagagttctttgcagcttgaaatatctcttgacaccaaagaacccttgttaaaataaaaagaatatttaacaggaagaaacatgctaccgttaaatcaaattaccttagcaggatgcactaaaagaatgattggtctcccatattcacgagattttggcaatattatcactgaggctcaagattgggggattctgttactgtcatccacaaccagagcctttttctgtgtgtattatgttgattcccctgatcagaaagtaattaattacccaatagaaccgaaaatacaatgaaaaaaacagaaaccataactcttaaagagccttaaacattataaaatcaagtacctggtaaccaaatttcgtagcaccctggggaccagaacaagatcttttctactactttgacctggacagacgcataggcttttattttccagaaacttatccatatccgcaagcatcagaggccgtgtactcaaacaccaccttcaagcactattcaccatcacaaacaaacacatcataatctgatccataaaaagtaccacaaaagatggcaccatcataaacaaacacatcataatctgatccataaaagtaccacaggagatggcaaaaatggttatcgaagtagctaagaaaatcattaatatgtttgaggcactttgagctttgcgtgcattctttagttagctaccttttcctggtaattgtttagcgactgcataccttgagagatatgcggagtttcagctgcaaggcaatatctcaattgagaattcaaaattaaagtttgtgatagtggaggaaggtgcaaacctttgtctcaggatccttgagtttggtgacagtctcgcgccaagcctcgcagtttcctagatggaattctgaagcaagggccgtcacttcttgacagaggttaaactttttgcagaattggtctgatttgactatagacttgtgtgaagaaaagctcggtaaaatgatctaccatggaaaacattgcattatacacataatggcagagttaacatgtaatcactaatcaaaagaaagagaaccgaagagctgagaacaatcgagaaagaacccacaaatgtcaatgtttaatcttactaactagttcgagaacaatcgagtttctagcatcacaagaccatgtcaaccccaagcggggttaggagtaggactccaatctaacggccatgggtccttcataaactataaccattttataatcaaaactgattcaaaggtcattaaatttaaaaagccttaaaccatatggagataaccagaat

SEQ ID NO: 24518 - DNA, 1540 bp, Arabidopsis thaliana landsberg
taacccaaaaacagcacttttatagaaatgtgattctttgactatcctatcagcctctttattgccatgttgaaaaaaatgtgtaaaaatgtgatcaaagagatcctttatagcatcttcaaaatggaatggaaacaagccacttaccaaaggctttatgatccgatagcacacacattcccctctttaggtcagccaactatagagcttttcgtctaatttcaggaggattaagatcagtacattggtcacggcgaggtataacacctttttactttaaacttcaacatcctccatagccttttttttaataatcgtttcatgttcaaagtattcttttctatggaatataagttcataaaatgttattgacgtcgtgataacatgggatatatagagactattacaagagtggataggtgaaaatagcccaaacaaatccatctgaacttcaaaacgctaaatattatccttaacaaaacaacaaaacgctaaatatcacgttttaaaacgtttctttgtttagggctactttgttcctctctctgtcatgttaatctggctagattgttatgtttatgcttattatcttgttaccaaaacatttctgatgaggcgagtcgcagatggatggttcatttcattcaccagaatggcatgcagctcgtttggccagtctcaagactacacacactcttacttgggaagaatataagcagaagcaaaaggtaatctttttgcctttttaacacttaagttcttctgtatgttgtatggaacggtggtccttgttataatgccatagaagataatcaattggccattgatgatttagtgttcataagattgctattattgtcgtcaatttagaagctttattccaacatatcattttcttttcctatgctgtttatcatcttcagccacagatacgcagtctttgtgtgtttatataaaaatgagtgtgtcttccttctacattacatctatccctatctcgcggttttcaagtaactctagtcatgctcattttttaaacatttttattatctgcaatatcagttttttactactacttgcagcagtctctctgtattgtgagtatggaacattaggaaatgtttaacattatatctttctttcgtgtaacatgtgtaggaagaagaattgaaaaagggagaacttgaagcagataccgataaactgatgcgtgagtatagagctcagctggatgcagaaaggtcgttgaaactctccaaaggaaggaactattctagtgataagtcacgaaaaggtaaacataatccacttaacttaacatgacatctaaaccttctttctgaggacgttattaactggtcgccaatggttcaatgacctcgcagataagaaagacagagattcaaagaagaagaaaagcaaaaagagaaaggtgccttctaaaagtttagcttatatcagatagtgaggttttctagcttatgctaacatgaaccatgatcggttgtgttatgaatttgcagcattattcgtcctcgca

SEQ ID NO: 24519 - DNA, 905 bp, Arabidopsis thaliana landsberg
gatttggttttgagacagcctcaagccaaagcgttctttaaattaacgacgagatgtgtaagatataatatggtacatccagtgagtggtatgctcgaattcgcttaagagctcgaattgattgagaaactctcttgattagtcttccttgtcttgttagtttcttcctacctcttgaatgaatgataacttctgacaagttttactgatgtctcagtgtgtttgagttcttgtgttagtctttatcttgtactatcaacaactcaaatgtcatatattgagcttattggttattaattccattatcgaataaagacatttttttggccagccagagagggtaactttactctcctaagtgtgaattttctagagatgatgtctcaatgtgtttgagttcttgctgctacctgtctttgtatttttctatcaagaactcagatgtcaaatattgagatcattttcttgattgatttcgttctcggatagtggataagccaaatagatagtaactttgcctccagtgtgaacacatttagtctcatgttggtgctcctcaaagtcaacacatttctttagccgactacattactcgctttggttagtggaccatacccactttttagagtaaactatattcaattttgatatggcttccttccttctcttattctgcagcattcatggtgttttcgcttctgaggtacaatttcaattctgagttcaatttcgtagacattattagaggttggattccatttcttgtcttcatatctttctttccattttggtgttcattagctttcattgattgtgacaaaacttatcaactgctgttaaatatttctaagttccagtcttgttctgtggagaatagagatcgagaaagtgggattgtttttatt

SEQ ID NO: 24520 - DNA, 1241 bp, Arabidopsis thaliana landsberg
gttccaattcaccatcgagaagtcgtctagctaacagtcgtgacgtctgcaaacatacaataagagatcacaattaatctctaattgcaacaaactgagaacacatcaaccaatttctattattctccaataataaacaagattattagcgtagatcttcatgtaatcgatgtgaattaaggtaattatagtaaaatatattatcatatatctcagagatgatatactaaattcctataaattacataatgaaattacttttcaagtaacaccaaattacataatgaattttttccgaagggatgatgtacaaattgaactcctataagtatttttttatatgtgaagtaaaaaaattaaacatcaatttcaatacgaataaaacttcatattttaaaatgaaatatttttcaaagtttagggtttcaggagaacatgcattaacaaaaaaattaattagaattcaagaacatgcaaaacaaaaataaaattttgggatggatgagtgaaaggaattaaactaaccttgagttcatcaaccagaatctccaacttgtgatgatactttgacatatcttctgccatagaatcataaaagacatgctcaagagctcgaaccaccggaacaacatcatctggccagtaagaatcatcatcacgagcccctttcttcttacttgtacgacactcgtgcttaactgcttccaggagctcccccaatcgcttgtcacgatccgaatcaccggttaacaaatcaaaatcctccaagatcgacttataaaccgtactggttttaggactctttctctgaacagttcttttaccctttgaagtcttagtcacttggtctttctcaatgtcaggaagatcaccaaggcataaactcgtctttgccacaagacgatcaatctcattcttttggtgcacgtcaaagttcttatcagtgaacttcctcagcttcttcttaacaaaatcataaacattttgcacgatgaagcaaggatgctctctacggtttgggatttgcttattttccggcacgaaattcacaacacacttgtgcttcacagattcagcaaacacctcatcacgatggaaactgtagaacaggtttcttgaatctttggattcccattttccaacatgttttttatccacatcctctggacgataaaaccaatggactgcaagtttcacgtatttttctttgtttggtatataaatatcctgtccaacaaata

SEQ ID NO: 24521 - DNA, 731 bp, Arabidopsis thaliana landsberg
aaaaacttgtggatcagcaaaacaacataaagaaagatctttgccaaaaacttctgagttggtattacagtcattaagaatgctcgaaaaagaaattctcacgtccgtattgaaaaaccttcttcaagacactcagttctaagatcttccatgagaccctgaaacatagatggatcgctcgtcacaacagcatccacacctaagtgaagcatccttttcatgggatcagcatcatccacagtccatgcatacacctctttgtttctcctgttgatcagatcgagcaaggttgtaaacacatgagcaggtgtgtttttatttgaaacattgaaatcgattgcttaccgacggacaactctaactaattcttcatcgatcaagggatgataaactcccacaaccctagctcccttcattctcagcaggctgtttctcgccccagtcaaaggatctaccatcacaatgtatcccacctgccaaaatcactaggaatgagcaagaaacttctctatctgatcctcacaagacaatccatttctgtttaccatagtatctggtgctcgtctaattatgtccctagccaaagtgtcgcttttggcccatacgatgcaattattgcactgcgctctctcaatctaacaacagaggattggcgattcatgtgagcaagccagaaataccaccattgaaacatcaacaatttatccatactcttgttttttcaagtatct

SEQ ID NO: 24522 - DNA, 1108 bp, Arabidopsis thaliana landsberg
gaagagcacaaacaatccaagtattagttcgctctaaagcccctatctcatccttcatagcatcacaaaattccttgactttactagcttgagtataactagttggagtaggatatttggtgagagcattaatgtatgcacaataagaagaagagagattatcagtagataagacctgtgatattggatgttctgtagactctttcacagattctttcactgaatagcattgatagttttgcaaataaccaggaggtctcgaaactcgtcgccgtgatgtatttctgtattaggtatcactgattcagagttagattccccctgtctcattgtagacgaatattccccctcagttctagtccctgaagattctcctggatcagcaacacgagtacttatctggggaaagaaccctgtgacatcaacttcgtcactagcttggcaattctgaaaaggaaatatgtcttcaaagaatttaacatttctggaaatgaacacaacattactttcaatgtccatcagtttatatcctttgtaacctgctggataacccaagaagacacaagctttagccctatcttcaaatttagttcgttgctttttgaagttctcgcataacacaagcagccaaaagttctcaaatcagtgtactctggtgttgtattagtgagcttctcaaaaggagtcttattttccaacaatggtgatgacgtgcgattgatcaagaacacagctgtaagaatgcaatccccccacagagacaacggtaggttggactgaaaaaggagagctcgtgcaacattcagtatatgctggtgtttcctctcaaccacggagttctgctctggtgtttcaggacaggagtggtaaggaatgatgcccagccgtcgataaagctcagtaaacttcaactccggagcattatctgatctaacacaacgaactcgcttatcaaactgagtctctaccatgtgcagaaattctggaaacacagtcaaaacatcactcttcaatcttagcaaataaatccaggtgacacgagtatgatcatccacttttgtcaaagagtatctgaattcctctactgttggctcttgagatggacccc

SEQ ID NO: 24523 - DNA, 1614 bp, Arabidopsis thaliana landsberg
tctccgtttctactctcaaaactcacgtgggcttgttctctcttgttgtatttataggcaggatgatttgacaatctattgcttgacagggtgtacgaggatgattcagctaggagacagatccagctaaccaatgcgggctatggacatggtggcatagacacaacagcagcaccgccaaacccattccaaatgcaacaagatccttttgcaatgtccaacaacattgctcctcccactaatgttcaaatggcaatgcaacaacaacagcaacaacagatgacgatgatgcatcagagtccctacaattacactcatcctcatgattatcatcaaaatcatcatcatcatcagttctcagccggtccttctccttctaatccttttggagacgctttccttgccctcccacctccgccaggatcagctggtccgcaacaaaacaaccatcatcatatgctcctctagagttacaacatctcagataataatctctctttctcttggttaccttttttttttggtttagtttgattatatatattcagagtgttattctttcattctttctactagacaactctactcactgatgatttcttagccatttttatctttcagcacttttgattgcctttactttttaccctgcaaatgagttaatttaggttttcaaaataagtagtctcagttgtgattaagacagataacacgggtttctctcatgttttattttcaaatagtcggagatctacgaaccaaaaacattaactagtacatgaaccaaacccaaaagaataacataatattggagaccacaagagccacccaatattagagacatccgacgatatcaaaagtcactcctaagagagaggaagaggccagtaagggaactcagtggaccttaaaggaacattactgtgtgtgtagaagttagtggtagtgtcggttgcaatatcgtgaacaccaaagttacagcccacataatagatggagttaggtctgagtccaggagacgagcttgccgggacacagtatgcttcaccatgtccaagaaagatacaaagatctccaatgtcttgcgtgttagtcaagtgaccgcaaattgtatccactctaaacaccttaaacccatccgttttctgggtgattttccccacgttcatcatcacgtccttaaagaacctgcaaaagaagatatctatgtgtttcaacatagaagtagcaaacttgcgcttataattaataaacaaatacgtaccacttgacgaggaaatgttcaccggagggtaactccgccaggtggtctgttctgaaacgccagatgtaatcttccaaatccatcttatacaacctcaggagagggtcctccctaaaatataaatatgatgagtagggctcgacatcatcctcatcgaagtgaagatccaagtaccaaagatacgtcccagaaggactaacactgagaaatttttattcttcttcgaatacgttagactcgagaaagggtgtacagagccagaagtattgatgttgatccattcagaactagagcccctggaaggcttgcacagactcacattagaatccaaaaacttgacaggcacaacc

SEQ ID NO: 24524 - DNA, 1002 bp, Arabidopsis thaliana landsberg
aaagacagtccttgattgcttctgagcacatgttgatctgtgtatatgtagcagccctgataacaagtgaggaaataacggagcacatcaaattcatattatgcaggaagaccaccaaagagctacaaactcagtttcgatattaatcaaattacagacttatcactcacctgttgcagtagaaaacagcgttcttatccgtcagtgcaattgcaaaagaataaagctcgactgcctcaagataaagattggactgcatagctttgttacctaaaaggcagagaatgtcacatagaggttacaagcacccaaaaaacaaaccttcatcgatctcattctaacataggcttgtaacaactaaagaacaaggaagaagttccaacgatttcgaagaaagggactacaagcaatcacaagtaccttgacacttgagtgtttccgccaagctattcacatcaaacgtctgacatccagacttttccatttcctgatacacaaacacaaaacttataaccaaactcataaccaacagaagaagtaaaaccgtcaaagaaaatcaaacctacattgacacaatcatgaaatatccttgtagctttctccagctgagcaggatcatcatctccatcaggtgtattcctaaaataccgtactttctcaagcgcaccaaagagttgaccaaacagttcatctctagaagtccctaaaacaagcacaatcccacaataataagttccattactctatccaccactcacattggtccaataaacacgaaacaaaccattacttaccagtaaaactaggctctttacacgtatccacggagacatgagaaccggaggaactaggatcctgagtagtagcagcaacaggtggtggtggtggtggtggtatggtttcattgttgtccaatgaagtaaacaaattaacaagtgaaataggtttaaagctatcatcatcatcatctcttgaagaatctgaattaagtttaaaagcttc

SEQ ID NO: 24525 - DNA, 1073 bp, Arabidopsis thaliana landsberg
ttcggtttgtctaaaccggatgttctgtgacagaacgaaattacaatttaaaaccgaaccggtttttgtttagtaaccaatagaattgcaacgatcgtaacatttacttgaaactctctcaacgttagacaaagtttgaaattttgccgccttagtacgaccgccttgaaacttgttcaaagggctaaatccggcgagttttgtgcagattccgctgactagcgtctctttgctggcttgatccttctccgagagcttgttttcgtcgtcgattaacgaatatgactcggatataagatcaattcttttggttggtgttgaattggaggttttcaaggaagagaaggagttagatagagaattaggagaaggagaaaatgtggtggagttaccaaagccattgatttgggaagtgattttgagagctttaagacgagcttctcttaattcttctttccctaatagaagtgtttgaatttgatctgcctttttttgaacttgagctccccaatcaaacctataatgcgaacataaattgaagcatgatagcaataacaagaaaaatatgaaaacaaaattttttttggagatttgggaataatagtttaccccattattggtcaacggatttggaaaagtggagaggaaatcgaaaagattccaaatcataaagaaaaatcatgaggtaaatgaataggtccatccattagtaagaactccaacaacaccattgccttgtacgcttctctccaattctttatctctctttcatctttcccaatcctgtttttcataatcatcatcttaagctatcccttaatcataataataatcttcaagagaaacaaaactaattcatactttctatgaagaacatccacaattctccaatactccacggtatcaaacgatgcctcggctattttcgtcatcgttttagcgtctggtgaagaaggatcaccatttgttacttcttctactaacctaagaatgaaagagttaaatttaaccatcactaatggagtattatcaattagctaattaatgaagttaatagtctactcacaactcag

SEQ ID NO: 24526 - DNA, 1394 bp, Arabidopsis thaliana landsberg
gggtagtggaagagcttcttgcgcatacgttctccaatgtcaggcaagggcttcacgtcttggctcagaaatctctcatatctatcaactcggaatatatagagatgcataatttgctagaacaactgggaatagaaattgtgcgaaagaaatatgctagtgagcctgggaaacagtccattcgtgagcctggacgacgtcaatttttgactgatgcaagagatatttgtgaagtactcagtgatgatacagcggtaacttttgacactggtattttattgcattgctccctacaaattgagttattaatcatctctcttatattttatatgtgtccttttatcagggtagtggcagtgttatagggatagatctcgtgttatctaagaccgaggacgaattatatacaagtgaaagagcttttgaaagaatgtctaatctccaattcttaagagtctatggtgatcgcgatagattttactttccgcaaagtctgaactctatatctcgaaaaattagactactagaatggaaggattttccgatgacaagtttgccttctaatttcaatcccaagttcctcgttaaactatacatgcagaggagcaagcttgagaagttgtgggaaggaattcaagtaagcaaaacaaaaatcatctgtagaacttttttatatttcatatttaattttgttttatagtacaactcactaatcgtatcaatattttcttgtatgtggttttatttggatatatataaagccgcttagaaatctgaagcggatggatttgactttttctataaacctgaaggagcttcctgatctctcaactgccactaacctcgaggtcttgtatctcagtggatgctcaagtctagtggagctcccttttaccattggacatgccactaacctccagatattagatctcagaggatgcttaagtcttgtggacctcccctcctctgttgggaatgccactaatctcaaggaattgattcttgctaattgctcaaatttagtggagctccctttatctattggaaacctctgtagattgtcttggttgaatttggaagggtgctcaaagctaaaggttcttccgatcaacatcaaccttgagtccctcgatgacctttatcttagtgattgctcgctgctcaaaacgtttcctgagatctctacaaatattaaacttctcaaactcaaagggactgcagtcgaagaagtgtccttggcgattaggtcatggtctcgtcttgaagagttgcatatgtcatactgtgaaaacatcaaggacttgcctcatgcttttgacattatcacagagttgcacttgactaacacagatatacaggagcttggtccatgggtcaagggattctctcgccta

SEQ ID NO: 24527 - DNA, 1493 bp, Arabidopsis thaliana landsberg
  unsure (1)..(1493): unsure at all n locations
tgcaaagggttgcattaactctgtgcctcggaaaggtaattattttgtttcagacgtctatatgacgtagttgctttctttctctcagtgatctcatgcatccacaatgtgaattcttacagcctgcggatatatacctgatcgatgagccaagtgcatatctcgattctgagcaacgtattgttgcttctaaagtcataaagcgatttattctccacgcaaagaaaactgcatttgtagtcgagcatgactttataatggcgacctatttggcagaccgggtcattgtgtatgaaggacaaccatccattgattgtactgcaaattgtcctcaatcactgctcagtggaatgaatctcttcttatctgtaagtctcctattatatctcttagttacaccgtatgggcaagagaagagggcataaaggtttggtgctaatgattcctattttatgtttttcgttaccatgcagcatctgaacatcacattcagacgggatcccaccaatttcagaccaagaatcaacaaattggagtcgaccaaagacagggaacagaagtctgcaggctcatactactacttggatgattaggacaactaccaagaggttcttgatcactaaaatccaatcatgttttctcaatcatacaacgttttatggaatcaacatctaaaatgtttgttttctcttaatgtccttcaatggattcacagaatatagggcattgttcgaattccagaagggtcttttgctcagaggaagttgatctatgagctcggaatattttacgcagccatctgttttccgagtgcataagcacagatgtttctttctggtcaagctcttaattgttgtttcatcagttttgcttctacattttctctctcacagcttttattaactgagcaataaaagtttaagaatctgtaacctttttttctttttggctttgtacttcctgagttgatgatttcaacatttactgtgatgttactactttggattttacaatctattgcctatttttacattattttctttcttcttacacagcgtctaactcactgatataggaaaacttcaagaaacagtatctaaacacctaacgtcaataacactgtaaccaggaagctttttcaaggcattatcctccaccatcttccgtagtcttacagcttcttcccaacctcccaatccaacataagtatttgccaacgagatgtaataagatgcattgtctggttccatttcaaacaaaacttctgcaacttcttttcccaactttgtatccccatgatagttgcaagcgctcaacaacgctccccatacacctgcttttnnnnnnnnnnnnnnnnnnnnnnnnnnnnnntaagcttctctcagtttccctgcccggccaagcatgtcaacaatccaaacccgatgctcagtaactggtttaaccccaaattnttcctccatttgctngtaataacttagaccttcatcaat

SEQ ID NO: 24528 - DNA, 870 bp, Arabidopsis thaliana landsberg
  unsure (1)..(870): unsure at all n locations
aaacaaatttcggtctgatattactaatacaacttttgctttgtttttaatttgttatccgcatgaactgtacgtagagaaactgagactcgagccttgggtatatcatcgataaaatacgggagatgaagctttgtgtagaagtaagtaatctgaatcgtcacattgttgttatctcacgacatgcatgtatatttaggatttcatatatgtttttttagtttcaaatttttctttttcattggttttgtttaattcagtttatcatttgttatatgataattaagtgaatgtcatttcttacttgctggattagacaaaagcagtaattaaagaaaaccatttatcatgactaaactcaatatttaacaatgcagagttattggagaaactcaataggtctaatgatgccaccgggcatgggggtggtggatattccggcaccatgggtatatccttataattatgtccctccaaactacatgatgtattacaatcactttccggcagcaccggcaccaggagaaactagcggctacgccaaccaatttgtaccctttaccacttatcaggttttgatttgttttcttcttcatgtgtttatatttttgtgattgttagttgttctttatttatctgttctttcttgacaatgaaaaatttacagggagtcaacaacaataatcaaccacagacgacaaagccgatgtaaactacaagatgctgtagtatataagaccagttcatgttttagtattaaagaccggttctctcaagttctttaataatatggtttgnctgnttaatgtacaggaagttggtctcccaagttgtatttgaaactaggagtactatgtggcttgctctttt

SEQ ID NO: 24529 - DNA, 749 bp, Arabidopsis thaliana landsberg
caattttgattttgttaaactatgaatgttttttttctagttcatgttgcttttgatgtgaggatctaattgatcaatattatggttcaaaattttagatgtaaactttagttttgtttagacgtacgctctatgatggattagatgttcacataagaaaacaaaaatatgttgtggaaacaatgatacatgtcatatctgtgttttatagaaaccatttagtactatttgattatctgatataaagttccattgacaaattttgtaactaaactagaaaacatgtcatttttctgattttttcaagcaatagagaaaagatatatctctctatttatatgcaccgttgatttccaagttcccaactagttagaacattgccaaaaacttacaagatccttgacacgagtttcttggagatagataaacgaagatgatgtcttcaccgaaaggtctttatacaaatgcttcagcatacttccctcatgacttacttattcacttcaaaaggccacaccgcaaaaaaaaaaatgttatacaagttcacaagataccttttttggtaagttttggatactaagatctaaaatatcttatttgagttgttaattcaacagattaatatgaaaagatcaaacctaaagttaaactaatcatgtagagatttctgattcgtgaaattgttttcattatccatattgtttgggacgagttttcagaatctaccaaactagtaagttggaaagaat

SEQ ID NO: 24530 - DNA, 744 bp, Arabidopsis thaliana landsberg
gatgtctttatgtggatgatatgttaataatgggaacaagtaaagacattatcaatgccacaaagaagatgttgagtgacaaaatttgaaatgaaagacatgggattggctgatgtaattcttggaattagaattaaaaaagagccaaatgagtattcccttactcaatctcattatgtggagaaagttctaaagaagtttggtcactttgatgatgcaccggtagttactctgtttgatccaacgtgcaagctttcaaagaatgaaggtgaaagtgtgtctcagttggaatacacacaaattcaggaaacatcatgtacattacaaattgtacaagaccaaatttggcttactcaataagtcgattaagtcgatattcaaataatccaaatagagaacattgaaatgctttggttagaatattaagatacttaaagtatacaattatttatgttctacattacactaaatttcctcctgtattggaaggatatagtgatgcaaattagatttttggaagtacagatagtaattccacaagtggttatgtgtttacacttggtggtggagctgtgtcttggagatcatctaagcaaacctgtattgcacgttctacaatggaatctgaatttatcgcactagatagggttggaaaagaagccgaatggctaaggtatttttattgaagatattccattattggcaaagctgggtactacacctatgtattcaatggccttaaat

SEQ ID NO: 24531 - DNA, 1355 bp, Arabidopsis thaliana landsberg
  unsure (1)..(1355): unsure at all n locations
gcttgtttctagcaccagaatgacaagcccttgccatcgattcctttttaatgaacattgcaaaagacacataccacgtttctacctggatgttcacgtggagttacccatggtctgagaaagaaaggaatttgcctcttcccttcaggtgttaaagaaaaataatcgtgttgaggtgtgatcactagatcaaatctctcaagatgcgaccttggatgttgcacctggaaaagcagtaaacaagaagaatcaagttataacgaggagaaaacagagagtatgaggccaagatttggcagttgctgatatcagtcacatggaaaaatcagctaaaaccttcatataaaacaaaaaaagctatagaatttgttgtttttttcaagggaaaagacttagcctgaacaacaaaaacattttccatagccagtcgtcttattcagcatacaacgggaatagtatcactaccagacgcagcgttaancagcgggccattcctgtgataaggcagacgacaagtaactcaaattctatgtaaagagatctcaaaatcaagcagaggaaaatttgaacaatacttttcaaacgttttacgagccatagcagcaatctgcttcgcatcatctacttcaaacacattcgtgattcctacagccatttccagggaaacaaattactgccaaaaatctcatttttcaaactgtgaataaaagttgaaggttgtaccagtagcgttaatggataatccggcacagatagtgctgataaaacgatgaattcgtttgtagagagagataggaagccattgaaggattccacctcttggtttagctactctctgaacaggaaaaaacaaactcagaaacattgaaaatgaagaagccagaagaggaatagtgttttagacggagattacataatagaggtggcgatcgaagaggcctaaggatcgaaggagaccgatgcattgattctccgcgccggcgcagccgtttccgatcagaactgctcgtttcaccgtgcggaaaacacatccttggagattctccgataaaccagtgacggccagttcccgtggctgtgttcgtcgcattagaggtgaaacttgaaaggaaaagaaagttcagtgacgagagggattcctgacgagagtgatgacgactgaccagctagaccaaaccgaagttgaaatcagaataaatcgaaaatcaatttgaaccgggaatcggaacgaattaaaccttcttcagctatttcaagcgttctaattttttacgattattagcaagttgatttctaaagagttttaaaatttaagattctaactcttgtggatttctatattttactaaattaaa

SEQ ID NO: 24532 - DNA, 742 bp, Arabidopsis thaliana landsberg
actcaatttcaacactaaaaggaaaatctgaaaggaaaaaatttatgaaagtcgcctcatatatttcacaagaacgtaacgagaattgctgatattgttagcctaaagccttcaccttaaagcctttcaaaacattagctcgaaagtaaccattttctcttccaagaagtaaatggtaacaggaaactcatctaacaaataacaattaccgattgtagtactatcttcaaccctgtgggtgacgatcgctttagacctttgatgactggagttatccattcattcccgtctttgcttgcttcagcttcctgtaagaggaaaaggtatatttcataccgatgaatagaggcgggaatgacttctgttctaggaaaatcggatgacttacaaatgcttgtatgatctgcttcacactttcttttgagaaacactcattgattaccgactgcctgcagatcagccatagccccaaagttaataccgtcttcgtgtgtatatacaccagaggggaaaaaagattaatcagcatctcaagcatgaagaaatgcaatataaataaaattgtgttacttgttaaaaatgctgtctttgtcaaggttgactttctcggagaactcttcaattgtggattggactacatccgcttctcctgagtctaaactcacgagccgtgcctccagatccatccattctctcgcaaaattcgcaggatcataggagctccaaggggggcggggggggg

SEQ ID NO: 24533 - DNA, 1033 bp, Arabidopsis thaliana landsberg
cgacgcactaattgttttttttttttttgtgagggaacgcaaaagagtatgtatgaaaatcctaaaagggttcgtttcgggtttcgtttctaagccaaggcagggatgctgcagtttctgctatccctgtcaagacaatcaaacccttcaactctaacctttgggctgttaccaaaattgcctctaacaacacatcctcctttcctcccagaggaagaagaaggagatgaagaaggaggtaaacccaactgaggcggaatcactgaagaaaccgatacaatctcatctcgaaatcgagcatcctgtgttaatgggttagcgactctgctcggcggcgacccacataaaaacggggacggcgagtctattacctgcttattaacttgttgtgcaccataaccatcctataaccacaacaaaaacatatcatcaatatactaacataaaaatacagtttcttgatgactaaatcaagtttggctaaatggtttaaagaaaggacgcataatttatttaaattggttagagaattggcccactctatgtgctgtaatgagttaactcgaagacgtcttaatccgaaagcgttatcgacaaagtcacaaacacaagaaagatcacatgttttctttaatcaagaatcgtacacgattactctatctatgagaaataaaaaaatctttagacgaaaccgacttgctactgatttttattggtttcttgataaacaaatttcacctaccaataacctaaaaaacaagagagaacaaacaaaaaataccttggtgagtatgatatctaagatatcagtctctgctttggattcacaaagctccaattgatgactgaaacaaatcacaattagcaatttgtaaaaattcacagggaaaacgaattctcatgagattttgaatttgagaagtgagtgaattcatacctgaagtaacaacggagagatcgagaaggatggtgatgggtggtacggagaccaatacgacgtggtttttgacaaacgacggtgggttgatctctt

SEQ ID NO: 24534 - DNA, 826 bp, Arabidopsis thaliana landsberg
acctgtctctggtgactggctttcaatctctgaaactttttttctcggctttagcagttagctcacttcctgaagttcccatcaaaacacctatttccttagttttggccacatactactttatagtttactgcaattattctgacttagcatttgcatttttcagttaaaacaacaacggaagttatacgaagaatatgtgccaatgaaatacagacactacaccaggaagatgaaaaagtgagacatttttattttttttgatagtgtcaacgagtgataaattattctccgattcattcttttgctgatacattttggacgcgactagacatggtgaatggggagatcatgttactcttcaagctgcagcggatagagtaagttttcaaagagataccatcctttgagtttactataatagactacaaaagttttacaaacataccttaaagatcagatcttctttgagcaactgcatcttgaagactcatcaacaaattttacctttattcgctcacatttcgttactttttttacttgaatgactggctgactcagcattactgcagttcgaagccaaaatctgcttagtcacatcctttcgggatcaatcctacatcgagattcttcctcataacaagaaccctcttagaggtacaaagccctctttctacctttatgctctaggacaagtttactcgttcctaaccgtcttgaatccttttgttgtactgcaaaggcttggctcagcttctggagcgaagtgcattacaattctttatacgctaatggaggtaaaaaacttagttcctgcactcaactc

SEQ ID NO: 24535 - DNA, 733 bp, Arabidopsis thaliana landsberg
aaaaaacactaatatccaaaattgttatattgctttttttttttgcttttttctatttttaatttcgatttttggtagcatcgccgtatcgtcgcatcgatactcggatttagtaaacaagtgttttttagcaagagtttatgcaagtccgcttcgattaaagtatctaaaccaaaatccaaacacgtgggagtttccgttttaatttctaattatattatacccttcgttatttaagatataaaacagcaatttattatcactaattgataaaaccttcattgcaaatataaactagattttaaaaataaaatttgacttttaaaatacaatgtaatattattaatgatataaaaacaaaaaacctaaaatggtattgaagtgtcaaacagaggaagtatatgatatatatgtaattaactagtcaaaatctgctgtgataacgaccaattctaaacaattataaaatcttctaaaaattaatgagaatctactatatttaataactaaaataatagaaggatgacaattgacaactagtaacaatattgaagaagtcataccaaatatattaagacgtgtataaaaagggggtcataaccgaagagtgaagaggaacaagagacaaacacaacaggatacttaccaaggacggagggagtctctgctgaaacccacctctgggcgtatgggatcgcaagtctcaaacgcaagcgacggaaagaaagaccaa

SEQ ID NO: 24536 - DNA, 1869 bp, Arabidopsis thaliana landsberg
actcttacatttttcataaattttaaattttaataaatagtagataaagttatcttttagaaaatatagcaaaaaacaacaactgtaagtagttttaatgttgaataatttaattgcatatcatagttaataagtactaaaaatcattaactaaattatgatatgcaaagttgtagcaaaaataggaaaatcattcattataattcacccaaatctttgacaatacgaaaaaaaacaaatatgctttcatcaattaagcgtatctttcttacttcatcactgaaaaagctactcacttcctccttgacttcttaaggtttcaaatgcctcttccaatgccttcaatgcattcaaagaaactatggtcattcgatataatattgttggaaaagagagacacacatgaacaaaactctaaccttatagaagagggtggtgggttttgaaaacactcgatgacatagacaatgaacttattgtgtagctcaattagtagttgattagtagttgtgtcgtcagcgtgtttgataagggcatttccctcttcagtaatatgctgtttttatacacacatatgagaatcaatgtgagttaaaaaaaagaaattgatttggaatcaaacagacagtaagtttaaaaataaaatgaaataaaccttcttgaataagtctgcaacacgtcccaacctcttagggattggaagataaagactgtatatcctagagagatcattcttctgtgagtatatatatatatatatatatatatatatatatatagcaatgctccatcaatatatattattaattttaaatgataatttgtttgcgaattataaccacaaaagtcctctttaccttgtcatctcttagcaatacactaaaccctgagtgctcattttctaggcggttttttgtaaccataaccaacaattcgttttgtattttctgcaatcagaaataaacaaccaagttcaataactatcactgtttgtaaacagctcaaaatacagtcagaaatgaccaacctcaactagtttgggttcggcaattgaatggagatagagagtgactctctccctctccatctttagacactcctcaacctgcaatataaattactgacgttaatacatatacataaactttttctgaaatcgaataatagcatagtagtggtagacatgcctttatcatgtaatcaggacaagaatcctcctcggtccaccttgacgccttgcgagaatagtaagaagcagtatcttgaagcatgaagctttcaaaatcctcttcatatttttccaaggttcccatcccattctccacatagatatctaatacgttcttcactagtgccctatctatctgttcgccttcacgttctttatgaattttgcatttacaaaatagggtgagaacaactaaaccagagatcgctactcaattagagattaataacatatacacttacaagtgctagtagcacatctttggcctcggactgtatctcttgataaactaggtcgtgaaaggatgtgaagccaacatcattcagtgttggaagacctctccgagcaacatagaaacggtcaagataaaagcagaagcgagataaccatctaaccagaattttatggttagcccatctcttaacaagctctctcagcatatattcaccatgcctctccctcatagacggcaaaacctaaccaaatatgtaaaaatattagttagaccctttgctcaagtcaaagaaacaaatatgtaggtggtactcacagtttctttattgtaatgatcaatcactccacgatacttattataaagctcttgtgagtaatcattaaggaggttggtggagacacatatc

SEQ ID NO: 24537 - DNA, 1182 bp, Arabidopsis thaliana landsberg
acataaggtacttcgtaaaggtgagacagtatgttaatagtgccatcaaattcagaagttagactctaaaagaagaattacttaattttttcttgaaatgttatgaagattttatcccttggcgaagagaaagatgcagccaagtgcgtttgtgtaaacccgggaaaacttgcgaaaggagaaggtgcaggtactttcgttgagcttacctacaaaggcggtccagaatcgatgcacgcttccatcatctctatttaaaaacagaacctgcaacgtttgcccaactctgctaattccatatataatagaagcctttggttcctctcacttttcatgatacggttaaatgcaaatgtaatattcacatgtatagtatatcttaggcctgcgacttttgtccgatcgggtgattcggtttcggtttttcggtttctcgggttattcggaaattgaaatctattccgaatagaaccgactaatgattcggttcggttcggttcggacacggtttattcggtttttggcattcggtttttcggtttgtctgggtgttaaaaaaaaaaggaaaaaaacttgtgaaaaatggtgaaaagccttcatttctagattgaaatccaaatcaacagtgaagaagaagggcatcatcaacggaatccaaaaccacaaagaaaaagcaagaagaaactaaagcaaatcaaatccaaccatcaatttgaaagcattcagatgacgaatccaacccagaaaagaagaagaagaagaaggatcgaagaagaagaatgatcgaagaagaagaaggattgaagaagaagaagaatcgaagaagaagaatgatattagtaatttagaagaagaagaagaagaattgaagaagaagaatagaagaaaaagaataaggaacgggcattatcagacaaagaagaagagtaggcggctagtaatctaggttaggttagggttttattattttcggttaaccgttcggttctcatgaaccgaaccgaaaatctcggttaaccgaaatgattttaaacacttaccgatcggttatactcaattaaccttaaccgaccgaatttgtccaacctcggttcggttcggttcggacaatcggttcggttcaaattcaaggcctagtatatcttccatcaatttagattttttgcctcaaaggaaatttcg

SEQ ID NO: 24538 - DNA, 822 bp, Arabidopsis thaliana landsberg
tgacgcatatcaagaactgggagctggtctagctgagaaatatggcgctggcacttagcctttatgctggtttctagatggatcgaggactcagagctcattcaagtatcctaaagacttggaattcacaccttacaaacctttttaaggttgaaccaactttgtatctcgagcaggggcatgggtcgcttcacaaaacacaccatcccattgacaccaacgggaaccatttaaccaagattctgtaacagacttgttcttcaacgctcctgccaattcccggagcgcagataagtcgttgggatgacatggttggctcacagaagaaccaacaaagaagaccaataggagaatgatcaccatgactactatcaaacagagacaagagtcttctctagccagctcaaatcacaaataaagactaaaactttcataagtcacatgctcatgtcccaaaaagaatcaagctttaacaacttgtagttgaagcaacattgtggaagcaaattgaaatcagcaacacgtatcttcctgaaaatcgaatcccaataaacagtatcaaaacaaaagcagaaactaaacgctcacatcccaaaaaccatctcgaaaatactattgaagacttgtaacttaagcaaaacaaataactcaaaaacataaacaaagatagtcaaagagagtataaagtaattacctctaagcaccagcagcttaagcaattaatcacctatttcgtcaatcaaaacctttaatttgccaattcctacataaagttaagagctttcgagttcacagccgccattgaaacatcgaaagtttagt

SEQ ID NO: 24539 - DNA, 994 bp, Arabidopsis thaliana landsberg
gaatattcaataaaggttgtttccattagaaatcattaacaaagactttaaaagcaaaacagaacaataaatcaattaataagttcaacgggatatagtggaaaagaaaacacagatacacaccattggattgaaacagttgcatttgtggtcttacataaacctacgtgttcttttataagccaaccaatacttttctcttttttttttttggtttgaaacgagttgcagactttgagtggccccaaagaagaaagaaagatgcaatttcctttggtttgatattctcttcaacctcttacctctctattctcgtctttagcaaaatctcaaaagacaaaaagatattgatgtctctccaacgacccaatgggaactcgagttcgtcttcttcccacaagaagcacaaaactggtaggtgttgaaagaaacttatctaatatttaacttaatttggtttagagaaattggtttgtataattctcagaggaaagtgatgaggagttgttgatggttcctgacatggaagcagctggatcaacatgtgttctaagcagcagcgccgacgatggagtcaacaatccggagcttgaccagactcaaaatggagtctctacagctaaacgccgccgtggaagaaaccctgttgataaagaatatagaagcctcaagaggtaatcaatgatgagtaaaaaaacttttttttcttagcattcgatttgtggaattgaaatggtaaaaaagaaactgtggtgaaaaattacagattattgaggaacagagtatcagcgcaacaagcaagagagaggaagaaagtgtatgtgagtgatttggaatcaagaacttatgagttaccagaacaacaatgaccagcttgaagagaaaaattctactttgacgaacgagaacacaatggctttgaaaaaggcttattaaacaaaagggcctaaaaactgatggaccaatcaccttaaatattttaccccttttaaat

SEQ ID NO: 24540 - DNA, 3481 bp, Arabidopsis thaliana landsberg
ggagaagttggctgctcaccgaactctagttcttacaacacgatgtttagcgcgttatggagcagtggagataaaatcagagcgttacatatgatattagagatgatgagtaacgggatagatcctgatgagatcacatataactcgatgatatcgtgtctgtgcagagaaggaatggtagatgaagcttttgagttattggttgatatgaggagctgtgagtttcatccatcggttgttacatacaacattgttcttttgggattctgcaaagctcataggatcgaggacgcgatcaatgttttggaatcaatggtgggaaatggatgtaggcctaatgaaactacttatactgtgctcattgaagggattgggtttgctggatatagagcagaagcaatggagttagcaaatgatttggttcgcatcgatgccatttcggagtactcgttcaagaggttgcataggactttccctttacttaatgttttacagagatcttctcagacatttggttattaagtgaaagtcgagaacctagataactgatccaggttttcaagagagggtgttcttaaaatacgatcacgtagttctcaaggtaccaatggaaagtgtaaggaaacctcacctgtgcaacaccgagagattgacagtccatagctgcaattgctacctgctcatacagggtccattctgcacaaataaaggaatacgctttgtattttagttttataaaacaaacataatgtgcaagcagctcttttagctaagacaacaaaaacaaatcgaactagattgagatactacaggtgcaaaaagtctttgcttaattatgactcttcatcagctaaaactatgtttaatttcccaactaggaatgaaacagtgaacatataaatccaagaataccagatttagcattgagcagatataacgtagatcaagtatcagtaagcactggaagtagaacaatatcaaactgaatttcaagtaatttcatttaaatgaaactcatgaattgaagcaattgagtggagcacgatttaggaaatcaacaaacaaagacactctcaatgagaaacacatcgaaatcaaggaactgaaaatcaacataccatctggaccaagagcggatcgctttcccgaatcgttcaagatcgagagaccatgcttgagcacaatctctgatcggcgaaccttgagcttacgaacgaggcacagatactcccaaacacctcctcctccattctcaacttgattctcgagttggtttaactgtatctcctccgttttcgtcaccatctctctctctccgatttgctctgaaccttatgaaatttgtggatctgttagtagtggaaggtcgatcaggaaagtctctttctacaaagaagacattgacatgaaccggttcggtttaatattcgcaccgatctggtttaaactttagagcatattgacgaacgaaacgctgcgttttaacaaaacatctgattcattggtatatcaatttggttgagaatatatttatcggtttgttgggattgaaagctcaataaccgggtcaggtcagtcaatggggaacgaaacggtgcgttttactgagtattcgatttcaatgtcttcgccgttccggtgaagaaggcaatgaaattaagtagaactgtcttgtcttgtttgccgtctctgctaaaaccctactcgagcttgagctggacaacgaaaatagcgacgatagctacaaactttgaaggtatgaaaacagtagatgaagctgacgtgggcatctcctgttttatctcccagctccctggcttccgtggaatcctcaaacaaaggtcgtgagatcagtttacgtttttatgcttcttcttatacacaaacgttcttgttccatataggagaaaaattgaaactttttttctgtatttatgtttcgtagatacgcagactttattgttaatgaagtagatatggatggtaatgtggttcatttgacatccttggacttgcctcctgagatggtttgtctctctcctcatttcaataagctatgttttgtttcgattgtatcttttagttttgtttgtgccaatgcgttgttgtgtgttgttcaggctgtgaaggaggaggataaagcgaaaagttgtgataatgtaccccaaaattatacttctgcagttgagtctttcaaatctatttccagtgttactgatgcagagcgtttggaaatattgatcaatcaagtcacctcaggaactgatggtgaagtcttaccagttgttcttgatccaagttctgacaaatccaagagaacggtataggttttgattgcagagttacatatactgttgtcgacattagcttttgacttcttactagattttctttttcgtatactactatccaggctatccacaactttgttaaagagaatttcaagttcctagtgactgacactgtcgacggtcctgattctacttcaaaatgcatccgtgtgcgagtgaattcaggagccaataacaacagaggtaatagatcaaaaaaacgaaaggaaagaggcgataagccttttgatagcagaggttcagagcattggccagagcatgttggcaagtttctcaggtaatatctttaaatcaacatttatttgacattaaagttactatatattggacctagtacattagtctatcctgaaaaatggatacctgaactggatttcccactttagagatgtagattagcgtcttaaaattactgatacaataaaacgaaagggtgtattttatacatcataatctctgtagtgcttttattttattaatgcatttggacgttcaacctatgtgtcatttgatttatgagtcgtttaagttaataggttccatctttacaaggagaacaaagatacacaagaggccttgggattgattggaaagatgctaggcgttcaggtgtttcccatcttcttctatccatctataaaggggctgttttatctctagccattgtactttccttgataaactgtgtattgaaatggtttttgaattaacagccaaagtcattcgtattctctggaacaaaagataagcggtctgtttctactcagcgtgtaagttatctgtacgtgttttctttgtaagatgagtttaatggttgcaatacataataagagaattgggctttttaggtaactgtgttcaaacagcaagctagcaaattggctgcgcttaacaagagattgtttgggatcaaagttggtgacttctggtaagccaacatattcttgaatgttttcatttggacatatttatgtggtcttagtgttaatgatgattgttgccgttttccagcaatgtcaaagagggccttctccttggccagctcatgggaaacagattaaaaatcacaataaggtaagaatataactggacatttataaaagaatctctatgatcctctgcaacttcag

SEQ ID NO: 24541 - DNA, 1050 bp, Arabidopsis thaliana landsberg
taacttcatttgggaatccaagaaaacatctgtcgatatgaatatgaaccaaagagagtgcgggacttatatgattaatgtgatagagaattcctctattggatggatctcgcggattaccatgaacttagttttgaacaactctgttataaatataataatagaaacattcctgactgttacaggatctttatctctttaactttcatgtgtagattaagaagttggaccctgtaaccaaacgtgttgttactgtcgctggaacgggaaaagccggttttaaggatgggaaagtcaagggtgctcaggtctgatctaggctagctactacaatcttatacattgatcaaacagacaatgtgatttgttagtttgacacattacttttcctttttctttggtagctttcagagcctgcaggacttgctataactgaaaacggtaactttcttgtcctttttaacagttattaataagggatcgatcgtgtgaaattttcgttgcctctactgttttcagggaggctgtttgtggcggatacaaataatagccttatccgatacatagatttgaacaaaggagaagactcagagattcttacattggagttaaaaggtgttcaaccaccaacgccaaaggcaaaatccctgaaacgtttgagaaaacgtgcctcggctgatacaaagattgtcaaagtggattctgtaacgtcccgcgaaggagatttgaatctcaaaatctcattaccagatggctaccatttctccaaggtcgagatctcttcccactttctctctttttccacttcttattttgtctctctcgatctttaacaagtatatatattgcttgttgtgcacaggaagcacggagtaagtttgtggttgatgtcgagcctgaaagcgcagtagcaattgatccaatggaaggaaatctcagtcccgaaggttcaacaatgcttcattttaaacaatcttcaacttggcttctgttgggaaaatcagttgcaaggtttgcttcacatctttgataacctgaactaagtttgtt

SEQ ID NO: 24542 - DNA, 1871 bp, Arabidopsis thaliana landsberg
  unsure (1)..(1871): unsure at all n locations
agaaacataccaaccgtttagccgctgaacacagtccttatcttcttcaacacgcgcataatccggtgattactctctttaataaaagtattcgtctttagataaaattgataagagaagaacacctttcgtttcaattagggagctttcttgcaatttgctaagtcacaactggtttagattgtagctaaccggttcttagtttaaaagtttggaactttttttattatctagattgatttcatggtttatgtgaaaaaggttgattggtacccatggggagaagaagcttttgaagaagcaaggaagagagacgtgcccatcttcttatcaagttgtttactttatcctcttttgatcgttttaattactgcttgattagattccattaatgacttttagttttgtgaaactaatttggttcctttttgttttcaaaatctcttttatatggaatcttgaagttggatacagtacctgtcactggtgagactttcaattgttttcttggatttgagtttgacttcttctttttactgaattggaggattaagagaatgaatgacagattaaaagactctggatttgttagtatcattactcttctctcctcataggtgtaattctaatgaaggatctaaggattttataaattgaaagtggagaaaacttgtagcctaagaactcagtgtaattgtttgagatgtcaagagtagagagcagagaagcttattttactatcttgaaatgtaagtttaagtacagttaactcttttgttaggtgccatgtcatggaagttgagtcatttgaagataaaaagtggcaaaactcttgaacaattcattcgttagtatcaaggttagcgtttaacacggaaaaacgttttaaagcacagtcttcgaactggttactgttgaaacatgttagtaacatgtctatgcaacaggttgatcgagaagagcggcctgatgtcgacaaggtaaactactttctgcactctttgatgtcttgaataaattgctcaaaactcaaattttcatttatttctctgaatgcttagtttcagaagtatcttttctttttggctcaatcatgttgtgggtcatattaatagcttcttttactttgttggagaatatttgtgtcttcggtaactctagtaagagatgcaaaaccttagaaaccatagtagacttgtgtagaatttgttctagctggatcagtgtctactagagaaagtagccttgactatattcatggacttacgattctttttactggcactttaggtttatatgtcgttcgtccaggctctgtatggtggaggagggtggccactgtcggtattcctttcacctgatttaaagccgttgatgggtggaacctactttcctccaaatgacaattatggacgaccaggattcanaactctccttaagtaagtaaaccctttttctcttattgtagaatcaaacgctcttggcgaagactatagttgattcgtttatgttctccatgttttctttgggtttggttcaggaaggtgaaagatgcgtggaacagtaagagggatactctagtgaagagtggtacatatgctatcgaagaactctctaaagctttatctgcaagtactggagctgataaattgtcagatgggatttctcgggaggctgtgagtacatgtgcaaaacaagtatgattcgactcgcggactctagaaaaatatatatgattgatacatcaacatgaaaaggtcttctaacagtgagtgtttgtgttaaagctttctcggagctatgattcggaattcggtgggtttggatctgcacaaaagttcaaaaggccggtcgagatccagctgatgctt

SEQ ID NO: 24543 - DNA, 1057 bp, Arabidopsis thaliana landsberg
gtccgcagatgcttctttacggttattatggagatttggcctcatggaaattcttctacctatccagtttggtgaattttctttagcagtgtggcattatggtgtacacactgagtactttctgttgttcacatcgaaatcacttatgtattcgcaggcatcttatcttgtttcccaagggttccggaggcgtgatggaaggtccaacatgcttctggtacatatttttgcattctcagttagacatggcaacttcctgtctagtagtagtaacactacagagtgaaattatggttccatagggctaactgattacccttgcagtcgctatttcgcaaccttgaccgacttgtagcacctgatcgaccatgcagcgagttcctctggtgagaaatcttctttaatacatctatcttagtaattggttttgtctggttaacaaattttgggactattaacctcaggattgggatcttagcattccacaaagcattagtcgatcagcctcgggatcccacggtagtagcttccttctgccttgccatctacagtgaagtatctttatcagaagccatcgcaattgcaaggagcaactcaaaacaacacaactcacacttccaagaattgtccagtcctgaaaaggacactgctgactcagagagcaaaatatcgcagcaggtcataaaattagcagagtctataagatcagctgcgcggaaattgaataaccgagactacatagctaacgcaatgagcaaatacccgcaagcaccgggctctgatatggttggtacactcacatttcaataaaacattgcgatcacaataactgaaatgtttcatattcttcattgagattattgattgttatctcaggtattcttgtcaagacttatgttggagagagtagagaaaatgtttggaaatgtgagaagaaaaggaaacccagagagagatgatgtcccaagtttagagcgtaggataaactacaagtttcttgcccttggagactttcatgagacacgtcgtgtttttgctaggattgtctttgatacca

SEQ ID NO: 24544 - DNA, 1217 bp, Arabidopsis thaliana landsberg
gatataaaaaaaaaatgtattgtcctaactcctaagagttgaaacttgtgcatttttaaaggtaatagttgaaataacagataaatagttatgacttattgaacttttactaaacagataaatcgttgatgtattttattgtatattgatattcactgccttacaggttttcaatttatcgaagtcacagaacgagcttatacgaacggactaatctgtattaacacctctaaaatttgatgggaagcctactgagccaaccttcttcgtcaataaaggtaagattcgtaaactgaaacgtctttttcacttgccttcgtgagccatggcactctctttgacgtgtctgctccaactccagtgcaaccaaactccacaaacgttatatgcccctaaaataatatcgttttgctttctttttattaagaaacatatatactttttctgaaatatatatcatatgaaaatgtaatgaaagttaaagagattatttactcttggccttttgctttcaagcatccaaccaattggcaaaatattgtcgctaaacatagaacggtaaaagataacacgtgaataagatttccacgctcgtcccagtaacgccttgccgcttcccataacagtgcagtccttaaacacgaaccctcccttatccgtcggcgagtcccttccttgtgccgttatcgttccatacacttcattcggtgggtagattccaacccttagtttcaacgtacatccctttttgttacattcaccattactcagtttatcaacaaatttatctttataggaaatagggtaaagtactaataaaaggactatcttattttttccttagtgctttcgtgatcaataccaaaaatgtttactctttttataaagtttcttcaactaaatttacttttgattaacatatctttagatatactactcttacgagaaatgttaacagtagattttgataatatatatatctaggtttacctcaaaaatggattgggcaccgccaaaaatgaaatctatgccaccggagataacacatcgtttgtagtagtgtctgccgtaatcgtcgtaaagcgtatcttgaaaaccatcaaaacttgaatcgattattgcatatttatctccaagcatcatcgcagccaccgctggtttggttggtgagctactcgatgcaatattatatttattctagacaaaataaaaatcca

SEQ ID NO: 24545 - DNA, 1093 bp, Arabidopsis thaliana landsberg
  unsure (1)..(1093): unsure at all n locations
tcatttttactttcattgtaggggccacgtgttgaagtcttgaataggggtgaacattttttggtttatttttagagagtttggatttggtttcattttcccaaactagagtttaatagagttctgaccgaagttatttatttggtgcagatcagtttattcgatcattcatcaatttcttattcattatttcatatttctaattttttttatgaaaataatcgatggaattggtttcccaaaattttgtattaactcgtattttcataattttctctttaacaggttatacaaatagtagttgtcaactttacgtaaattacatcaaattttaagtaataaattttaaaattctagatgttgttaacaatgacaaacaaatttatttagtgacagcatttttattctgttagtgtatacacttttgtttttgtcaaagactataaacttaaaacatttaaatatagataggagtagttgaatcatctttgtaagtttgactattacaaaactgagtcttaaaagacattttatattaaaagatacctcagataagcaaactcttttacacgaaaatagacacttgttcctttcaccatttattatccctcccttaccgtgagcaagctaacgagccgagaaaactacgcacgtaccaaattaatactacaagtaactactaccatttaccaacataattcggtaaaaaaactaaacaaaaatccaaaatttgggagtgatcaaactttattaagagagttactaactagggtcacacacacatacatacatacatagagcttcacaccaaacaattctcgctgaaaccaataaacttggtcttatgtcttctttcatttaatgtatatctctctcatcttcttcctctctaaccactttcctcccttaatttctatccctatatttattttcctttcattttcctctccaactaattatacatacactttaagctgaaaaaaatgcagccgtccggtgatccggcgccggaaaaggagaaagagatgacgcagccaaaagtgtcactgcttaagctcttctccttcgcagatntctatgattgtgttctaat

SEQ ID NO: 24546 - DNA, 801 bp, Arabidopsis thaliana landsberg
caaatcaacttatacgttagaacaatagtaaaaatcgtaaacgcacttaagactctttgatccgtttactgagtaaaaaatctctgaaagcttaaggctcaaaattaaggcccattatatgttaccgtttcacaacgctcatattttttcactccaacaagtcaagagcaaaatattggaaacctaaattatgactcttaaggcccaaaagtaaggcccattaagtgtgatataacgacgttaaaataaatgaattgccaaaaacaaattagaagaagaaaaatcgatggcggggatactagtgaacaatatcctccctcaacctccgattctccgatcgctttcttcttcttcgcgaagaagttcaattcgaaccctagttatggtcaaagcttcttcctctgaaccttccgagtctgtttcagtctccacgaagaccagtgacgacactggagctgttgttgtgttcactgctcctcctggtttcaagccaccggagccaaaacggttcgccgtcaaatccggaaaactcttcgatgtcttgggtgcagcaattggattgtttttccgattcggcactggtgttttcgtttctgggtaatcgtttatttctctttcccccaaattgagttgattcttttttttagcttgagttgagtgtgtacacagtcgaaagcttgatgatttcaattgttgttatctgcattgaattgatttgatttcgttgttgtatctgagtaggtactctgcatcttttgtgactaaggaagagattccagctgatcagtatgcgttgcgttt

SEQ ID NO: 24547 - DNA, 1227 bp, Arabidopsis thaliana landsberg
acgcgagcgctgtgtcgtttttagccttctaaagcagctcgtgttccaccacagctacttgaccctactttcttaatctgaaattctggatgtcgcttaaacgcagtgcactaccacatggggcaaagatgaccaaatttcggaggggacaacactgggcacaagctaaaaagctacatacgtaaaatgtgacataacgtgcaaataattaaatcctgacattaccgattcaggcttactaaaacttgtacatatcttcaaaagataagtaaacaatatatatactaggcagaaagaaaaatgacggttccttttaaatgagttaacatggccatgtttcttcaatttggattgatgacatctatgacaacgtcttgttgagacaagccaactataccatttcggaaactgctttctgatgaccaaatccttagtgttgtttattactgcggtaaagctgctgggatgatgaggcttttagttctcgatcatcattagtgaccttcactatccattcgcagataatcggatttacctcttctgggatttcatcgtggggacagtgacctttacttgcaaatgagaccagagtcaagaagaatggtatatagactagtggatcggaggtgtatagagctttagcagttagttttatgttttacctgctttaactttctttatcaccatcgctggacaaagctccttcagtaaggctactttcttctgcggatccgatatgggatcttccattccctaatacatgaatgaaaccgatgaatattgatcctgtgtaatctcctaatagaagttagaatgaggatgcaaacaatgtttgaaattttgatacctgtattactagagttttttcctcaaaccctttgagtaggtaattcaaaggaagcgaaagatcaaagccaaagatactttccaggaccataaccacaccagggtctcgagactattatgtgtattaaggtaatctcactatcttcaatattttacttgtagatcatgaatcagttaatgcaaaaaaaggatcctgctcttagcatttcagtgacaagaaagtcatcagctctctcaggtttctgcatcataaacaagcagttgggttagaaatccgacacaatgatgagcatttacactatactcatacataatgttgaaatcttcctattacttacaactggataacaatcctttaatagctttttgacattgagttgt

SEQ ID NO: 24548 - DNA, 1043 bp, Arabidopsis thaliana landsberg
accttttagatgtatgctattaaccctaaatcctcaatttctcgacctcaatcttgctatgttttgggtgatacttcaatggtaattgatatattattcttttatatatttgtggttttgttaaataaggtatcaaatctgatgctctgaaaaagtgtgatttttttactggattttagtctatgtaagtatgtattatggacagagttttaaacttgaatccgaaccatataagaccggaaaaatttcatgctattctcaaactaaaagaaacgattaaccataattagatctattaaaagtggattacatcaatcaaataataatatgggctgtgataatatagttgtatcaatactcgggacaaaaatgcaacacgctacaatggtagattcaattataccgtatgaatgaaaacattgcatgtgggctacttcttacgaagagacatgttcacttccaaaactagtactagtcaaatgattcgacataacctgaataccaaatgctatatcaaaaatggcaaatattcaactaataactaaaaagaacaatacttttaattttcttattaaaaaagttctagataataaccttttgagatttgattttcgaagatattaataacggcagattactaaatgcaaaattacaagaaaaaaatttatattatgtgattttctagtaaatgtcgattctaccgtagttgactacgtgttggcgatgaatcttctgagcgaattttcgggaaagtttgacaacatcatctatgtcatcaatcaccatcccccgcttcactgaggcatgatcaatgctctcatggtagcatacaaagtcaaacataagtcatactcatcacccacaattctacaacaatatgcttatcataggacattaaaatcaaggacgaggaaactacaagagctaaagacatcgcggacaaaaccatataagtagtggttaatacaacaaccgttcactcatacgattagcactataataacacctcggtcatatacactaatcaaaaataccaatccact
